United States Patent Application Publication US 2008/0114160 A1 - sequence listing, part 40

SEQ ID NO: 9849 - DNA, 74839 bp, Oryza sativa
ccacaagtccctcccggctcttttttctcttcctcttcgctctcctcatccagtcgtcctcgcagggagcggcggcaggagcatgccggcggacggaacggcggcggggcgaaggggcgggcggagcggcagtaggccgcggcggcggaggttgccggaggaggaagaggcagaggaggaggtcgccggcgagcgcgacagctacactccgtcggccgctccgtccgcgatgcctagccggacgacggcgcccctcctcactcggtagccgcacgcgccgcctccctcctcgcccggccgcctccgccgacgtcctcgatggtcacatccgggtcgaagctgcccttcgttgcccggctgccgagcgccgcctccctcctcgcctggctgccgcgcgtcgcctctcctcgcccggccgctgcgcgccgcctctcctcgctgggccgccgagcgccgcctccctcctagccgggcagccgagcgccgtctccctcctcgcccggccgccgcgcgtcgcctctcctcgcccagccgccgcgcgccgcctctcctcgccgggccgccgcgcgccgcctctcctcgtcgggccgccgcgcgccgcctccctcctcgatgggccaccgagcaccgccgagctcctcgccaggccgccgtgcgtcgcctctctcgcccggccgccgcgcgccacctctcctcgccgggccgccgagcgccgcctcccttctagccgggccgccgagcgccgcctttgtcctcgcccggccgccgcgcgccgcctccctcctcgccgggccaccgagcaccgccttccttctcgcccggccgccgcgcgccgcctctcctcgccgggccgccgagcgccgcctccctcctcgccgggccgccgcgcgtcgcctctcctcgcccggccgccacgcgccgcctctctcctctcccggccgccgcgcgccgcctccctcctctcctggccgccgcgagctgccatccctcacccggacactgcccgccgcctcggggatgggagaagggagagagaggaggaagaagaggggctctagttgaaaagagggagatgctgagaatgacatgtggggcccacgtgggccccaccatttttttattaatttatgtgtgagactgacatgtgggtcccacgaagtttattattttttcggatcaaattgccacgtatgcgccacatcaatgccacatcagatgaagaccaagtcaaatttgccacgtaggcgccacgtcagccaaaaccaccctcaaaaccgtcgagggacctcatctgcactggttttgatagttgaggaacccgttgtatctggttttctggttgaaggacgaaaatcggattcgttgacaagttaagggacctcagatgaacttattcctttctacacatgtgcctgagctgaatgtgtcacgaagggcatgtttgaaggattttctagctgcggcagttttccatataattttcagtttccttaaacggttcaaattatcacctaaattatgagaatatatggtaaaattcagaaaatgaattataaaccataagttcaaaaactgagtttctcccgattctcataaactgactatcaaccagcagaattttagaattttaagctcccctaaatagaacagaagaaagagttgaaacattaccacatgattaataactattataaatttttagaaaatatttgtttgatttttgaaagaaagtttctaataaaatatcccatttagcaacttagaaaacgtagaaaaaggaaatagctaagctaatcagctaaaagaacagggctttacaactaatcccttcattgcttggtgaacaacaatctcttgaatgaaatttcgtaaaaactgaactaattcacaccccatcagttaaaaaatataacaacttctagcatttcaaatttgttcctagatttagcatttttttcacctatttcatcatcttcatctaaactatcatgccattttttttattttagcttcttcatttatttcctcatcctaattgatcacaatcatcatttagtttcacattaatttttagttcccgtgaaaaatttcagaagtgctttaggacggaattagctacctattgtacacaatttacatggaacggtcactgatcatcgctgcatatcgcctgtatgagtttctttatttcgtatcctctgttggtttcttctgggagcacttgtcaagggcgtcaggccctcgggtagccggccctcggctacgtagcacgtagcctcggtctgtcgtcttctccggcgaggttgccccctgccgcaggcttagttgagagagaggagattagattggtaattatttgcttaattcaatttttacccggaatacaagataagtaggccaccggccaacaaacttagaaactactaatttggaaataattaaactaggaaataactctcctaaaatcaaggctagctactatcctcggccctgccttcctgcgcgctgattgagtctgctacggacgctcgggccgcggctctcctgacgtcgtgggctcgacgctgacgcacataggtgcggccccacatgacatctctcccccccctcaagatccagctcgtcctcgagctgaaaatccaggtacacggcacggaactcctccaagtcttcccatgtagcagaagaggccggctcaccacgccagtgcacaagaagctggcggacaccgcgcgccaagcgagcgctctccacccgaatcggctcagggacaacagcaccatggtggatgtcggggagcggcgttggagcggaaagtcgatgcagaaacgtcacgacccgtcagccttcttaatgagaaggactggtgaagagaacgccgagtcgctacggcggacgatgccctgctcgatcatagcggcgcactgccgttccagttcatccttatgggccgccgggtaccggtacggacgaacagcgacagggggcgcgtccggcttgaggacgatggtgtgatctcgagcatgctgcaggggcagccccttgggctcggcgaagacgtcgccgaagtcggctaggagctcatcgagtagcgactcgctggccgctgttgtgactcggatgcgtggtgcaggagacgacggcacgcctgcccagcagatggtgcggccgtggtactggaaggacatcgtccgctccgtgaagtcccaaacaatcggccccagagacgccatccactgggtgccgagcaccatgtcgtaacctgcaagtggaatgacaaagagatcgacggtgaagagcgagccgtcgatggagagcacggcctgtcggatgacgccaggacatgcgaccttctcgccattggccacagtcgccgtcatgcgtgggcgtggctggaccggcagacccgtgcggcacgctgcctcctcggcaatgaagctgtgggtggagccgctgtcgaggagagcggtgagggtggtggcgccgacggtcacctgtacctgcatggtgtcggcgaccggtacgccggcgatcgcgtggagggagaacaccggggactccaagtcctgcggttcctcagccgcgtcggtgtcgtcgtcgtcatccatagcgcagtccaagaggaacaagtgcttgcagattttgttatggccacggctgtacttctcgtcacagttaatgttgagattatgggtatataatgatttaatttattccataaataaatcatgacattacagatgaaaactagcatgaacgcctcattagatctacacatgtaaactacgcagaataacatgaacagatcaaatatgcgcaacatattgaacacgtaccgaggtgacgaaaagaccggctgcttggtcgaaacatttcgcaggtgtctacgaaggcacgaaacacgcgagcgaagaggaaggcgagccgtcgcgaacgaacagggagcagtcgcgtgaagcgcttcccaaaaaccttattgccgccttctcccggtgcaggacgtcaaaggcagaggttccggagacctgctctcccgatcgctggtgcacgccggcgagcgggatggagtagtctacgagcgacggcgcagtacagagtaggaggcaaaccctagattgattttcgcatatattgcgtgaagacggcgggtcggtttatatagagaagggtcgcttgatcagggcgcccgcacgatctctactgcgcgtaaccgaaccggataagtcgcgcgtaacttatccggactccacgccgtttgcacgcaccggatttttcggaacgtttccaaaacaaaacgaatccgaatttgcagcaaaacaaaactgcaaaaggaggctgcatctgcgcaagggtgaggagccaatttttcggaccattcgacgcgtacgtcgtgcacgcacgccgcctgccatgccatgccatgccatgccatgccaggcgaggcgagcgagcgcgcgcgtgtgtttcccctcttctctccaccacacatgcttcaagtggctaggagggcatcctcccttttaaggaggtccccctctcctagaataagcaaggtggtactaaactccacatgcatgccatcccatgaggtgggcttttgtgattttccaaagaattaatcttcgagtgggctaaggcccattcattaattccaacaatcccccaccaaatctcaaaatcccactgagatttgccttttccaatgtactgtttatataccagcggttcgatggagaccaattaaggttgaacatccacctagaactccaagctacacttactcacaacttgaacaatggactacgccttgaattgcaagtcttgtgcaagcaagtttcactcaaagtcttatctggtactagaccgtctgtagactacccctcgggtggagcgtataagtcatactcctaggtctttagtaagcttcctagaagattcacccaaaatcttcatagactgcgaccaacagtcaagctcacaaaggtgagttccttcaagaatgctctgcaggacaacatctttgctaattaaagccaacagaactcattaaggcatagccaacctgccttgcagctcacgagagtatatgcatcttcacttggatagggtatatatattggtactctcctctagtttattaatggtttgttcttcccaggatctaattcacgggatctccgatcacatagactgggttaccaccatagtataactcacatgggtctcaaacccatctccttcgatgcattgtctatcacatttcgtgatagtcccttcgtgaagggatctgccaggtttctcgctgtttggatgtaatccaacgttataactccggagtttcttaatttcctgacagacttcaatcgtcttttcacatgtctagacgatttcatattatccttagaactattcactttgacaattaccgtttgattgtcacagttcataaggatagccggcaccggtttttcaacaacaggcagatccattaatagatcacgcagccattctgcctcaacagtagcagtatccagtgccgttagctctgcttccatggttgacctcgtcaaaattgtctgtttgcaagacctccatgaaacagcaccaccacccagtgtgaaaacatatccactagtggctttgatctcatccacatcagagatccagttagaatcactataaccctccagtaccgcaggatacccagtatagtgaagccacaattccacagtacctttcagatagcgcattactcgctcaagcgcacgccagtgatcatctcccggattagaagtaaatcggctcaacttgctcacagcaaaggagatatcaggcctagttgcactagccaggtacatcaacgagccaatgatttgggagtattccagttgattcctagcaattctcttgttcttgcgaagcaacaagctaggatcataaggtgttggagaaggcttactatcaatatagccaaagcgattcaagatcttctccacataatgggactgcaagagagtaatcccattctcacctctaattagcttaatgtttaagataacatcagctactcccaaatctttcatatcaaaattttgagacaagaatgatttaacctcatttatcacctcaaggtttgtcccaaatatcagtatgtcgtcaacatacaagcacaaaataactccctcacccccaccatggcgatagtacacacatttatctgcctcattgactgcaaagcttgcagatgtcaatgttttgtcaaatttctcatgccattgcttaggagcttgtttcagaccatacaaagacttcaacaatttgcacactttgccttcttgaccttcaactacaaacccatcaggttgatccatatagatctcctcatccagctctccattaagaaaagctgtcttaacgtccatttgatgaacgagaagaccatgtgaggctgctagggaaagtagcacacgaattgtggtcaatctagcaacaggtgagtaagtgtcaaagaaatcttcgccttctttctgagtatagcccttagcaacaagccgagccttgtacttttcaatagtaccgtcaggcctaagcttcttcttgaacacccacttgcaccccacaggtttacacccatagggtcgctctgtcacctcccaagtcccgttagcgataatggaatccatttcactatggacagcctccttccagtagtctgcatcaggagatgcatatgcttctgaaattgacttaggagtgtcatccacgaggtacacagtgaaatcatcaccaaaagacttagccgtcctttgtctcttactccttcgaggagcttcactgacatcctcctcagagacaagttcatgtgtatgttcagtttgttctggtggtgtgattgaactgggaattatttcagagggttggttcgaaccattatgtgtatccttcattgggaaaaagctctcaaagaaggtagcatcacgagactccataattgtaccaacatgcatgtccggtacctcggatttaactattaaaaatctataggcaatgctatgatgagcatatcccagaaaaacacagtccacagtcttaggtccaagtttgcgcttcttcgttattggtacattgactttcgccaagcacccccatgtgcgcaaataagaaagtgatggttttctaccaatccatatctcatatggtgttttgtccttatttctgttaggaactctgtttaacacatgatttgaggtcaacaatgcctccccccaccatgccttaggcagtcccgcggtgtccaacatggcattcaccaagtcagtcagtgtgcggttcttcctttcagcaatcccattagactcgggagaatagggaggtgtcctctcatgtatgatgccatgttcctcacagaataagtcaaactcgttcgagaaaaactctccaccacgatcagacctaagcctttttatctttctgtcaagttgattttcaacttctgccttataaattttaaaatagtctagagcctcgtctttcgttttcaacaagtacacatagcaaaatctagtagcatcatcaatcaatgtcatgaaatatcgttttccacccttcgtcaacaccccattcatttcacaaagatctgaatgtaggagttctagtggtgccaagtttctctcctcggcagccttgtgaggcttgcgaggttgcttcgattgcacacaactatggcacttagaacctttgacaatggaaaacttaggaattaaacacatgctggaaagccgagacatcaagccaaaattaatatgacataaacgtgaatgccaaacattagcctcatcatccacactgccacaaatatggttcacagacttattgcagaaatcagaaagggaaaagcggaacaggcctccgcactcataacctttaccaataaaatatccatgtttagacacgactactttattagactcaaaaaccaacttaaatccgtctctagtcagacgggagccactaacaagattcctgtcgatagaagggacatgctgcacgttcttcagctgcacgatctttcccgaagtaaacttcagatctaccgtgccaacaccatgaacagaagcatgtgacccattccccattaggacggtggaaccccgtgcgacctgataagaagaaaacaatgagatgtcagcacaaacatgtacattggccccagtatcaacccaccaattagtagattgattaactgaaaaaacagtaggtaaattaccatacccgcttccatctccagtgttgccaatggtcacattagcagacttagaagtctgccctgcaggtgccttcatccccttgcgttgtggacacttcctagccagatgaccaacttggccacacacaaagcaagtcctctcatcctgattaggattgttgttgttcttcttctgcttcttgaagttggtggtctgctgagctttgtatttccccttgctcttgttctgggccttgtgcacaacattggcactggactgcccaccatcgcccttagacgcggcatctttttcccgagctttctcctcaacatcaagagacgcaatcaacccctcaacggagtattcctgtctcttgtgtttgagtgcagtaccgaaactcctccaagatggaggtagttttgcaataatgcacccggccacaaatttgtcgggtaagacacacttaaggagttcgagttccttagccatggtttgtatctcttgagcctgttcgactacagaacggttgtcagccattttgtagtcatgaaactgctccatgatatacagatcattgctagcatcagtagcaccgaatttagtattcagtgcatcccacaactccttagcgtcggtcatatgcatatacacctcgaccagacgatcgccaagaacgctaagaatgcatcccacaaagagagtagtggcttcctcgaattgcttctgctgttcagcagtaagaattccttcaggtttgccagtactcacccagaagcatttcatagctgtcagccacagagtgaccctgatctgccatctcttaaaatgcacaccggtgaatttatccggcctcagtgcatcagcaaaaccagccatagtaaaatcacagtgcctataataaggtttttggattgttgagattatgggcatataatgattaaatttattccataaataaatcatgacattacagatgaaaactagcatgaacgcctcattagatctacacatgtaaactacgcagaataacatgaacagatcaaatatgcgcaacatattgaacacgtaccgaggtgacgaaaagaccggctgtttggtcgaaacttttcgcaggtgtctacgaaggcacgaaacacgcgagcgaagaggaaggcgagccgtcgcgaacgaacagggagcagtcgcgcgaagcgcttcccaaaaaccttattgccgccttctcccggtgcaggacgtcaaaggcagaggttccggagacctgctctcctgatcgctggtgcacgccggcgagcgggatggagtagtctacgagcgacggcgcagtacagagtaggaggcaaaccctagattgattttcgcatatattgcgtgaagacggcgggtcggtttatatagagaagggtcgcttgatcagggcgcccgcacgatctctgctgcgtgtaaccgaaccggataagtcgcgcgtaacttatccggactccacgccgtttgcacgcaccggatttttcggaacgtttccaaaacaaaacgaatccgaatttgcagcaaaacaaaactgcaaaaggaggctgcatctgcgcaagggtgaggagccaatttttcggaccattcgacgcgtacttcgtgcacgcgcgccgcctgccctgccaggccaggccaggcgagcgagcgcgcgtttcccctcttctctccaccacacatgcttcaagtggctaggagggcatcctcccttttaaggaggtcctcctctcctagaataagcaaggtggtactaaactccacatgcatgccatcccatgaggtgggcttttgtgattttccaaagaattaatcttcgagtgggctaaggtccattcattaattccaacagttaaagcatagcccgaggcggcgacgctcgtcctgctccgcctgagagagccgcttcaccgggcgaccgtcgatgaggacagggggcgatgcggccctaggcgccggcggctggggcggggcctggcgcggacccagcgtcggcagtatcccgtggccaggggctttggccagggtggcagtgcactgctccatcagctcgaactgccgagccaaactcatggcggtgacgagggactgcggattctgcatctggaccttgagactgagcggaggaagcagaccgccggtgaagagctgaacccgttgtgccttcgtcaggcggccggcgcggggcaggagcgcttggaagtggtcctggtagtcctccacggtggtagtgcggcggcagtcggctaactcgaagaggggagccgaacggagtggcggcccgtaccgtaggacgaggagttcccggaagcgacgccacgacggtttaccctcatccgcctggacttgcatgtaccatagctgtgcaccatcttcaaggttgtaggacgccatccaaaccttctcttcgtccatgatccgttgttggtggaagtacgactcacaccaattgaggaaggtgagcggatcggacttcccatcatagcgcgggaaatccattttctgaaatcgcggcggccggacggtgcggggttcgccggagtctgtcgtggcgcccgaggatgaggtgcggccggaggagagggcggcaatggccttggcgttggcggcgatcgaggcctgcatctccttcatggcggtggtgagagcctccacggaggtcttgaggtcattggggtcacccatgccgggtgggcaggacgcgccggaggacgagtccgaggatggtggcgcggcggctggtggtggcgaggatgtggcgggtggtggggagacggcgcggcgcggcgaggatcgtctggaacgtgataccaggttgtcaagggcgtcaggccctcgggtagccggccctcggctacgtagctcgtagcctcggtccgtcgtcttctccggcgaggttgccccgtgccgcaggcttagttgagagagaggagattagattggtaattatttgcttaattcaattgttacccggaatacaagataagtaggccaccggccaacaaacttagaaactactaatttggaaataattaaactaggaaataactctcctaaaatcaaggctagctactatcctcggccctgccttcctgcgcgctgattgagtctgctgcggacgctcgggccgcggctctcctgacgtcgcgggctcgacgctgacgcacataggtgcggccccacatgacagcactggacaccgaccagtacatgtcggcacagttttaaatccacaaagtttcatatccctttctccttggcccgatcagcgaccccgtaggttgtttgcaagtgtcagcacatcacatcctcttgggtttcttcttcgatcatctgacatctcggaagcttctgaatttttcaaatcacgtaaagctcaagtgtccatgtcactgatgcaagcagatagattagctcgttctcttttgactgagatcatcattaatgaacaagttattttggagccaaagtgtttaatcaatactccagttgttaattagtagatactcctactttgctgtgaaggaactaggaagccatgatcccggatcagaaaaagggaacgcagtctttagcctgaaaaagtatgttacacgttgcaatcatcgaaaattaagcaaaatgatcatcttagaaacaatgatccaaagcttgagctgcatgcactttcactttctccaggtcacactggatgctaccaatgtccatctgagatgcagcaatgcagtgccttttgtctcaagatcagagaagcttgtaacatacacacatctttgagtgacatgtatcagacaggtgctaatttgatttcacttcaactgtgtcatccctaataatttcagactttgagtggaatggttagaatggttagaagtctgcagatcaagttctaccataaaaggaaggatcattaacagtaatttgtactgttgtagtatactgcagtgccgttctgaagatgatagcactgccatttcctctgggagacagaattcagcaatccatgcaggacaggggcctacggtgtctctactcttaaggatgtcactgtcagctgatcaagtatactcccatcagagtaatctgcagagatgtcctcttggacttcagagagagtattttgttgagaaaatcaggatatctttctctatctagcacctctagccggccaggtgtaggaaagcagctactctcatttttttcaaacatgggaagatggatgaggtgtcattgtggacttgtggtggttgagcaccgtgttgaggataaacttggtgcatttctctgaatttctgactgaaaacatattcaggtttcagggaggtggaaaaggactggatctcgtgaattctgcttgctctcattctctccgatcatttgtcaccatgttaacattgtgcagctacaggaaattcggacgtgactcttctcacttttcttgatttcttcacgtgtggtgatagtgaggattcagaaaacaaccggttgaaaagggcatttttgtcgggagagaattaacgcagtggtgtgagtgggtgccctttttccctgaaaatctttgacaagaatgaacattttatctgcaaaatccaaagaagaaaccaaatgctgaaatgcaacgcctgccctggaaagattcttgagagaaaacaatggagataaagattcacgcaaaatcgagcagcaaaattcagagaaatataccactgtataaactctgcaccattcggttagcaagaatccaaaacaatggagtgagtgatggaggaaaaagaaaagaccactcaaaccgctcgattcctcgagccctatacggcgatggagacggccaccttttcgagttccacgcgcccttaatgcacggccgccgccgtgccgccgtgccggagcaccggcggctgtggcggtggagactggagagagacgggaggaaggggacggcgaggacgacgaaagggtctagatatgtaatatgtaatagtataggggtcttagtgaaaataatctctgttaatctacactgttgaaatctaatccaatggcgtacgggtcgctaccattggttccgaaatagggctataaatgaaataatagattagtatgagggtttattcgggaaatacatcttgctcgcaaatcctttcctttttttttttgcgaaacaatccttttctcaatctgaaccgttaaaaaatgatccaacggtttgtttaaagccaagtgtctttatttgcggataatgttaaaaatagagtattaaaaggggtacttatgcaaagtactcatcgctgattctactcgatcacggccgtagactgccgatcgaatggttcccatgaattctagctcctgggccaagaattaacggcggccggcggccggtgcagatcgccgagctagaacgccggagtccaccggcggcggcgccgccaccgccgtgctgaacaaggactggtgcctccgtaccttcctacatggagtgcagtgaagaaagtgctaatgaagacgacggtcgacgaggcaagcagcaagtagcttccgcgccggcgatgatgatctcgatcggaaagggagaagacgtacggagtagatcaaatcggaagaaataaaacataaagcaaattatctatcggagaggatcatttggtccatatatagcattcgatgatcatgatcgaaggatagctagagctatactcctagaagcgaagctagctaaaggcacgagagtatagtacaagatcatgtgaaatattacttgaaaagaatgtgaaaaatattgaacttgattacacatatgtgcaccctctttcaccgtggttaacaccacctgatcaaaattcaaaattcacatagaaaccttatgtatattactactgctagtctctctactagatgcgagaggaagaagaagacgatggagattgcatgcgtcgtgcgctgcgtgcacctcgtcacaagaaccgcacgccacgccacgccaccgcgcgcgcgcgcgctcgctgtacatgtatggcgatgatcgatcgcccgatcagatgagctggaccgagagcgtcgacggcgcgcggtggtggtggtggcgctcgggcgcggctcgcggcgacggcgacgacgacgacgaggaggatccggaggcgcgccgccgctgcttccaggaggcggtgcgcagcatctggcacatgccctcggcgacgcgctcggcggggccgccgcgcttgagcatgcggcagaaggccatgtgcgcgcgcacggcctcctccacgtcgacgggcgcccgcggcgagctcttcccggcctcgtacttcaccgcctccgagcacagcccgcacagccacctccccccgaagtacgccctcacgccgcccacgtactcccccgtgcactcctcctccagcccgcagcactcgcagctcatcaccaccgccaccatctcctcctccatgcttgcaacaactagtatctgaacaagtttatctcccttctttgatcagagatgacaagtgttcttgcctctgaatttctgaattatattactaggtcgtagcggcagcagcagcagcagtaggtgctctctagctttgagctatttcttcttctttccttgtgttgcttagctgattgattttcttggtgtttgttggtcgtgtgcaatgcgttggtttcctttatattgttttgatatggcacctttcgctgtcgcggcgaccggcaatgaaatgtacagattgtttttttatggagaagaaaaaaaaaggagagattttgctttttggcacatggatagtacccatcagatgatcagatgcatgctactgctatctaggccatctactgctcaacatggtcatggactagtagtagtacactgcttggttattgtttttttttttttttgccctgatgacaagggaaaagaacagcggggagaaagagcatttttgacatagtttagagtgcagagtcttcagttgtgcaggtttgtttactgcttcacgatttcatactctgattgattgattctgaatctctctttagttccatgtatatgattgttttaggcacatggctgacaccatgtcaaagatttcgcgctaatttgatttccaagtcaaaacttccgcggagaatttactgaatctctgccctattttacagggaaagagcaagttctatgtacatatctgtactaggctgagcaccattgtactatttctttgctatttttgtcaaagagagcaagtggggtaatggaatctagaaaatccaccaagtcgtgtacatttaattaatagacatccatgtacaattaaattataaaaacaaattaaccaaccaatttctgactataatcctctatcaaaaacaaaaaaaaaatgaatctgatgataatgctcagctgaaaaccgaacagaatactccctctccatggcatggctgtcgtgatgatccatggaccctaccacgtactcgcggcttacaaagtctctactacggttcacgtcaacacggtataatcgtacagtgccataaacatgccatgtctgcatacgtatgctgattgctgaagctgtaaccatcagtcttatcactatacaccatgactagccaccggtgctaatacagtactaatggtggctaaaatgaacgaagcgactcgagcattatccaatcaatcaaccggctaaacgatctccaggcatctgcatcatccggtgacaagttctgacggagtgacagccggcgatgacaattctagcagctgcacgttcgtcagaggaatgtgctgtcagaaacatgttcagagatcaggaaattcagaatgtggcccaagctgatgaatcttatgtcagttcatgtgtagtatggctgtcagggtgctcgcggcactgcagcgacatctgatggcgagacgatgtttttacgggcttatctgatggattcgctgcatgtcagtatgacagtatgtagtagtatgcgacgacgaacgacgacgaagacggggtgagataggacgttcattcttcgaattctcggtccagaaggcacctgaagattgacatggccatgaacgccttgcccatgtctgcctcctgctcctccgtgtctccctgatgtcttctcccttatcatctcgtacagtcctgggaaagattttgcaatgcatggaccaatcacacggacaggacaggaatttgcatccgcacgatctgtctaagattaaaattcgaattaattggcatccgttagtgataatgataagatgatgatgctaactgcaagtgtttctgtaatctaagatgtggtttgaggagagtgatatctgaacataagaacatttccatcgatatctgaagacttttctcctacgcggttgataagatttcagtaaatatatgatagatttcggtaagacgccggatcacacggacaggacagaggctgcatccctggtatgatgtgtccagtattaaaattctgattaatcggaatccattttagagagaagataacgatactccctcggctcctatttactttgtcaactgtcacctctgaccagggttgtttcaacttcaaccattaacaatttttagatttatcatatttggttgaacaaaaaaaaagtctagttaggttatcatagttcgataatatggtgtatttttcaaagaattacaaaacattgttaaaacgaaaatggtcaaagttttcatttccatcgatccctgaagatatatattctttttcacgcggttaatgagattcgagcaaatcgctgttgggttgaagagattttcttttggttggcgacgattcaaggacaacgttgtcgggacagctgcattgtcttgtgtgatcagagcaagagaggatcgatcaatcgtcttccctgcagaaatgtgtggttgcgcggccaattttagttcaggcttcagggctcctgtcgcctgtcggcagggaatgaatctttggtgccgaatggtgcaaaaatctggtgaatggctgattgctggatgatcatagatagctgcaggagatgcaaatcccaaagaacataagagagagtttcgatcactggtggtcctggtgtttttgcagaaaataaaagaatgagaaaaatattgaaattttctgttgctatcttctctagacaatatagtaatatactgtttttttccttttcttgaaaaaagggtgtcacattggttgggttcagctgataagctgtgacaaaaaaaaaacgagcaacgataaatgatttgagagtagaaccattacatttgtagcctttaaaatccaaggctgaaaaggaaaactcaataatagtataaaatgatttaaaattaggcttaaaaatttaagtttcggttgtgaattataaatcaacaagcaaacgatgaaaaaaggaactctctctaaaaaaaaaagaacaactaattacaaatttgccactgggttaaatctatatattgtaggattgccaccagataattaaaaaatgcaattagaactgttgttcgattggcatccttacaaaattaaaaaaaccagtggcaaaattgtaaatacaaaaaaaaaacaacatatggcatctagatacagcagaggttttggatgttgaaacaatttattaattgagttttgagtggatctaagaaaacttctcgagtttaactaaaggcccaagtattcatgggccgggctgcaatctcaaagccgcctccaaatctccaaccgagacactgaccggtgggcccaacgagagagccactcataaaccctaatcctcgcgaactccccctcctccccgcctccctcccatctcgcgttctcgcgctcgattcgaatcccaccgcaaagcaaaagcccacgcgcgaagcaaaagctcgccgcaaatggaggacgccgcggtcgaggaggccgaggtgagcggcggcgcggcggagttcgcgccggctctcgtcgccgcccacccgctcggccgctccgtcgccgtcgccgtcgggcccgagctccgcgtgttcgatctcaagtaaggaacgcctctcttcgctcgtggctcgccttcctgcctattgtcggatctcaatttactcttatagttaagtagtttgattttgatggagattgggacgtgatgcgtttttttacctgagcctaaattggtctgtcgtattgtactgtagtctaagtgcatagcatatagaaggatgaagcttctgttgatatttattcgtgtaaaatttcactgctgataaaattttcagctcagatgcttagttttgtactgcccagtgaaaatgtctaaatggatgtatgccttattttttccttcatttcacttggtgaatattgaaatgtgcgaataaatgtgtatttttggatccagggccagcagtgcagtttcattgtcagacaattctggcggtggttctcattcggatgctataagagctatctcgtttagtgcaaacggtgctctgttcgcatccgctggtgatgacaagcttgttaaggtctggaagactgattcatggtgctgcattcggaccatgtaagtcaccctgtttgttttattgtgaaagcataatggattaaccaaattagtgtaccattttatttatcatgtattcagtgagtcaatctacaactattcttctgctacttatctacgtgtttatgagaatccacacataattgttggctgacacacttagcagcttggagtattgttagttatgttaaaaacttcatttttgtggttggtaatgtattaagtccttcatgcatgagtttgatttcttttgcaatgtctttacttttgcagaacttctgaaaagagggtcagtgcagttgctattagcaatgatggcacatatgtaacttttgcagataaatttggtgttatttggttagttaccatgggggaaagtggtggagagcaggagccaactgataataaacctgtgtcaatttttggtcactactgcagtattattactagcatggtatgacaaattttgatattttatattagccatagttatttgtatgtcctgctgaaaatatcaaagtaacacattatgcttcaaatttccgatccctgcacacttatattatgtattggaatgcagaaattctcaccggatggacgattcattgctacagctgaccgggactttaaaatccgagtatgaaaccattatactttgctgtactttctgcatttgtgtggatcataattctctttttttttcttctttggtgaaatttgttttgtagattacatcactcccgaaaaagcctttaagaggggctcatgagattcaaagtttttgcctaggacatacagagtatgctcagtatcctgtgccttcgtacttttttattttacacagtgtctacattctttctgtatctctaggaatttgcattattatctattaaacccagtgaaattttagagctaaatgttgcaacgtattagttaatgcattttatatttcctgtggataataatgcagctttgtatcgtgcattgccttcacatgcctttcagaaggtccgagctttcttttgtctggaggcggtgattctactgtgggtacaaaatcattttggaatgctaacgtgttcccagcaagcttttccaatgctcctcgtgatgtttttcattcatttatttaggttcgtctatgggactacataaacggctgcctccttgatacatgtcaagtccgagacaaggtaacatctggaaaatgtttatttgagttttctaaaaaaaaaagtcaataggttgtttattccagttataattgtttgtgttattttgtactagctaacttgctcttaaaacaattcacaggtgggagaactcttagagccaaatgaaactgaagacaacaatctatctgttgcagatatatgcccgactaatgatggtttgttggttgctgtagccattcagaggtaaacttgtgtggttacgcttctccaaaagtaatatgatttgcttggtaaaatggggttcttttttatctgtttgatgcagtttaaatggagtaatgcttttagcatgtgaccttattgcaaagaagttatcttttctaaaggtatgtctctttgaaaatgtatcttttcaaggcaactggtttgggattaatagcatgaccacttgaccaggattttgttttacaacaagatttagcgcatcattactatttagtactgttgatagccttatttcttgaaatgatctttacaaagattggtaccaatgcttgtgacttgctaggctttggcttgagagaaatgttcgtgcgagctctaggtttcttgttgccagttgtgatggggctagttaagatttatctggaaaagtattgttaaatcttggttattggtgactagcaagatatcttgttggctcagctgttcaatagtagtacctttttttttctttttttgtatattgctggaaaaactaataattcctcccctgcactaccaggtggttacaacggaaaagtgctatattcctactagcctgtcttccagcttctcagcagatcttctatggaccgtcatgggcgcatcgaatatgcctaatcaggctacttcccagttatgtacccgtttgaaaatcatcccacacttcaaaaaggatccgctagccggatgtgatcatgttcctacagtcttggaagacagtgaggtgccacatggtgagaagctccttctggcgctgcaaggaagtcttgacattgcaaagcaagaagaggtgttagcttcagttctagctgcactgaaagtatcaatgcacaagatgctggtaaagaagcactactcggaggaaaggagagagcagaggaaaaggggcagaaacgataagaagatcaagaagtagatcggcctacagcctcagcaaaaccagttctttgtttctcattgtaccattagaggcttggaaaacaaaaggcattttgacattcacaactgtaagattaaatctactagcaaacacttttctcattatccataggccacagcataacggcttctgaattctgatgcctgttgtttcagtcgaaatgcccgcagttcttgttgtctgctctacctgtagcagctgttatctgtgatttgaaatgttacttaccctatattaaccatgctgctatccaatgataattgcacgctataatatcatttttgcaatgcatcaaattgctgctgatttaactgcacgctgatcactttttttgtcgtgatcgcaactgatggctgagacgtaaagatcaatcactaaagagcatgaggattccggctgtgttgtctctttctctgaatcgtggtgtacagtatatgacatgatctacgatatgacgacggtaaggacaagctttctgtttctttgcgttgcaaaagctttccatgtatactgatttgaacgtgagtatgtgacgtgcccgatggtttttgcagagctggaaacgagcagctactacctcacatgtaaatgtttttctctggcaggaggaatatttgcagcatctgcgatcactggtttgtcgcctgcatctgatctgccagtggaatttcacagaaaaacaatgcaatttgagctggatttggatgaaattcttttcccaggttccaaaaacaggtacaggtgttgcttgctttctcttctttctgcattactgcttgttagttcattgatgaggaagggtaatgatagggagttagaatttattcccaatcctggtgaggatggctaaacaaagtctaggaatttattctgaccaaaaaaaccttatccattgagcagagatgcaaagatgaacacggttgatcaggaggataagagttctctgtaagaaagttaattcccatggtcaacaacatgatgtctgctttgctgccttttttttccctctcctccagatgcaacttctattaaaactgggaactcactgattcatttttcaaaggtttaaacaatattatcattgatctctcatagtctcatggtgctactagtagagaagctggagtacctctcataagtcagtgcccttgttttcttccttctaattggtttttctaaccatgaaactaatggcacaaacaaacctaagtcagcctcattgataacgattcccatgaaggtatgaagatcttgtatgtcttctagttccagcggcacaaaccacttcaagttcttgacctaatcacctatccaatataatttaatactaaatgttttcaatgaggacaagaagaaatactaaatactactaggtgatagcaagtggaatcctttgtcactagagtatctgaactggaagaaatccagggcgtcggatactgatcggacggtcttgcatgctgttcatcaaattactagtttgtgcggtctgcatcctcagttgttccatgaacatactaaaacaagtactcctatctaccaactgaacagtaacaagagcaattaagataataagaagccaaaatcgatatgatcttaacgttttgacagtccagcgactttgcaattaatggccgccactgcaacaatggctagcaagcagccttggcatgcagtgagaagcttttcttggtctctttacctgaaagctctggatgaagcttcattgcatgatgcaacctgaattttattttactgtgactaacagtgctaagctttgcttcttttcatccacattaagctgatgcttctcactgaaggcgaaagggagacaataagcatgcatcagcaaggcgtccatttcacctgacctaagtgaaagtatacctttctgtcactgcaactgtattttgctgctcacagaatgtcagaaaacggcatgctttgggacatggcccagtttattttaactaattaggatttgcccagttgctttcttcatcatcaccttgtccttttttttaaaaaaaaaatcaagcaaattagggcctgtccaatcactagcactgttgctgcatgtgcaaagagtatttgcaaattgcaaaactcaacagtctggagtctagagttgcatcaccaggagggtcaggtttggtgcccctccctttcaccctttgcccgttgtcaataaaagactgcatttgtgttgtcctccaaggaaaaatggagcaagtttagaacccctcatttacaagcgttgtgacttgtatccaaaagagagagaaaaaaagaacttcagggttaaccatttcttagaattatactacctccgtattttaatatatgacgctgttgactttataaccaacgtttgaccactcgtcttattcaaaatttttatgcaaatataaaaatatttatgtcatgtttaaagaatatttgatgataaatcaagtcacaaaaaaataaattataattgtataaattttttgaataagacgaaatgtcaaacatttatcaaaaaatcaacggcgttatacattaaaaatatggtgggagtactgtatacgagaaaaagagaatcatgtgtgagtgtgatgatgatgccattgttaacttattgatttactacttttctcattctttggaccaagtaccaaaggagaaacaagttctttacacctgccttgctctcacccttccatcgtgcaatggcgccatgatgagcccaccatgtcgcccacaagattatgcccggcggcgtctacttgttcagtcaaaaataatgacagaaaactactgtctactgtcactggcctaaggtcagagtaaccaattggttttactgaaattaaactgccgttaatcacagggctcatatggtagtcataagggcaattctagagtaaatgtctacttcttgaccactgtcatgagattgcaacacgtattgaagtagcaatcactttcttgcttctgggtaggaaaattgctgcaccggagaaatggatatagattgggataatacggtgatctcatgcgtgggtgatttgctagtacattactccctccatattttaatgtatgacaccgttgatttttcgaacaatgtttgaccattcgtcttattcaaattttttatgcaaatataaaaatacttatattatacttaaagaatatttgataataaatcaagtcacaataaaataaatgataattacataaattttttgaataagacgaatggtcaaacgttgattaaaaagtcaacggcgtcatacattaaaatacggagggagtaaatattactgctgcttaattaacatcttgtttagacatggagcccacctattactctctatcagcaaacatctactcctatctaagaaaatggtactcctagcactataaaagtaaggagggtactatcaggtagctcctgggattaaaatcgtgtgccaatccctttctgcaccaatcactcacttgtcacttgtcactatactaaattgatacaccccctctcttttaaaagtataaatcaaaccccccaaatctgtacacatagtatcaaattactaatctaatcttgaattatcaaatcgatgtctcaagtctgagctccaataattggcaagccaacttgccaaggggacaccccaacgggcgaggcgagaagggaatgacgattgacgcggttgccatttgccgcaagccgcgatggaactcgtaattttttttagcccaaacaaatctaattaagcctaagtatttattaaaaaaaatctaatttaaccgttacattaacattaaaattttattacttcattcgtttcaatatgtaacaatttagaatagaattagatcaatgctaagactacgaatatgaatatacctttagttctacatattgagacagagaaaatgtgtttggtcaataagcctaggtagccgctcgaggtcgacggatggtggctttggcacatggttttgatccgattatcggcttgtagagaacaatgttaacgtcaatgtaaaatttcttcgtgcagcaacaatatcgactcgtcgtttgcttgtcagaggaccagctgcgatggagtcaacaaggctacacagggaatagctataattagcgaccgatcttttgtagtaacagtttttttcggtgggttatcttgtagtgccacagagttagtgatgatgttgagcccaaatagcaaaaatcttttactagtaaccgataattgttctatagcggttttcggcggctgatcttgtagtgccatttctatcgtttagcatagttatattcttcgtatggtggattactgcggacacattttcctagcttctaaatggtgcaatatctgcaaaatggctttttcatcagcatttccttgaaaaaaactgttttaaatcaaccttttaaactttctaatgcgtaagtcatttgtttgtgctctcaaataattcttctttcatctatcatccatttttcatatagcactttaggacaggctcttcaaggagacgtgacgagagaagtgtgggggaagcattgcagttaagggcagcgagcgaagagaagcaaacaacaaaagagggtaggggcaggcgggcgcatcgcatacgcttcagtagatgacaaacatgccaagaaaaaagggtacagttagagacaggacataattgcgatcttttgtcatcgtgcagtaatctaattgtactcctaccagtactaattctactaaaaaaacgtttagatgacaaaaataatctggttctttctggcagtaatttctcggaaatactgtaaatacgtgttgttctgaaaaaaaacgatggagattcagctcattgtagtatgaatgtatgatctagttactgactgatttttactgaagcagccactgaatcatctcatctgatcagatgagcagcatgagataccttggtgaatgatttaccgtgtgtttgagagtaggaaacagaagattaagatgatatgtaaaacgagataaattgttaacgcacgattaattgagtaatttctcagagacactgtactactgtaaaagtgtgttgctctgaacaacaatgataattcagctcgttgcatgatctacctgacatttacagttctactactgctataccactgatgaatcatctcaaattatcatctgatcagcgattcagcagcatgagatgaatgatttcattgacgtagagcctcgcatctttccataggtcgacagcaaatctacctgctgtaccaacggaatctaccatttgtgtgcgcgtgcatgggctcaaacggggacagtaacacccagcgcaagaatgcagcacagcacacactacagcagcaagagaagcatggccaggacaggaggagaggaccattgccaatgaaaaagatgtgtaaaaacaaaagagaaaaagaaaaaaaactcaggataaggacctgcccctttggatgcaagcacacacaaaccaacactgacatcatgttcattcactgtgaggagaggagatggcttctttaagatcgccaccctcccaacctccccattgtgctactatatgcttattagtatcatcagttcatcaccaacctctctctcgtcttcttctccctcttcttcttcttcttcttcatcttctacctttgatagtttgattgaggtgttgttcctttgagtgcagcaagaagctgatgattttgatgatagcttaaggatcttgccaaactcttgtgttgggagtagttgcttgcagatcgagctgcaaaggtcccattttgcttctccatctgagcttggttaggttgcgtctgagtacacttctgaggcttctttggtcgttttggcctcgagctccgttcttaaactctgcctcgatcgatcgatctcatctcatctgcgctgttcttgttgctgttgctgttcaattttgagaagaaggtgccgatcgagttgagccgatcgggttcagtgaaattcacttgcgtttttgagagaattgtttgagttggtttcggttcttgagatgttcctgagatcgaaggtccaggagatgatcctgaggaggaggtccagatcgatgaacagcggcggcggcggcgtgcagcagagccacctctccggccagcacgcgagctcgacgacggtttcgtgcgacggcggcggcggcggcgccggcggcaagagcgccaccgcggcgtgtgcgttgttggggtctccgaggctgctgcactgtgcctcgctgccttccggcagccacgccaagaacggcggcggcggcggcggcggcggcggttcggagcccgagacgccgtactcgatgagcccgacgtccgtgatcgacgcggcggcggccttcgcgcccagcccggacgccggcggaagcaagcgccggccgtggtgcgactggggcgccggcacgcacggcctcgccgacgcgctcgactgcaccggcgacgacgacgacggccacagacagagcgtcctcgccgccgcgtcgcgggcggtcaagctgcaggcgcaaccgcagcagcagcatcccctgctcaggtcgtgctccctcgatcgccgcgtcgagttcggcgtcaagaacaagagctcgtggctgccgcttcgcgtcgccggcggcgaggcggcggcggcggcggcggagtcaccggcggagatgcagatggagccgtcatcggaggactacacctgcgtcatctcccgcgggccgaacccgaggacggtgcacatctacggcgaccgcgtcgtggagggcggcggcggcgccaccaccgccgtagcgctcgccggcgagagctcgccgcggccgatcaatttgccggcgccggcgcgtgaagcgagaggcttcttgagcttgtgatgcagtgatagatggtagcttgattaatgatgcttaggtaaagtttggtgtgaggacaattaaattaaatctgagtcttaatgctgtcattattattattagtatttttattgtattggttgtttgttcgatcttgatgatcagatggtcaagtagtagtagatgctttcttgatcggatcctcaaattttaaatagatgctttcttggtcagatgatcaatcgattcaaacagatgggtttgttcagtatacttcaatttgagctgaatctgtaatacaaattcagaaattctttgcttccacatcctgctgctaccagagcagagtctttacctgcaaatcacttgctgaactattaacccaatgaatttaatctgatctccaaataacaagcttagctgttccacacacacacaaaacaatcttcatataaaccagtttaattccctctaacaaatcagagagaattcagaccaactctgaatttctgacagagagttttcagagcattttcgctcactgaatccaaagatgaggcaagtggtgttctaggcttctgccatactactcctaagctgcagggttcaatcattgacggtttcttgtagcatcacactcacaaccgatggaggagaagaaagaatccaatgattgatgttttcttgtggtgagcccctgctgctgtgcctacgcatccaaaaatcgatcgatcgaatcgaccagtgtgtgtgtgcgcgtgctgggcccacatgaacgggtgccttgtcagtgtcaggggcccaggggttttggcaaacggttgcagctaagctaaccctctgtggataagccaaaagcagtgtgggtctcatgccttttctgcttcagtgaccagcttggccgggttgggttggccgtctgatcggtctggtccaattttgtctctgtgcctctagtgttttaggctttcagtttcttcgctgaagctttcttcttttctgtgatgctgactgaatttgatgcccagtttatttttgaggtttttgtggtttttgagtgtttttgttttgggtgttatgctgtattgctgtcatatgatgtgatgtttgttgaacaggtactgctccagtgtagagttaaaacctctctctttcaggttcaggatggtgagcagcaaggaagggaataaattcttgaggattttagatcagtagtagtacaattcttttaaaatggttagctaccaattgattgctttgttgggggtggtcataatgtacttttagcttaggagtactggggaaacaaaatcttgtcgatagggtgttgtgtacatctgcagttggatgcatgttggaatctgtaaatctgaagttgttagaagaagcagcagcagcagcaaatttttactagctcgtttgaacttcagatgcaagtgcaaaactgagcacttgaactttgaacaccttcaggaatcaggatgatcagccacaaggaaggaattccgaattcatgaggattttaggtttaagcccatcagttgaaaacttgaattgcacaataatcaccattttatcaacagtttgttttcaaagggtgttgtgtagagtgcaactcagcttatgtcagctgtaatttgcaaatctgaaatttgttaattaaaaaaaaatcagactttaacttgctcgtctgagcttcagatgcaattgcaagactcatacagacactgatcttccttctttgaacaggaagaacaagtcaagtctaatttagagctgataaactaaaatcttacaaaagagaaataaaaaaggaccgcactaaaatactccaagtccataatccaaatacctaattgcggtccagcttccattgcttcaaatatctgcaagggtacatagggttgctagctatacatcccccctcgcttgcaacttgccgaaggttaattgctcacactgttcatcattttatgatgaactaactttagcaacttggaaaggaaaaaaaagcgcatttcattaaaaattagcaccccctattaatctataggatctaatggaagtagagaactgtacatgacaatgtagggtcatactaaggcaactattatccaaatagaaatattcatacgcacctcgagatgtaaagccaatgttattgcccataaggtttggttgaagctgtgatgaatgattatccatttttcatccaaaaaatagccatatggatcagcaattgcacatactaaaacctagagaaaatttgctgctttaaaagcccagcccagctgagcattgaccaaccattaacagatgtcagagaaaagtaagccaatgaggtttactgtcaatttgcggattaagttattcacaatgcttataaactaagctatttacatgtaaactagcatctttgagaggaaagcgaggtagacatcaatacattggaacaaaactctcaaaaacctggattcaatgaccaaaggaaccaaagatctcaagtccagatatagatatgatgcttgtcagcggtagcaagaggtcctaacccacaccatgaacttgaaactaccgacgaagaatggccctgtaggatcgtcggtaccccatcctttttcaatcttgaccatatgtaaacagacccatcattagcaccagcagctatggagttttcatcagggcttatgcaaggcctgccccagctgctaaccactctgttacccatggccttgaattttccacaaacttccattgttctaggatcaaaaaggttgtgcacgttatcctttccacttgtaagaatgaaatttctattccgtgacacactgacagagcttacgtcaagatgagcgaatgtctgactagtgcattttgcacttcggatgtcccataaccgaaggtgtccatccctatgacccgagcaaagggtgacaccatcaatgaaagctagtgagttggcgttgctccctgacattatggtgcttttgcagaagcctgactgaagatcccaaatcttgatggtatgatcattggatgaactagcaagaacacagctcttcacccagcttgcatcaacggatgaaacattttttgtgtgaccagtcagagtgtgacgtgggcgccccccattaacttcccatacaaacaatttgttagagctacaggcagcaatcacaaacttgttgtcattagtcacagcaagatcattgacagaccccaaacagccttgtagagtggaggttaaagcaccggtatgtgcagaccaaatcttgacagtttgatcctggccaccactgattagcttgtctgtgttatgctggaaaattatagatccacagccaccatcatgagcacggatagtgattctgcatgtagatgggattggtgtttccatgatgtccatgtacccagcttcagaacgacgaatgatgccatcagcttcttgtagtgcattgtgttgtataccaccaacaccagctgacttcagctttagaaccatctcctcatacattgcatttgcctgaacaaaaaatttccccccatttaaactgataaatgcttggtacctactagtactgtgggaccagttatcaatgtaaagcatagtaaaatagatcttcggctactaaaacaatcatcgatatttagttagttcttctactcccacttatgctatagaagcaaaagagtttgaacatgatgtacatatagaattgattcgactgtcgtgactaactgttcggttaaatatcaagggggaagtatttgaaaactgtctaaaaagagccatttccgcagacagcgcacagtagtcaagcaaaattaaagagcaaaaatattctaacatagtaatttgccatccaaatatgatgggaagatggtaaattatagtgcacaaaatctcctgtgttatgtcatggaaagcatgatggtactttaagtatctcaattgtacatccactacaacaatggtagggatccatgcataacatgcaaatttttttcttggccattttagcctaccaggcccttaaaagggaaaatataatcttgatttgcaacaccataaaatagaaagctgcggttttagtaacaagaaaataaggtacctcattaagcctctctgcatccttcatcttctcaagcatccatcgatcaatcagattcctgttttcatcttctgccactttctgttttgttaatgcctgttcaagttcagctttaactgcctggtgctcctgaattataagatctaaagcgcttgttttttcttcaagcgactgcttgagctgcgtattttcttccctacaaaagtgtttgcacaaaatgtcagctgcgtattttcttccctacgaccacaaccaaacattgtattcaatccaatacctggtttgctcgagttcagtctgcatggtagtaatcagtgtttctttctctttaagcagcgcttttgatgctttcccctcttctatctcggtaacgagctgctcggacaaacgtgactgagccttgtagcattgctgcagctccaattcatgcttctcagccttctctttccactccaccgcctacaaggaaacgaaataaataaataaacaagcccaccaaaaaaaaaaaatctatgcacacaataatatctaaatttttgggtttcttgatctccagatgaagcatctatggtacttagcaaaagcatcattatcgaggcacggttttttatacaaaattttccattccattatgcaaagcaagaaaaaaatatatgcaaagatgggaaaaaaaaggagacatgagattggtatttttacttgggcggcgaagggccgggcgagcgcctcgatggccgggcggtgggcgccctcctcgacgagatgcctccgccgcagagaccgcagggctcgccggatcgcctccttgccggcctcggcctccaccatcgtcctgcacccaaattcactccccacttaagcagaacaagaacagaaaagaaatccatggaacggctcctgcttccaagaaaacctcacattgccgggtgcaatccgtcggcgaggaggtccggtggcttccggcggaggaagaggaggtcgcgtgcggcgggcgtgcccggcggcgaggtcgtcggattcggttgggggagcagcggcggcgagaggatcagaggaagacgaaaccggggaggaaagcaaaagcaaagcaagcgaagacggcttccgggccgcgagttggactcggacccgaccggatatggtcccggattgggcctcaacggcatgtgatcttgtggcccattaatggctcgcgtcggcctaattttgtggcccacgtaacataggcccagtaagaatcggatggaatattccggccttggtgtccacgcgagactttgcccttttattttctttcttttttttttcctttttcaatcacctccgcttcctccgccgcctcggcgcgaaggccatcgccggattccccgcttcctccgcctggattgctccgcacgcaatcggccctggtttcttcccggcggcgtggtcgtcgctgttccccacccgccgccggcgccgccgcagccggcgtctgagttgagggaggagggaggaacggcggcgcaatggcggtggctgcggcgctgctgcgccggagggcgctctattcggccctcgcgtcgccctcttggctccatggtttgtgctcgctttctctgatgtggcatgttggagtgtttcctttttcatgtttgttggaggtgtgccttgtgcggcatgtgtatggcgaaatgccaaaatgagcgtgcctcgaggcacgctcattttcgatcatggcaatggtagtatctgcgttgctaggtttctatagatatgctatgagtggtgtagtaggtctatgttgcataattgattagaaaaagaacagtcaaggattatataggtcagatgcaactctttttgggggaaaaggaaacgttttttcccctgtatttacaatttacttgttattctgatgaacggattatatctgttgagagatacttatattttgggaaacataaccttaatatattagtactgttgaacaccgcgaggaaaagttctgctttggatggacatttcgtctttgatagcgtaactaatttcagtggcaaagtccaatgttctgtaggacacatttgctcataacttgtggtttacatggtatatgcttctcatatagataccagttcctgctacatttgctccatttctggtacacattctttggtcaaccatcccaatttgagattacagaggggctaccacaactctgggaagtttgatttgaccgacttgacgtaagaatccatctttctagccttcttttacgtatatcgaagtcgattttcctacagattcctttgagtttatgaattttgtatcgtacattcaatagactccatgttttgacttccaatctagtgtgggatgcacaatattttagtttccttaaatttaccttcacacttgccatagtgaaatataattttcacatttattttacacaccacgatctagtgtagaacagttcatattctcctaaagaatctaaatattttacacaccacgatctagtgtagaacagttcatattctcctaaagaatctaaataaatgctgtgcttcttttgaataatagccatcctcatatatggtatccgaatgcccgagaaaagaagcgcaatgtatttttacatgtcggtcctacaaatagtgggaagacacataatgctctcaagagactagaagcaagttcttcaggtactactttgttctacttagtgataataaattaatatacaattatgatgatttctcagagctattgatgaattctgtaggagtatactgtggacctcttagattgttggcacgggaggtagctcaaagactaaacaaagctaatgtcccttgtaacttaattactggacaagaaagggaggaaattgaaggtgcaaagcatagctcagtgacagttgagatggccgacatgacaactgagtatcaatgtgccgttattgatgaaattcaggtacttcaaccttctttctgtagatatgctaattaaatgtatattcataatacaaacagtaattaagagaattgtcatcccatttttttggactacatcatcaagccagtcatattttttactgtaatattcctcatcattctcatgttatcttcttctgtttagtagatggttggctgtagatcgaggggtttttcattcactcgtgcacttctggggctttgttcagatgagcttcatgtttgtggtgacccagctgtggttcctctcattcagcgaattctcgaacctactggtgatgtggttacggtaatttcgttgaaactcacatagttaaattgaagtgtattaatatgactctgccagaatgatgttagttgcaaagttagatttgttgacattggtgaagacattaggttttgtggataacttagatgatgtaattacctagtttgggatgaaacagtaatactaaatcgcatgttcttgcaagtgtaagtttttttttactgttttcaaagctccatgcttaatatgtttcaactcattccattttaacttaagatacacaatgattttatggattatcattggtggatagcatcagcaatcctgtaacctctgttactcaacttatccttagccacaccaatttgaggtcccgtccaacaatttagattgcacccctggatagtaacactacttctggacctccatctgagaaagtaatgtgcaggcatgatgtcatatatatctgtcttttgttggtgattagctgatgttttgtatttgcagataatattccaagtgaactcgagaaactgtttcttctcaatagaatttgttgagctgtctaatgtttattttggtgttagtactgatacacgcatcatgtcgtcaaatattccgatttgctggctgtatgtctctatgcaggtccaatattatgagaggctatctccattggttcctctgaagactactctcgggtctttctctaacattaaggcaggggattgcgttgtaacgttctcacgacgatctatctatatgcttaaggttggcattcttcagataactgttgcagaatatactgaaataatatctatctgacctgtgtcctgcaattaaaagagtaaccaatagatatcccctgcaaattgttgccagaaaatgtaaataataagctgagaaagtctcattatttttttttggtgaaagagaaatgatccaaatgccatgtttgttaaacctatcatcgtaacttgatctttacctgtaaattttgaaacaacaaactctcaccagcataacaacacacccctctggcctctgcataccctcacgtgtatctggtactccactaactttatcatttcacttttttattctctccttcaaaggggggggggatcactctattgacttaagaaatgggacatatttctcgctatacacttaaactctttgaattttgattcacaacactacagtactatactagtatggttggcagtgaagggtactagatagcccccattacagaaatgatgaaaagacaagggaaaactatgtacgaacctgtaaagctacttaagtaatgcaactatgtacggaagatgtaggcatgtaacagggactagggagagctgtgttgtagtagtcaatatgataattacatcatgttgtgagagcagcgatagctttgtagcatgttttgacaggttggctagtccatcgataatttactttctgttttacataaatgcaagttgaaatctattaagtcatctaatcatgtttctttttgcttttcttctcatggtatttattgaatttaacactccaatcgaaagactggatataaagattgcaaatccatgatatgaaaaatatgaatcaattaagttagcttagccaggggcagatcaaatacacaaggatcagagtgcagtgaccatcatgtctgctgcacaaacccaaaaagattatgctcactgtgacattacaaatcattgttgatttatacccatggtgggaccctgataacttgctgccctagatctgcacttgaattaagcgactgcaaactaagatacataatgtaatgtatcaaagcatcctcatgttgtgattattacgaaaattaatcatctagcatatgaagtaatatatgaaagctcaactacatttcttatatttaaaatgtccgtgcagagaagaattgaaatggggggtaagcatctttgttctgtagtctatggctcattgccaccagaaactcgaacaaaacaggtacttccctcacttggttatctgctactacaccattgtagttgatgccttgttctcacgtctctaggtccttatctaattaaaatttacagctaaagcaccaaacgtttcatttttaatatattaacatgtatatgccatgttttgcttggcttatgctcaatatatttatattttaaaattccatcttgctgattttcttccattaataaagtttatttggtctctcatatctgagtcacatgattgtctggataatgttttgtacaatgattaaagtcagtaaaattagcggtgcagaaggattagaattttctgtttaatgtttgtgagatgaactttcagctagcaatttgttgattaataccccgtaacagtaaagcacaaccaaccacaaattttagcttgaatttcaagaaatcggtagttatggttgtaggaggcaaaacttctcttggcatgttgtgctttattcttgatgatgctgtgatgatttgaaaaagttgataaatctattccctgagcttgcaggcgacaatgttcaatgatcaagatagtaaccttaatgtgttagtggctagtgatgctattggaatgggtcttaatctgaacatttctagaatcattttctctacactggagaagtttgatggcatctgcaacagggaactaactgtggccgaaatcaaacagattgctggtattggatttgtttcttaatagttttgcctctggcagattaagttttccctccccccttgttgcacaggtacttgagcagtgaatttgagatattcttcatattgcaatactttgtcttcattttataggaagggctgggagatatggatctaaattcccagttggtgaagtgacctgtctaaattctgatcatcttccattactacactctgctctgaaatcaccttctcccattatagaggtgctcaccctgtccgatgtctatctctaataggatgagagctgcacgaatcttggtatagataacatgctaatactgcactgtactctctgcagcgcgctggacttttccccacattcgatgtattatctctgtactcacgattgcatggaactgatttttttcaacctatattggtaagctagctaaagcccatccttcttagtactgtatatggcaaattcctaacacaacagagaataacattatatatttatgatttagtgaattgccattgtactacataaacaatacaagggtgttgctcttttggcttttctaatttggatgatacagcaagctattcatgcttttataacactttaactgcaaagtattacttagttcttcaggtggttgatgaagtcatttataacttggcaactttttcagtggcatggattggattgcttctaaaataaaatttagtcatagtattaagatatcctatttgtatttgtttggacttcagcttgactttgcttctcaatagttataaagtggaatttgctcttttttctacttttctctgcctacctctttctcaattacttgtaaatgctgttttcaaccattaaatgtatgccaatgcttcctctggtcaggacatgcatcttacttatcttttcactcttatcacaggagcgtttcttggacaaggctaaactatctccagactatttcattgctgattgtgaagatatgctggtaagattctttccctcaatgagcaccaatttctatatttggtcaaattatctagaagtaagtcagttttccatctctcaactctgtccagagttcaaatttcacgctcaactccaaaaccatctgctttgcactgtcctatcaaaactgatgcaagtcatacttaatgcaagcccctcatccctccctccttccccctatttctcagtgctgtggccaggccaagcttggtagcaccttggtacagcctagatccaatgctgaactagttcaagaggaagctatgaggaataaaaaacctagccagttagcctgcatgcaatacaggaataaggttaatgagtctcatggcaatatagcaactgaaatcgagagatgaaaccaacattttaaacaaaaaacaaaagcaatgatgttatcagattgatttggacatcagtaaaggaggatatttgcttaagattaatttccggttgagctttgactgttgtaactgttggaatctctgattttcctcctacatactccctctatcccataatataaggcgtgcacatatttcaagattcaactttataaacatttgaccaacaattattataatataaattaaatttttatttgctaaaattaatatcattagattgacatttaaatgtactttaagatggttataattttgttgcaataaaccttataatatatgagatattataagttaaagattagttttgaagactatgccaagtttgaccatgccttatattatgggatggagggagtagtatagtaggaagaggcaagaaaaactttctggccatgctgtttcgatgagcttatcaggctaatgtgaagcacacaaccatggatgcatcagccgttgtgatctctttgacatgttcatctttcctcatctcaaatggtatgggaaacagatctggtggtgttttccaatggtgtgtttggtggcttcagcccagcttgatgagaggatctttttgccatgtcatgaaacagttgtgttgtttgccctgcactgttagtgcatgtccaaatagttgccacaccatgatacttttgtagcccagcagtattattctgctaactgactcatgttggtgttgctaaaaggttcaaattaggaaataagatacatacagtttcatatcaaaattatttataaggttaaagaaatcctttgacctagaggagctatggagaaaggaacgagggagtgagaataagagagaggaggagaaagacaagtcttgtcctgcttggcactgctttttctaaaaagccaaaattatgaaatgtgatttttgagaataatttaggtaggtttttttcagttgtcttcttagctatcatgaaaataaggctgggcaatggaagtggtgaagaaaaatcccctaacaataattctaaaatcaaatcctaaacttacaatgagacagctttgctaagaggaataagttggcagcggcagcatgcctcttcatgactcagcattcacatcggcatagtacacatgaatataccacttgagcagttcacccgtttaaggcatgggcattgtttctatgcatagttttttagctagaggtataatttactcagtattaggtttgttttaatgctctataaggacttctatggaatgtcaaaatctgatctcctgggtagaacagcattgacagcctactatcaaaacacaacattttagcaaaatgttaaatttataatgatagtgaactttatcaagcatattttttcctattgagttggaggttcaaacattttgcttaaagtaacctttattcctcatatttttaacagaaagttgctgctattgttgatgagctaccacttggactatatgataaatacctcttctgtctcaggtgatctgtactactatgaacctataatcctatatcgatccatcaatctgtcctttttgaatgctatgctttttggatatctttctccacaactgttgtccaaaatataagctcagttatacacatttgacactttataatttgtatcgcagtcctgtggacattcgtgatgatatatctactaaaggattaattcaggcaaacatttttgtactactatcattcagttatgtgttttgtggaatcaggaaacaatttcactgattttttttgagatgcagtttgcagaaaattatgcaaagaaaggtattgttcgactcaaagagatatttacacctgggacactccaagtgcctaaatcgcacaatcaactgaaggagcttgaatcgattcacaaggttatttacattttctctctccagtataaagcagtactagtacattatcttgtgaaggatttctgctatgcatattatttcattctgtaaaggttgctatccatctgtcccacagtcactttctatttctgtgtaccattgtccccaaacatttgtacaacagcattgatcatgccagtcttccatttgttacaccactgtccctaaacagtctgtagatttatctctgcaaacagtttgtacggttagatcgatcactatgtcaaacggttataaatgcaggtgctagagttgtatgtgtggttgagcttcagattggaggattcctatccagaccgtgaattggcagcttcccaaaagtcaatctgtagcatgtgagttgcatgcagggcttacttttttttttttaatttgttttactgataaattctttggaggtcttattgctggcaatatcaggttgattgaagaatatctggaaaggtccggctggcagcaaaatggacgaaaggactttttgcagaagccaaaaagactacaccaagaatatgatgcatcacaattgtatgaactttttcttttattccaaaatgcacggtattattttcatttaataaagggaatgactatgctagaaacatttaaacttaagtctcaatctaactccactcatgatatatacctgatgtgtctgaactgaatatgcatgtactatagttgctctgctaatttttttccctgcacttttagcattttgcatcagaaaatatacctatgcctatgcaattgattctctattaaatggttatgatgacttgcgttgaatggtactcccacacttgtgggagggcagagaaataagctagattccttataaacttttaaagaagttacaggttgtatatagcattgcaaaggaacatatgaagttctaattatcgaattgcaatatattttcatgccaacctgctggcagagatcattttgctaatttcgtttttcttctcttcatttctttttgatgaaaaattgctagtgggattgctacatttagttttcagtgcctttgtttacttaactctcttaatgaacaggcgcaaatattttcaagaaattgatgtgagatcaaaataagatgcttatgctagaaagtcgcctcacaatatctgcttccggacaacggatttgctcctgtttgcatacgttatggtcgaggagaggcgacaagccgacaatacattttatggatgacaggagtcaaaagaatatcctttgccgacaatacattttatggatgacaggagtcaaaagaatcatcctttgccaaaaccatttaattggcctaagcagtaaatgtggcagcacctgtcctccatccaaacaattttgtagctattctttcattacactttattttaattatttctaacacagatggagctgtacatcacgatgaaacgtctaaatgttcgttaaagttattaacatagacaggacgaagccacctgtaaactttgcggttgtaactctttgtgttatgaaaggtgtaaatatgtcaaaatgacagttgtcaagtgatgtttcttgggcagctaaacacctgatttgtgcatgccaaatcgctttcctgtgatgtgccagcaacatgcctatatgtgccagagcgcaagcaaaacttcatcatgaatcaaccagttgccttctatctcattgtatcagacgtaaaagatgatatcagttgttggtgatgaatgcccttaatgcttcattgaaactgctattatcaatgtactcagtagtttctactcccttataagttgctttgactttttttggtagtcaaacttttaagtttgatcaagtttatgaaaaatttagcaacatttaaaacactaaattagtttcattgaatctaacattgagtatattttggtaatatgtttgttttgtgttgaaaatactactatatttgtaaaaatttagtcaagtttaaagaagtttgactagaaaaaaaaagtcaaaacgttttataatatgatacggagggagtatgcaacatagcagtaactgtaacaattgaaaagtaggatagttactgaatcacagtcgcatttgcataaacattccaatgagcagtacatattaagtttgcataaacattccaatgagcagtatattaagattcatgaccacaggtgttgtacaacacagcacaatgttgtccaccatcagtgacctctcattgaaaggactccatatgcttcagatttgttacctgcgtcctgagaacttgaatctttttgtacactgactgcagattcctcttctcaagcttctccatcacaagatcaaatgtctcctgctttggagcaaaaccctttgacaccatttcctccaagaacaggcaagactgggcaaccttcccatttctgcacagccagcttaccaacaaggtgtaagtgctgaaatcagggctaatgtcctttctaaacatatggcacactaggaacagaagtatctttacccactgtcttttacagcacagcttcagcaatggcgtgtatgtctttatgtctggattgcatgactgctcctccatcttaaccagaagcttcagggcattctctgcctgagagtggtcacaagcagcagaaatcaaggtgttgaaggtagtgacgttaggggcgattccagttgtgcgcatttcttcaaccacagagtatgcatcttccaacctcccagctctgccaagtatgtagatcagggagttgtagaaggaagcatctggagcaacaccatcttccttcaacttgtcaaaggtatccaaagcttctcgcgttctcccagccttccccagtgcatgcatcaaaatggtatatgtaacaacatttgggggacaccgcctcttgcgcatctcgtccaagagagcgtaaacagtctgaaaatctttctccatgcagtatgcttctaccaggctggtataagtcaccactgaaggactgaatccatgctgcttcatctcctccattgtgtctagagcttccttcagcatccttgccttacaccaaccatgcacgagagtattgaagctgttctcgtctggaggtattgttcccctcagctcttggaagacgcctcttgcgcgcttcacgctcctctccttgcacagtgtgtccaggagcacattcatggcctttgtatccttcacaactccaaaccgatccatcttatggaaggcgtcgatggcctcggtccatcgacttgccccagcaagccttctcatcacctttgtcatcgtcatgagcgacatcaagcctccaacctcaaccatctgattgatcaaaccccacatcagatcaaactgcttgaacttccccagtatatctaccatcaagtcatatgaatcggcacaatggcagtaccctccctgagtgccaacccacatgaagaacccgaatgccgccacccaatcattgctgaacctcgtcaggatcttgtcaacaaggcagccagtgacccttacagagcagcagtccatggctatcataatggcctcaggagacgcgaaacgagcactaaggatcctgctgacctcatcgatgtcggcctcgaactcagcatcctcatgggaggcagttgcaggaaagccagggcggatcgacagcgacctggaggtgctgctctggcttcttcgctcatccgagacgttgggttcagtcgggagcacaaaaatgtcgtcctcctcgtcatccaagccggcgcatgagccatcgtccttggggttcctgaaccagtcggggaggtcgaacccggtggtagagaagcgtgtcgcggagagcctgccgccgctatgagacacgaacttgagagacggagggaaaaaaattcggccgcaccggcgcataacctctctctggcttggaggagaccaggtgggcaaatcgtcgaacacctctcgtgcgcggccaaacaacacctctctgaatcctctctctctctctctctctctctgccgccccggcggccggcgcgacctcaagtgcgggcaaagactacagctcgggaggtgatgagatcgagcttactcgatgcgtgtgaatggcagcggcgcgcgcagaaggtggaggtggagattggggagaaacgaagcgggagaggaggggggcgcgaaccgcgaataggcggcgtcttcgcccaaacgcgcccatgtccggatcgtgcggccccgtgggaagcgcataagacgacggcgaaggggcgcgcggtcgccggccgagtagatggatgcacggggacgcgatatgtcgccggacctcaccggcgccgatccgggaaggcgaaggtgggacctcgccggcgcgaagaggcgagggaggaaggagaacttggaggcggcggcgacacggcggtgggatctccgacctcgcctcgccggagctcagctcaccggaggcggacggagcgggagaaagagggaaccaggagaggagacgggatagcgcgagccgcgaggtaatgggctgggctggtatgggctgggtcttaaagccgcaaaaccacatggcccaggtaaaataggcccgaacataaccaaatatgggccaacacgtaagctgcaacgccggtcggacccaactagaatgagcagcccatcaatatctgcaagcccaacatagctcgttttaaagtagaaaatttgagataaaggtggagtattccccttcccttcgcgtaaaaaaaaaaaatctcccgtctcgtctcctccgctccttgcgccatctcgcggccgaacaggggtggggcgccgatctccatctggcgataagctcagtggaggggaggggatcctgatgagcatctacatactctttttttttttttgaaacgtaaagagggactttattaatgaccgaaatgtgggttacattcttggttcaatagctcaagaatttctgctggggcacagagtctccattccagacagtttcctgagctaagagccatctgagctagagtatgggctactttgtttgagtccctctttatatgggccacttccactgcttgcaatccttgcatcgctgctttcgcctccataattactccttcccacactgatcttgatgaatgcttcgttttcagtcttgctaccacctctgcattgtctgtttccaagataacaggcatatgtatccattgcaacgcacaccggataccttcaaggcttgccaatgcctctgcctgttctgcagagctacacggatgcagtgttttgcatgccgctagcaggatgagacctctgcaatctcgtattactattcctgcactcgcttccccagtttccatcctgaacccggcatcaacattaattttcgccgctccatcaggtggcgctatccatccgctgctctgcttttctgccatgtgcttctccttctgaccttcactgtacattggcttctttccttttatgtcatcaggcatttgtcggtttgggagcagtacctcctcataactagtgagaaaactcactgagcctgctatcgagcatctcccatcaccatggatcaggtcatttcgcagataccaagctcgccatagcatgtacataatgtgagttctttgctcttcgtttacaccatctaacagaatcaacaaccaatccggtcctgtccataaaaatttgtcttccccaggcaagtgccaaactgctcgcagggcttctcttaacgctctagctttagtgcattcaacagttgcatggtaactattttctcccttcgttccacagactgggcaggtcccattcatttcaattttccttcttcttttattctcccaagttggcaatttgtcttgggccagcttccagataaagatttttactttggcctgcacctttgcattccatactctgctccaaatcttcctttcacctgatgtagcagtgctagaagaggattgaactacacctttccctgataggttccaagccaacttgtaagcactcttcacagtaaatagacctgacttctcatggtgccatgccgggaagtcatccatttgatggtttggaagtctgattttcagaacctcattcgcatcctcctctttgagaacatgtcggactagtgtctcgttccaacatctgttctcttcattaatgagctcattgacatagataagtctatttcttcccttcttttccaggacattgatatgctccccatgtggaacccatttgtgtcgccatatctttatgttatggccattgccgaccctccatatggtaccttgtttgagcaggtccagaccatgttggattcctttccaaactgacgatgacactgttgggaaggcagtgtccacaagatttccattggggtaatatttcgccttgaacactctcgcacacaagctgtccggggaggtgagcagcctccaagcttgtctagctagcagtgcttgattgaagcacttcatatccctaaaaccaagaccccatgagatttgggatataagatcttttcccatgctatccagtggaccttcctttccccattatcatgtccccaccagaagttgcgaaccatcctggtataatcatcgcagaatttatctgtcatcttgaagacccccataatataagtaggcaacgcttgtgccacacttttgatcagtacttcttttgcccctgacgacatatatttttcattccaatccgacatccttttagataacttatcatttatcggttggaactgttctgctttcatccttccatctggtgttggcaaccccagatatttctcctcaaaggttgaactatgcacctgcaaggcactctttatctcatcttgacgttcttgtggacagaattcactaaacagcagagagcacttgctaggattgataagttgcccagtgctattttcataagattgagagctttttttattcttctagcttgctcgacctccgctttgaagaatagaagactgtcatccgcgaacaacagatgcgaaattcctggtgttgcccggcaaatcctgataggctggatgaggccatctgttttgtatctttccaagatatttgatagaccatctgcaatcaagaggaataggtatggactcaatggatccccttgccggagtcccctcgttggagcaaaaggatcaagcaattctccattaaaacgcacactgtaacgaactgaggttacacataccatgatccatctcctccatttgtcacaaaagcccagtctctccatcacaccattcaggaattcccaatcaactcggtcatatgcctttgaaaggtctaactttagggcacaaaagttttggttctcccgtttacaattcttaatagaatgaaagcattcaaaagctattagagcattatcagtaatgagtcgccctggaataaaagcactctgagcttccgatattatctcttgtaacataggtctcattctgttaactaggcatttggccaccaccttataaaccacattgcataagctgatcggtctgaaatccttcatatcctccgccaagttcttctttggaatcataactatcactgtatcatttacaccttcttgcattacttcatcctcgaaaaaattcctcacagctgctatcacttcgccctttagcagaccccagtttctttggaggaatctggccggaaatccatccggtcctggggcttttagcggacctatttggaacaaagcatcacttatttcttcatttgtaaagggcttaatcagatccgcgttcatttgctcacttatcttctcatggaacatattgagcaagtttaccgggttcaagttatcatccttggtgtatagctgctgaaaaaaacttcgatttatttcccttcatcttcttcttgtttaatggtggcgatccatcattctttttcagctttttgatcttgtttttcttagctctccaggaagcttttaggtgaaagtaccgtgtatttagatcaccttctttcagccacgtgatccgtgagcgctgtttccaccatatttcctccctgtgtaacatctcttctaactccttcttcacactatggacctcgttatcagtgtccagcagtcctatgtttctcaattctcctagcttctcccgtaaatccttgattttcttccgtacattccctatcttgtctttgctccagctgacaagcttggtcatagtgaccttcatcttatcattaatatcacccaaggtagatgcatcagcacccatcgtccacgcttcctggattacctcaggtagtgatgactctctctcccatacttcttcatatctcataatcttcattggtcttgccaatgttgtttcctctctttcgagaagcaaaggtgcatgatctgaacttggagtagttaaatgtgtaatgacagcctgcggaaagcgcgagctccaggcaggagaagctactcctcgatcaagcctcactttaacattgcggccctccctttgcatattacaaaatgtccatggggcaccctggaaacctatatcatgaagatcgcattccgataagacctctctaaagtctctcatctgtgattcagatcttttcctgtgagatttatgctcagtctgccacattgcttcattaaaatcacctatcatcaaccacgggtctcctgaatttgatctgattctccttaacaagctccacattagatgccggtcctgggctcttggctccccatagacaaatgttgctcgccatgtgcagcaatccagctccgtgatcagaacatctatgtgtcgagaattgtaagatttgagaaccacattcatactttcattccagaataatgcgagcccacctcctttccctactccatttactgtgaaacatcttcgcaacccaatacggttttgcaccatatattggtcttgtctagtttccgcaaggaaaactattttcggacgatgtatctgtaccaaacagactaggtcatgaactgtccgaggtcgtctaagtccccggcagttccaacttaggatacacattaggcccggcggtgctcctccgaggagcccgccgatgttgccaagtcgctattattttccccttcattcttgtcccctcctttctattcatctctctctcccaccgggaatacttgcgttaaccctagcttctcttctatagttggaataaactattctcttattttcagagctttaaccttaatacaagtactccctccgtttaaaaaaaatccaattctaagtataaattaagtatttatacacagatgtttccaggtacatacccaaaattgagtatttttccccatgtcccaagttgatcctaccctgatttgaaacacacaatgttagaaaaaatatatatatatatatatatatgaatagaatgtcacgtcttattgaatctatcatacatgcagttaatcccgatgaattggttaaaaatattagtttggtagcattattaaaaaaacatagatgaattggtaaaaatattagtttggtagcatcatagaaaaaaaaacataggaattccgagaaaaaaaataaaagatgaggtctatcaactttctaaaattcctttaaatttttttatgaaatgaactatcccataagaaactcaaaaggattttgggaaagctattcctttgtttaaaaaaacatgtagaactgttttccagaagatttctttaatcccccaaatttccccatttctcctctgttttaaaggaaactcaatttttgcctttttcttgtatcttatgaacaatgcatatgcttcttatcatattagttcaagttcatggccagattattgccttttttttttaccatgaaacggttaatagttattttagctttacttagttcttccctttttaccgtgcaacgggcagatggagctaagttgattctaaataacatggtgggccgcgtagattacgcggctagcatattttattattaaaacatattaaaataacaacatagttttaaattttgtactaattttatcaaattaccaatgtataatattcgtattaaattttaattatttctaaattgtattcctatatggattctaaactcatttttcaatattttttattttttaattctgaatttttattgtttataaattatattcctatatttctaatttttaaattaaaaattttagttatttctaaattatactcctatatgtacattagactcctatttcaatattccattttttattctaaattttcgttattagtaaattgtatttccatatggactctaggctattcttccaatattcctttttttattctaattttttattattttaaattgtatttctatgtggattctaaactcatattttaatattctttattttatttaatttcgaatttcagttacttctaagttgtatttctatatagactatatactcttctttcaattttttttaaatttagaattttagttatttataaattgtatttctatatggactctatactctacttttaattttactagaaaaatgcccatgtgttgtaacgggtgaaggctattttaatcttattattgttgtacggtataggagccgcaattagggaccaatcgtctcaagttagcatgcaagttgtttaaatagatttcttatatgactcatgtattttcaaaaacgaacaaaattaaaatcgattcaaacacacatatgtatttccatttgtatgtccaaaagcgattaaacttaaaaactgattcaaacacggatgccgtaccaaaagtaccggcaaaaacatcttcaatttttataatagtagagattaattttattccaaattttatttaattctaaatttttatatggactctatactcttcttctaatatttattatttcttttattccgaatttatattatttcttaattgtattcttatatggtctcttatactcttcttctaatattatttattttttaattccaaatttcggttatttttatatggactctatactcttctttttaatttcgaattttagttatttataaattacatttctatatggactctaccctctacttttattttttcatatttttaatttctaatttaattttcattagttctaaattgtatactggtatggactctagtctcccctccaatatttcatattttttaattccaaattccagcttgtatttctatacggactctaatactctatactcttcttttaatattcttttttaacttcgaattttatttatttttaaattgtatttctatatggactctaacctctacttttaattttcttatttttaatttcgaattttattagttctaaattgtatgctggtgcggaccctggtgtcctcttctaatattctatattttttaattctaaatttctgctaattttatattatatttatatatagattatgtttttacattactttaataagttaatagatttttgtttgatttgaatcaggtcggtctagcaagctacaaggtgatgcctcgagttggggatcggacagcgctatcggcagttagagtcggtgccgagctgatatatctttgttgcatcaccgcgggaaaatatcttcacctcgtgagaccacgggggattcgtagagtggcgcgtctagtactgttattcgtaggatcactttgtcacgacattagcttttatcatttagtacttgatacaattaattggcctaatgcacggcctgaccggagggattacgataggttacctctgctttatttgatttttgactaaattaaacaactagtgaagaagaatcttaaagcttatatcttgttatctgattacaactagtgaaaagtaatgcatccatccaacgtcactgaggaaaaaaaaaggtaatggtctgtccaatgttgttccgtcgatcgatggcatgtgttattaccaagggactttttacttaaaaggtttcgttgcgcacagataaaaaaaaaatactaccttcggttttaaattgccgctgattttttaagatacgtttgatcatttgtcttataaaaaatatgtaattattatttattttattgtgattatatttgtacaaaaatttagaacaattcaaatggtaaaaattaataacattaaaaagaaggggaggtagtactttttatgtttacgcttcatatgattcacttgatcgatcagagcgcttgaaaatcctggagcaaaaaacaaacacagcctgaaaagaaactcattacgaaatcgttggattactgtcttatttgcacttcacttgttgaaaatcccaaatcattgagcattaaacaattcattttggtcagatggcatgcttaaaatagttagcaagcgtataataatgcacatgttgacatggcgtcacgtgcacgtcaactaaaagtgatcttggctgttataatgcacgtgttgacatggtgagcagtgagaattttttaaaattttttagacttttttattttttaattttattaatagaccaaactaaaaggtatttttcaaatttgaacattttggtcacgacagctcacctgacatggctaaataactatgtcatgtcaggtgtaactggtgtagtagtgttgtttggccacgccagcctcgacgggacagttggttaagtgattcaactagggacaataaggtatattcaaatcaacagaagggctcaggatgtagagagtggcatggttccaaaattagctgatttataatggcatgtttgcaattcaacaaatagtagtagcatttatcaaaagtggtaaagttttttttttttgggaaaagtggtaaagttataatagcatggatccaattaaccctatctgatattggggatatcatacagattcgatgtaaagttgagggatggtatctgaacttattttttttccgagctaccaaggcgattagggcgcggacagtcggacagatgagacatggcctgggagcctgggaggatcccaagcaagtaaacggaccgcgtagaagagcttggggctgggaggaaaagaaggccgcgcagggcagggcaaggaaagagcaggtacagcgggctaagggtagtcccaaccctccacttaggatggtgtctatggtattaactacattgccacgtaggacttttagcttatgtggcactatattaattaagagagagagtgaagagaggaagaaactgggtctcatacaagacagcttcaacacgagaacctatgcactagacactatcaagttttacattgggagagatagtgttttcataatagatgaagattaaatacgattggtagaagagagatgatatatttattaatggtacactttaagaaaccatgggttgtagagtgtagtttctattgtgatgtcttattgatatggcaccatagacactgcttatggacactatgggttgggactgccctaagagaagacagcctgttcagcacagtatctttttgtattttcgagtgggaattttgggaaaagatcgatctgaacggatttggatttggattaaacaaaatgaataggaatcaaagttaaaatctcattgagtgtttgaatttgaatttttgtagggaagggaaaggatttgaatatctaaactggactcttttttccccttggaacatactcctaaacctatatatacgtatgtacgcacactcattcatatcaatacacatcctaaacctataagctctcccaagaaactgaaccagtataaattagcaaactcatcataggcaattattattattattattattattattattattattattattattattattattattattattattattattattattattattattggagtacggagaagggatttaaatttaaatctttttggtaatcctctaaacagcagttgagcaacgacgaatccttgatcacagtgtaaattcgttgcgcgcgtcaacttcattgagtacgtgcgtgaccgaagtgaaattaatacgtgcgtgccgtgattcagacgtgattaatttatcggaagtaaccaagttggaccgaacatgttttacgttaaaattgtttgttcgagagttcagtaggaatacaagtcgtcacctctcttctttgaggcgttgcgtgtgtttgcatgcagccagagagtcgtcaattgttcacgacatgactacatgtgcactgagtttgttcgtgcgtggtttgcttgccagtggcggagccaggattttaaagttgggtattcccgtctaagcgttgagccgttggccgcttctacccctcgcggctgccggccacccaaccggcctgactgcctgagcttggcggagtggcgggcgccacccgctacccgccgcggcaatagcctccccctccgtggtagcgcggtccagttctcgccgccagttgccgcctcgccgcgccgccgcctagggtttggaaatggggagcggcgcgagggagccgagccagggagggatgggtcatggagggagagcgagagggggccgtctggaagagtggtggctaagtggatcaactgatgtctgatgggtcatataggccggttgggctgtgtttggatcgaagaattgaggatttaggtgcactaatatatgtacatgtgtatagggctatgtttggatcgaataattgaggatttaggtgcactaatatgtgtacatatgtatatattagaaatatacttgtttttcgataaaaaagttgggtattcccgggaatacccgagaatcatggtagctccgcccatgttgcttggacggaggatggcatgtcatttgttatcgtggcctcgatcgtactatcgttagccaacattcgcatttccttttcagatgaataggagtacagaaagcagagacttaaaattcacttctattatccaacgtctccaagtcgcaacttgggtgcgaccgtgcgagtgcgattgcaccggaaaagaatttggtggagaccgcgcgcgcagccaaatcacatgtcctctgctgctccaccacggatttatcgacatgtggataacgtatcaatcggacgggccgacggggtgctccgatgggctccagggctccaggctcagccgagcgagagcgatcgggaataagttcactttgactcctttaaaagtaactcgaatctaatccatgaccctaaaccacaaaaccggatatctcgacccatgaactattgaaatcggtgcaatttgactccctaggcgattttagagagcggttttgctgacgtgacacctacgtggcggtattgaccgggtcttctttacacgtggcattgacgtgacattagaattaaaaaatatacgtggggcccattagtcattcacacaaaaagaaatgtgggccactaacatgtggggcccacgagtcagtcccctgtctccttccttcttcctcctccctctctcccttctctctctttctctccccttcttcttccccttcgggcggtggcgcgtggcagcaagcaagcccgtagcggcggtggcaaaggaagcggtgaaggacggcgggagcaggccgacggcggcaagggagttgggcggcgagtgggggaggaggtaggcggcgcggctcaccgcgaagagcagggcgatgtggtcgcgacggcggggatcccggcgagccgcacagacaaggggtagcggtggcgcagcggtgcgagggcggaggcggagcacacggccggcttgcacgccatggcggtggtggcggccgtcgatccgcccgccgcgccatccttcttcgcctccgccgctccggctccccgcacgaacacggcgccgcccttcttgagctcgaggaaggcgaaggagcccttcccctgctcccactcggtcttgacccacgcgcccataatgacgtgctcgctggatgcaggtgcggatggtggcgggctccagatcgtcggagagggaggccgtggccatgcagccgcaacggcatattcacccatgggggagggaagggatggataagatgcgtttgcgggcgatggcgggctctaggtcgtcggagagagagaccgcgaccatggcggctaccgcggcatcttcggctatgggataagcgagggtttgggaggagccggacgtgtcgggcggtcggcggtgctgttcattctggcggtgcggggatgaggcgtgacagctccgccgctctctcgccgcggcgctcagcatggcctggttgtggtggtgttggtggcgctcgttgttgccgctgctcgtcgcgccgcccttcttcgcctccgccgctccggctcccagcacgaaaactgcgtcaggcagctcccgtcgatgctgctgccgcattggtggcggtggtggcggcatggggacgaaacgagtcaccagctccggcggcggcgcctacaggacagcaccggcgcggcggaactcgccgtcgacgacgcattcgggcggcctcttgtcggtgcgtaggtcggcgccgggtagcggggcgaggacgtcctcgagggcagcagcgccgtgggtgggtgggtcgtagacgaaggctagcaacgcgtcagtgaatgacaaatgggtcccttctataatttttaattctaatgctacgtaagcgccccgtcaaacgccacgtgtgatgaagacccggtcaataccgccacgtaggcgccacgtcagcaaaccgctctccaaaaccgtctagggagtcaaattacactggtttgaatagttcgggggttcgagatatccggttttgtggtttaggattatagattagatttaggtcacttttaagagagtcaaagtgaacttattccgagcgatcgatctgtgcgcgtgcggctgttggctctagaggctcgatcttggcccgcgcggctcgatcccgtcaccgccgcgaccgacggaggatggacgcctccgaatccacattcattggcctcctgcggctcgcgggcaccgtccgcgtcgtcgtggcgacgcgctggcgagggaagctcgagctcttgtttcttgtagatgagacgggtgtgcacgcggcgaccgaagtagtagctgctagcctgtgcgtgctgcgtgtcgttgtgcccgtcccgtgtgctgtacctgtactcgtctgaaaatcaaatttcaaaatcacgatcctccagagcccgccagccgcacgggagccgagcggagcgcggcgccccgtccgatcgatacgttatatatccatgcgtcaataatctagcgcgggtctgcagaggacagggtttgcaccgagtctacactctacaccaaattattttcccgattgcacggttgcaaaaagaaaaagcaaagcgtccgcgctcaaaaaccttaacgaagcccctgctcgctgcggaagctgcgcctgcatgccgacaccggctggatcccctgctctcgcttcacctcgtccctgaacgataacccctcgacgcgcaccggtcacgcccactgcagcgcgcgcggggatcgttgctctggctccggtcgccatgggtaccaccaagtgtacatagagtgccactcgccgtggtactctgcgcatgaatgcatggtgcgtgtaaacggagatgggggcggaacacatatatagcagagcacacggtaactggttcgtggcgagagagtgcggaaggagactgccgtggacacggcacgtcgactgaatgacttcatggaaacgacagttttagcctttgacatcaaaatgccatttcatccagcgagctgtgggcaacaccgggatttgtaatggcgggcgaattcgacgcagagatcgcgttgcgacatgactgtgcagtgcttgggcgcggctggtcagtgcaacccgcacaaaatgcaaagacgcgaccgatctcactcagctcgatcgctgaggtcgaacaattcagcagtttaatccaaaaaaaaaatcaccgagaacaccaccaatccggaacggcggatgacataagcagaaacaaaaaacacagagcgtttcaaacgaaaaacatagcagggacaacttccagtagcaaaaatcgcacttcctgcaccgcgacatcacatcacaatgaatcagcatgttttacaactatgctaatagatgatccggacgagtgtcccaagggcctgtgaactttgagcgagataccgatcatggttgctgttgctgaggcggaggagctgcgccagcaaggaaaccggcaaccgggggctgtacgagagctggaggcgggaggttatcgccggcggcgggcgggggtgcgtgcgcgtccagggcggcgtctgctgcctgtatccggtggctcagctgctgcatgaatatgcgctggttaacaatcaaagtctgaacaaattccaaacaaatggaatccatctgaactacctacgaattgaaagggaaattcaaacagcaaatcacggcgaacaaatcccggcgaatagacacggcgaacaaatctcgaaaacacataaccgattcgtggcgaacagacaccaattcgatccaaactcagcaaccacaaaatcaggattcaggaggtgttggagagggagacgggattgcgtaccgatcacagcagcagcctccgggatgtcgtcgaggagctggaggagcccaggtggtggcgcctgcgtcgggggggcacgggtcgacaccacgtactgcggcggctgcgcctgacgaggacgagacactgggcgacgccgcctgtagtggtagtaagcagccgcacaggcacaggcgatgccgagtacagtcgtcgctacggccacaatcaaactccagggaaaggcgccggccaccgcgcctcccgtgccgccggcaaccggatccgccgccgagtccttcctctccccgaattcgtcgtcctccctcttccagagtaagatcataagcctcctcacaagcctgtagaggaaactaacgatatcctgaacttgctctctagtcattttcgacgccggcttcttcaagcgatcgatgactcccatggccatgcgccagaatgcatgaatacgtggaacgtccataaggcagacgccgcgttcgtcgtccggcggcggcgaagagagggttgcggccaccacggcgatggccgcgtcggggggggggggggggggagcaatcgctgggcgttgcggaggccgaggatcgcgtagtcgatggcgttgccgaaggcgaggaagaccctgccaccgtcgtaggcgccgaagtagcgcgcggcgccacctcgcgcgcggtccaggagcggcctgatctccggctgcggagcgacggcgacgcgccaggagtggcagacctgggccatgtggcgccaatcgacgggggatgggaggagctcgtggatgaggcgcaatgtctcgtggctgagcgtctccattgctgaggtggagaggggggcgaggcgagcggaggagagatggaatgccacgaggaggcgctgcgctggggatattcctctgcttctcgaagcgggaggagaagatggtggtttggtttggaaggaggagaggtggagcaaccgatctgccttgggccttatttattggcacgtaggttcctcgcgaggaatgttaatgggctcgaatttgaaacttatccggcaagatacttggggaattcttataggggattcagttcatttcaggtcccttaacttgactgcgagttcgacttacgtccttcaaccatataacgggtccctagcttcccgcgaggataagaggaatgggctaccgtgagcctccctctccagctgccacccttctcccttctccccactggtcggctacacaactctcctgccacccgccatcgtcaagcccctactcgccgcacacctctcccaccgacctctcctgccgaccgccgcgagcctctctcaccggaatagtcactcgtcgccagtcgcctctcccgctagaacgagcgctcgttgccagctatcaaagtggacacgtggagagagatgaaaagagaagggagagagtgaacttaattgatttatcacgttgactaagcggcgctgacccgattcaaactaccatgtcggataaaaccacccactatactgtgtaaggacctatgttgtacctgttttgacattttaaagatatgttgtatctggttttttagtaggatggaactcgaattcgttgtcaagttaagagagctcacaatgaacttattccatcttatgggcgattagcatcggccttataaggagcccatgaggccatcaacgcgatgaagagcccaagttagagatcgaatgacacgaggaggcactgcacaaactgagagattagaattggataagcctaactaactaattaaccagcttgtcctgcaagacaagcacaagacacgagtacacgactagtagctcctccttttctccctctacataagccggcaaattgagatgggagcgcagcgcaccatttccaattcgcctcgcccgcactgcacgtcgccagttcgccacccgctccaccgccgccgccgccgccgccgccatggactaatatgcacacgcgttgccggcggtgaacgagcatggccaccctcgctgttccggagatcaatttcaagcaaggcgatgccaactcgtttgatcctctatgtacgatcggtgaccgcgaggaccctgtgggtacgtttctctcctcgtccttgccgccgccgccgccggcgaccacgtgggtgatcctggcatgcgtcccgagcgtgtcctcttccgacgacgacttcaacttctaggccggcgaccacctcgcccgccttcgagtggcgcgatccgccgggcggcgggcgcctccctcctttagatctctgtctcccccgcgcctcaggacttctgcctcgaccgcgacgatcaccccttgtcgtctccgtcgactccgcgtctccgccggccgactcctgctccgcagcgcccacgatttcggccccggcggcgtcgcgctcggcttcgaccctgcaccgagctgcgccaacgatggcggctacatcctctgcgacgcttggctccgcacggccttcctctacccgccctgctccgacgactaccggctcctctgcgccgggaacgtcggcatgatccccaggactgcagcggatggcaaacaccggatccgtttggtggccgagctccagcctgacatgcgcttcgtgccgctccctgagggatgcaagctaccgcgtactccagcgatgcgaaccccccaagccaagtaccggtgcgtgaacgtgagcgacggtgagctgacgttcgtgcagatccacgacgacgccgccggcgcgccatcgatgatcatgatcagcatgtggacgctgcagttctgacgcgggggagaagttgatttggtcgatccgccacgcccacggggtgcgcatcaaccagatctgggaccacatgacacatatataccggaagaccatgaatccatgatgccgcggcgcgttctggtgctcgcgctcggtcaccccaaggaatccggcgtggttggtgttcttccagatcacctcgcggaactcgtggatgttcgccgtcgacgcgtggccaccagaagcgtgctcgcgtgcaagaagtagtacacgatgccgcagctgccgacggtgtaccactcctctcgctacgacgctacgtccgcgccacatggagaagatgatgagagtatgaggcagatgtgcgtatgcggcgctgttctttgctccatggcatggctgcatgccagtcacgtcgcattcgccatgcgcgcgctatcctggagcacccctccaccgacagcttggcgtgcccccctcccctcccccggcgacgaggtccgggccgctcggcgccgtttgcacgcccgcggaccgctaatgtcatggcacggcttggcgccgccctcgggtgtgccccccggctggcgaagcaggagccgctcgatggtcgtcaccgcacgcgccaccagctcgctggaccgcctttgccgtcgttccgcttgctcatcgccggagaggaaggggatcgggagagaaggatctgggagctagggttttgcccctctcggcgcttcatccgacacgaggacgatcggggccgtctatcagatcggacggcttagattcaccccgcgtcaggccgccgctaattactcagcccaatgggccacagaagtgcatcgggtcgttgccgcatatgtgggccgcgctcggctgctcggcttgcgggccgtcgaactgactcggctcgcacgaagactggacggcttcaaaagacctgggccgaaagttaagaaataaagttgataaaaaatatattagcctgtaaatgaaattttttctaaaccagacatcggcttcaatggaaggtgattgtttataggctaaaacaacaaaatcttgaaataaaactccaacattgtggtattagagcttaaatttagcctactcaattccttattcacatcatccctgtgattagaagccatcagtgccaatctttgttcgacgtgaacaatttcgagtcaaataagtttaatctaatctgtttagcttcttatctttaatgcttagtgaagattagctcatgttcatgttcaattaaacttaataagatagaattagggttcttgcgtgcccgcttcgttggaccgtcgacgccatgtcttcgcatgacgccaccctcggacacgcctcccagccggtgaagccatagccgcgtgcgtgctccacctcgacggaccgctgtcagcaccgtcgccaccatccactctctcgtgctgccggagtttggatcagagagagtaggggagaaaggggattagggttagggttttcgcacccctcccccctccggccagcgatttcatcggcgcaggaccaatcgaacaactcagatcgaccccgcgtcgggccgccatcattgttgggccatgcagtctttgggtcgcgcttagttcgcctcgggcgggccatcgccggtagatgggccgtgcaccgctcgccgtgcgctcgcgctaaatgggtcgagctgatattttgggcatgtagtttttcccattgcaacgcacgggcactattgctaattttttttcgcagcaccaacgtcattagtgccgtggtctaacatgatgacgtcaatgacgttggcactgtcccatccgagaaagctaagtactaatcaacgagattggtgccaggcattacaatattttgctataaatttgatcaaatttaaaaaagttgactaagagaaaaatcaaatgacttatctatactattataaaatttgaatatgtttttatcggtactttggtacgtcattcatgtatgagtcggtttttaagttcgttcgattttagaaatacatatccgtatttgagtcgggtttaaagttcattcgcttttggaaatacatgaaggagttgtataagatatctctttaaaaaactcgcatgctaacttgatatgatcggactcctgattgcagctgatgattttctagaaaaatatatatccaagtgaattccaacaatgaatttcaccttaactaaaccgtataataataataagattaaaataaccttcacccgtcgtaacgcatgtgcattttttctagtaatataaaacaaggaagtataagctcaagagttatatatgaaatccaaataaaatcgtacatataatgataccttcagactcgtataccacgtaattaactgcgcggccatatattatcaaatttctcatctatctaggtcaagccgtcaactcccgtgtcgtctcccttccttccgagttcgcccaccccctacgccgccgatcgatctatctcgcgagcaggccgggacgtatgccgtcgtcccgctgcgccacatccatcctggtaagcatcctatacgttatgcacatatatcccccctaattcatctctcgacacccacttaaccctagtgtataccaagtcccaagttagactggacccaaggtcgatagatccgcctgctgatatatataattaatcaatctaagaaagacatatggatggtgatgaggagttaatctatttgctgttctacttgaatcagatcggtctagttagctggacacataaatataactagttgatatataccctatgctttgctatggaaaatgtatggatgaatgtatgttatatattataaaaatggtcgatgtatatatttaaaaaatgtgaagataatgatttgacattgtttgcatattgagttttaaaaatataacaaaattgtaaatgatatttaaaatactctagataataattgctagtgggagatgatgatgatgtgacaaatttgtatattgagttttatgagttagtggatatcaactttatagtaaaatatgactgatgtcttaaataggggataggtacgcatactctactggagatagagtcgcaaccaacctggtatatctttcttgtataattggaatgctatcttcaccgggtgataccatgggagatttttacttgtgtagtggcgaccggagcgtacttcgtaggatagctttgtcatcacatcttttttcacctagtacttgataaaatcaatttgcctaacgcacaacctgaccagagggatcacgataggatccccctagcttttttaattttcgattaaactaaatgactagtgaaagaatctagaagcttgtctttttttcttactagctagtaaaaatgcatgtccgttgcaataggtgaagataatttttatgattgataaaaaatcttcccatttaaatgctaaactaaaacaagacaaacaaaacaatggtaaaacaagtcagatatcatatggcattgaatccgattgtgctcgcttcatgcattatcacacaaaaaatcccttatgtgcacctttccatagcctaacaaatcgatcgggtggctattccataaattgatgcataggtatttgctatagattgctaaagagatattatcatcggccaaagattaaaattttgcaattagtggaagttttatttactgtagatggggtgtttgcaaagtaactgttaacaccaaaatttggtccagtgtgtttttcgcatcaacagtaacatcatgcatatcttaaacaacgataattttaaaaagaaaatatatatgaggagagaaattagagaaaaataggaggaaaaaaaaaggagaaaaggagatcggaagaggagggagtggatcagtatgattggaagaaaaagaaagcaaaaaaagtggagaaaaaaaagataccgatcggggaaggggtgtaggacgggccggcgagatggtgtgggtcagctgggttagactgggctaggaggggatgtataatagttattcacattgaattagatacgggtgacatatcaaacggttgacaaaaatattgtcgagggaagttccccgatagcgggaggtcgcgggacccccctttcgtgagttcggccgggggaagaagcttgcctcttatgtgcaccttatgtgcacctttccatggcccggtgaaccatcgtgaggtggcctcgcgccggctgggcgagcagctcgcgaaacgcgaggaggccattgccgggcgcgaggctcggcatctggagagtgctcgcgccgagtgcgcggtgatagcggcgagggcttctaagctggaggcacgggagatggacttggcggcgggcgggcagcccggcagcgtggagttggtgagccagtttgccacggctcagagcaccctcgccaacctagagcgcttggtgcaagatgagcccccccccctcgggcttgttctagcgaaaaggtaaacctgcgctcggtccgtggtagctaaatggtgaagggcaagatcgtcgtcccaagggagccggtcagcgggactggccagaccgaggctacgatgaccgggggtcggggacggccgtgtgtaggcccttccgagcccccggggttcggtgcaacccggggcgcggcccgtgtttgggctccctttcggcgagcccccggggttcggtgcaacccggggcgcggcccgtgtttgggctccctttcggcggtttccaggttgccccacggtacttagggttcggagtgagcgcgaactgtcctttgacccaggacaagccagaggaaagagtgaggataacgggtttcatattaagtagaaaaattcattgcctgtaaagggaaaaggatacacagtggtagcccccgaccaagcccgcacaagccgagaggttgtgcgggggttggcccgagctcctggaaagcaaaaagtctcgatgctatggatagaagcgacggaggtgttcgatattctaggggttaggaaactctgtgccgtcttccgtggtcagtcggacagagcctggccggggaacgccgatcactttgtatggcccttcccacattggcgagagcttgctcagccccagacgcgattgcacgcggcgtaggacgaggtcgccaacttgcagtgatcgggcccggacgtggcgttgatggtagcgccgcaggctttgttggtagcgcgcggcacgcagggccgcacgccttctccactcttcaagatagtcgaggtcgtcgcggcgaagttcgtcctggttggcctcattgtacagcgcgacgcgaggcgatcccagggaaagctccgagggtaggaccgcttctgcgccatacaccaggaaaaagggggtttcccccgtggcgcagcttggagtggtccgatttgcccatagcacggcgagcaattcctcaagccatgaatccccgtgtttcttcaggacgttgttccgccatattccgccatgttgttcgtagctcggaagtcgagccgaacgacgtatttgaggacgtccccgcttgccgaagtcagcgtgactccggcgcctgcaccttgaaggttgagggagccgtcgaaatgcataacccagtgcccgctacgaatgtcggtgtttgggtcctctccatctccggggagggaggggctgttggtcagaataggttcgtccactggggtccattccgcgatgaagtcggccaggacctgacttttgatcgcgtgccgtggttcgaagtgcagatcgaactcagctagctcaatggcttatttcacaacccgtccagtgccctctcggttgtgcaaaatttggccgagagggtaggatgtcaccacggaaacccgatgcgcttggaaatagtggcgcaatttccttgaggccatcaaaaccgcataaagcattttctaggcctgcaggtatcgggtcttcgcatcccgaagcgcctcgctgacaaagtagacgggccgctgcacctttcggctgggccgactcgtgttgtcaggggcggatgatctgggacgcccttgctcgggggcccgggggggcggggtctcgagtcatgtcgggatcgtaggcctcgggaccactcgccaaagcatcccctcctcccacgggggcctcggggtcctcccgggggctgggggcctcgggcactgggcctacggggaaggaagggccatcacgagttaaaggggcctccagttcgctttcttcgcgctcgactattagggcggcactcaccacatggggggtcgcggccaagtagaatagcaacggttcttccggccccggggctaccaagatgggagggggaagtgaggtaagctttcagctggttgagagcttgctcagcttcctccgtccacacgaacggcccagagcgcttgaggagcttaaataggggtagcgccctctctcccagcctcgatctcgatatgaatcgacttagggcggccatgcatccagtgacgcactgtacgtccctaagcttgctggggggggcgcatcctctctatcgcgcgtattttctcaggatttgcttctatgcctcgggaggagactagaaacccgagaagtttgcccgctggcacaccgaacacacacttatcagggttcagtttcacacgtgtggacctaagactatcaaaagtctcggccaaatcctgcagcaacgtgtcctggtggcgagtctttaccaccaggtcatcgacgtacgcctctacattacgccctatctgattactcaaagtaatgcgagtcatgtgctgaaaagtaaggcctgcattctttaagccaaaaggcatagttgtataacagaaggtgcccacaggagtaataaaagctattttttcctcatcttccctagccatgcgaacctggtgatacccagagtaggcatctagaaaacacaaaaggtcgcaccccgcagtggagtcgactatctgatctatgcatggtagagggaagggatctttagggcatgccttattgaggtctgtgtagtcgatgcacatccggagcttgccgttggccttcgggacgaccaccgggtttgccagccattccgggtggataacctcgcggatgaaatcagcctccaggagccgtaccacctcctctcggatgaaggcctgccgctccagggcttgacgccgcactttttgccggacgggtcgcgcgtccggtcgcacggcgaggcggtgctcgatcacctccctgggaaccccgggcatgtccgacggcttccatgcgaagacgtcggaatgtgcccgcaggaagaagacgagcgtgctttcctatttggtgtccagggtcccgccaattttggcggtcttggacggatcatcgccaagggggatctccttgacgggcaccttgtcggccgaggtgaggcgcttcttggaggcgcaggacgcggaggcctccggggcctgtggctccgtggccaccgcgaggttgtcggcgcgctgctccgcgcaggcaagggcgactttgacatcgccaaagacggtgatgggaccactagggcccggcatcttcatctggagataggcgtagtgggtggcggccatgaacttcaccaacgcaggtctgcccaggaccgcgtagtagggcagattgagatccgccacatcgaagacgatccgctcggtgcggaagttggtggagtcgccgaaggttaccgggagctcgacgtggccgaggggccacgtgtgtcccggagtcacgcctatgattggcagcgacggctggagcttcatcgccggggccttgagcgcgtcgaaggcggctggggagatgatgctcagactggcccccccgtcaaccaggacgcgcttcatcctgacattgtgaatggtcggggagaccacaagggccaatttcccgccacgagcgagcactgttggatggtcgctctggtcaaaggtgagcttcacttccaaccagcgcgccttccgagccgcttcgtgggttggaacggcggccagaagctctcgcctcatggccttgaagcctcggcgggaggtgtgagcacatgcccccctccccccgtcaagcgtggcgacggtttcctaaggtatctggaactccagatcctcgctgtcatcgccatcatcggcgggggccttcttcttggcctcccctcgccggtcaccggctgaggtcgcgggggctttgccctctcgtcgaccctgccgcttctcctcatcggcctttcggaaccgctcggccaagttcttgaccgagcggcagtcagcgagactgtgccgataagtgttgtgcaccgagcaccacttgtctgccgaccggccctcgccggatggagcagtggagctcggcttgtcgccggtggcctttcccttgcgtggggcccgtgtaggcccatcagccgcaagcacatggccctcgtcatcggagcgggccggtttccttttacctctcctatctcgccgcttagagcgggggcagactcgtgggtagccgcagccgccgcaccggtgccgggagagttccaggcccacgcctcctccttccgagccaccttgtccgccagctcgaaaagctcggcggtggtcttaggctccttggaggctatcttctctaacatgcggttatgccgcacgccattccgaaacgcataaacaaccgcgtgggccggaatgcatggaatggtgttgcggacctagcagaagcgctatatgtatgaacggagggactcgtcgtacagcgtgcaggtccgcctcttctcccgggcggggatatgtgccctggaagttcgtgacgaactgctggcacaggtcctcccaggagtggatggagtcggggggctgggtcatcaaccagccgcgcgccggacccttcagggccatggggaaataattcgccatgacccggtcgtcacctcccgccgccactatgaccgtggtgtagatctgaaggaactcggagggattgatgctgcaatcatacttctccgtgaggttggggcgaaacttcgggggccaccggacgttccggagactcgccatgaaggccctacaacccgtccctccaggggtgagcgtgggaggagggcctcctcgtgaggaacgtggcactccagatgaggaggcaccttcccccatgcgaagagctcggcgctcgtcccggcgtcgctcgatattgattcgagcgtcctgctccccatagagaccgtcgtgacgcctccggcttcccgaggcccccatcgatgttggagccgtggaccgcctcgaggccatggctgaccgacgggccctcctccttgccgatgaggagagggtaatgggggtacgcgacgtaccggtgacggcgggtcggccgcccgcggccaactgccgctgagctgtggtgaccaagttggccacgtcgtccaaccagcgctggataggggtctccggctccgagttgacggggggatgccgcagaagggcacccgccgcctgaagcgcacctcggggcgagccaccatcaccgtaagtgaggcggcgccgtgccccgacgcgtggtggcctccctccgcccgggagcggggagaggcccgaaccacccgaataggtggggtcccccctccgcgagggttcgcagcggggtggagtggaagagttgcggcgacgatgacgtgggccgcggctctcgctggcatcctcactcccagacggagtgggggtgaacgccaccacctcctcctccaggacctcgaccatgatcgtcgagggcctaaggaaacttggggcggaaggaaacggcttctcttcaaagcgcgcaacttccccctacctggtgcaccagctgtcgagggaagttccccgatagcgggaggtcgcaggaccctccctttcgtgagttcggccgggggaagaagctcgccttttagaaatcgcgtacctgcccctaaggcgtctggctagcttgcgcacaatcggattatacaggttcgggccgctatcgagcgcaacaccctactcctgtgtttgggattatgtatgagttttataagggttcctttactccggagagcactctcgtcttctcctagagtttaggttttctgaccgtcgtcccccttttttatatttttatataaagataaagattggatggtaaacatctattattgtttctctatattttttttttgttgttcatggctttcatctcgttattattcttctctctccgtttcgggttataagacattttgactttagtcaaagtcaaactactttaagtttgactaattttgtagaaaaaagtagtaatatttttaacccaaaactaatatattatgaaaaattattcaattatagatttaatgaaactatgctggtgttgtaaatgttactacttttttctatagagttagttaaacttagagtagtttgactttgaccaaagtcaaaacatcttataatctgaaacaaatgaagtattattgtaaacgcttagcattgtttatttcctttttttttgttgttgttcgcttacttactatggtagcgtctgtatatatgaaatctattctatgagaatagtaatgcaaacatccaacatcaatgtggaaaaaatgcatctgtgcaatgttctatggatgtcatgtgtgttcttaccaagaggaccttttagctatatcaaatattgaagcacactgctaaattattcttttaccatgtattggtgcaaatggccttacacttcataatcatttacttcaacgatcagagcacatacaacttgaaaattgtagaaagtaaatggcattgttggtacacaaacttatcaaaccgctgtaattttgtacataaacttgcaaatggtagttttggtacacgaatttgtctgatgcgtgttgtttaagactccagcatgcccagattattactattgtttttaccatgctgatggagcatgattaattctaattttgtgttcgatttgaatcagattagtctaattgtctggacttatataattgatttgatgcctcgagtttgggaacggacggcgctctcgggagagagagtcaccgccgagctgtcatatctttcttgcgtcgtcgggggatgctatcttcaccgagtaagatcaggggggcttcttacttgtgtagtggcgtgtggactgtcgtaggatcattttgtcatcatattaacttttatcacttagtacttgatactatcaattcgcctgatgcacgacctgaccgaagggattacgacaggttacctctacccttttcgatttttgattaaatgaatgatttgtgaaagaatcttaaagcttattctttttgttgtcgtttaaggcttctgtcttgttattcgattataaacatctaaaatatttgtttctccagtttattttggttgttcgcctacttgcttgtctgtatatatggaatttgttgtctgtaatgcatccatgatccatccaatgccagtgagaaaatatattgtgtatgtccaattactactggaaaaagcatttttcccgacgtaggggtcccattttcgcaggcggacatgactcttaaagccaaatgatcgcctacaaaaatataaatcggggtgaaattgtcagtccgcctgcgaaaatagacttaaatataaatagacttgggtaggggttgattttttctaagtctccacacctcaccctcccttcctcacccacggccggcctctcccctccccatacctcacggcctctcccctcccctcacctctcctctccccggccgtcggagggggagcgacggcggctacggcgcggggtggcgcgacggcgcggcgtacggctggcggcagcctccctcccctcccctcacctctcctcctctccctggccactggagggggagcaacggcggctattgggcggcgcggcgcggcgtccggctggcagcgcgctcccctcccagatctggcggaggagggatgggggaggc

SEQ ID NO: 9850 - DNA, 86873 bp, Oryza sativa
  unsure (1)..(86873): unsure at all n locations
cctttttaatagagcaacatctatttcccataacattatttcataaaaagcatattggtcatagtaaggataaacaagcacgatgacgttacacttaaaactaaatggtcatttcatttataccgctccatgcgaggatgacttggcatgctcacatggcacttttttgggtccaaggactatattaatccaaataattaatttagaggacttgtttggacgatttgaaacctcaaggactaaactgagcccgaagcgaacttcagggaccatattagttattcacaaaaaaaaaagacaatgacttcacttcatttacttgccgtattttcaatattgatcaattagcaaataatgcttgtgcaaccaccaaaataaaaaaaaatagacaataactccacttcatttacttgcagtattttcaatagtgatgaactagcaaataatgttggtgcaaccaccaaaacaaacaaaatagataataactccacttcatttacctgtagtgcattagtgcattcaatttgaaaataatgctatggcatccaaagaaagaaacaaatcacaaaataactccacatcatttaatacatatcaataataaaataatgccaacatatacaaagaaggaaacaaatcagtgaataactccacctcatttaatactattatatcaatatgatcacctaaaaaataatgcgagcacatccaaagatagaaacgaatcagacaataagtcataactccagttcatttactcgtctctatctctttctcgcgcgcacgccaaacaataatacgtaaggaagaagcaatcgttaaattgtcacaccgtttttaactatttaccgcttcgaatacatggactacaagggtcactcccaccatcggtttccaagagctcaggatcacatccacatagacatcgaacctcaaggctgcaaagcatccagcagccatagtccatacgaatatacgatcgatacggcccgtgagagtgaacaaaccaaagaaagaaagtggagggaaaacttcaaatccgcaccccaaacattcaaaaaccaaacaagttccacccctcttccaccggctctcctcgcgcttcgaaaacccacacgaaaaccatcggggtgacgctgacgctggtcaatgacccgtgggccccaccccgccagttaccaccgcgaaacccggctcgcgagactcgcgtgtcatccggcctccttcccccacacttcaccataccaacgccggaaactgacaagaggccgcagcacgcagcacgcagcacgcagcacaaaccccctccctctcccaccccaccccacccccaacccttctccgatttaaaagaaaagaaggtgagagagagagagggattaaaacccaaaccaaaccaaagccgagggcgagcactcgaggagccaagcctcttctctctctcgtttcgtctcgtactcttgcttccccctcaattccccccctcctcggacccccgcgtcgccgaattgggcgcctgattcggcgtccccccgccgcgccgcggccggatcgaggcgccggagggtgccgctccggtttgctcctgggtggcggttgtggggggtgtgaaggagcggaggtggggggtggagtggaggggggaggctgcgtgggggcggttgcggtggcgagggggtaggggtgctcggccgcgcgatctgctgatccgggacatgcgtgaggcgggagtgttgtagcaagagccattccgctggattttgtatatttttgaggggggtgagttgctcgtctctgattttgttttccccttttttggaatcgttgttctgctcggtggtataatctattctgagttcatcacccgctcgggtttcctttttagtggaggaggttgttaattttggccatttcatgtgctttatgttgcattgccctaagtttcttgattaggcatgtccaaatccaaagtagggtttagggtggatcatgctgttcgaatctaagtttagatttacatttttatgagaaattgatgacaacaagttaagattttgatgagtttctggtcatgcacagggtgttggaattggaatgggccataacggttctaagcggagtccggtgcctgagaccaaagacggagcgatgaaggatttggagaagtctacctccttggaggtggacgactctaccattgatggtgatgtggatcttggtggagggctcactgtggtggggaggaagaggaaagatggaaggggttccgtggatgagaatggggcctcgacaaagaggattttgaggtccaactccatgaaaatgcatgtggatgctgagacagcggggggtgtggctttggatgtttgcaagggtgacattttggagaagaaacagtgtgatatcatagcagagggtgatagaggaggggtgctgacagttgatacttgcaatgctgaggaagatggggaagtgactggtgcggtagtgagcgatgctgtggttgaggcagttaggtgttccgcaaataatgtggaaagtttgggtcttgctgaggttgaaattgctgaagggaatgggttggacgctgacattcaggaatctgatggtgagatggataaggcagatgacaaactgtctacaccttctgaggagcagaatgaatctggaggtggaacaagtgttgggggcatcaatgactcccaggaaaacaagggggttaatgggctttgccagggagaggtcatagacccattggctacagcaaatggagatgaattgagcatgggtttaagcagaagcgcaagtggacgagaatctattgagcaagaggataccgttatgtgcgctagtgatgatcagaaagttgagaaccattgccagtttgacgataagcataaagaagctgaaatttctcagattgagctcgcagttgataaccacattatgctaactgattgcactaaccaaaagaaggggatcgacagtcctgtgaatgaaaccaagggggattcaactcctgacattgtttttataaggagaaaatcaataactagaaaaacatgtgaagcgaagcaggtgaaatctgaagatgaggttcgatttgagaagcgagttacaaggtctgctactgttagacagagagaggtttctgctagcatgtgcgtaggtgctacaaacgatgctaacttggaaagcaaagaaaggaaggaagatgttcatcattatacaaggaaagtgggcagcaccgtgcgctcaaaagttcatcacacaggggtggcagaatgcgacactgatacaaagaagaaactaaaaggaactgttaccactcgaagaaactcagatgccattgctaatgatgatcctccaagtatcacgcagaacaaggaatcaaaaactcagatgaagatcgatatcaagtctcaaccactcacaagaaggggcagcatagtaaataaaacagaagacgcagtttctgggttagaccagaatatctgtagttcagccatcactgataaaaatgatatagagctcacagattctgaaggagttaaatctgagaacaaggccgctgtgaggaagtcaatattatcagttggcgctaagattgttgccagtaagaagaggatattggaatcaggacttgataaagctagtggagagtcaccagttgcaataccatccctaaagaaggcaagagatacatcctcagacactgagctagagcaaccaaaaatgtcttctggaaagaaacttaccagaaataactgtggctcaagtaagaaaggtatgtcgacaagacggcaacatcagagtcaaacagctaagttgagtacatctgtgaattgctccaataaaaacgaatctaagctatcacagaatgaatccgatgatgatggaactggcagtgatacttccttgaagaacacttgtgtaagacgtactcgaagtggtggtgttgtccccaaaaaacaagaggattctagtgaatctgaggaaccgatcatactgagaaaaaatcatcaaagaggaaaatattctgggaaaagggctggatctacaccaaggaaagttaaagctcccaaaggcaatagaaaggaagtcaaggcttccagtttgaaatcttcgggtccaagtgagcagataaatacaggaagtcttcgtgaagaaaaacaaaaaataagtgatcatatcaagggcatgcttctagatgctggttggacgattgatctgagacccaggaatggcagaaattacttggattctgtgtatatacctcctagtggtaaaggatcttactggtctgtcacaaaagcttatgctgtgttccttgaaggtatggaatctgagaagaagggcagagctaaagatcagcgaccctcaaagaaatctgtaggtagccctgggaaaagtcatgtttcagaggaaatccttagcaaattaaaaagaatagtcgttaataaacgaagaaccaaagtagaacttcagaagttgaaaaagaggaaacatggtttactgaaaaagcagaaaacttccaagcgcaactcaaggggttccaaaaataaaatttcaaattctagaaagttgcatttaggcagcgaaagaaaaaagcgaggtggttgtgctctacttgctcgtggatcaaataaggatggtggaagcagcactaacggttttgttccatatgaatggaaacgtacagttttatcctggttgattgatcttgatattattgatatcaatgcaaaactgaaatgtgtggatgaaacccactcaaaagttttactggaaggtgtaaccactagggatggaattaactgcagatgctgcagcaaggtctttacagtacttgaatttgtggctcacgctggcgggccagtcagcaaaccttatagaaatgttcttgtagatgggctggacactgaccttttgcattgtctcattaatgcatgggataagcagtctgattctgaaaggcaggcctttttccctattagcactgagactgatgaccccaatgatgacacatgtggtatttgtggtgatggaggcaatttgatctgctgtgatggatgtccctcaacattccacatgagttgtctagaacttgaggtatgcacttaaatcgagcaagtaaatgcggtctatactctatagaagtctatttccttaatgccacccatatttactttagcaatacctgtatgaaaattctttcgagtacatcagtctgtcttttacttttgtcttgcctgctgtatctattatttttgtggttcctggattagaggagatgattgaaatgcctgataacgtgatctccaatttctttttgcactaaggcttgataatttgatgcaatgttttctaatggatataaacctcttattttcaggctcttccatctgatgattggcgttgtgctaagtgctcctgtaaattttgtcaggaacattcaaggcaggatgctcaagacattgctgaggttgactcttcactctgtacttgttcccagtgcgaagaaaaatgtatgtaatctctgcttgtactcccttttatagcgtgtcagtactttagatacatgcacaatttgtttagctattgattaacttcactgaaatatcgtgattgccaatcatttgtttttttgacacaatgtttttgatttcttcacaatgattatgtctgtagatcacccaggttgctctcctgagactactaacacatccaatgtctccagtcaggcatgcgatttattctgccaacaaagttgcagactggtaatactaataaaaaaattgttccttttcattcctagtttcgccgagcatgatttcagaactggttgttgtagtttcagctaagttagggtaggctagatatgaaatccaagtcaaaccacacgaaccaaaagattgaacttaaaagtaaggtgccaaaaaataataagaacaaaactcacctgttaaatatctgcagtgcattagggtttatgctgccacctttattcgtcagttttattgtttccttttgtgtccaagtagctctacttgataagcaactgacattgtgtaaagcaatatagatatgtaatttcaccaaaatcattaacatttaattctcctttagttttttttctgtatcttaatattccctacatggtgtctgtttactatttgaagtacacgggtcgttatttgttatgaatttctgtaccaagtgatgttttaggatggtgtgctactgaacttattagttttcaattagatttctgggcggcaatgatatctatggaactgtcaacagtgctctcatgcagtcattaagatatatctatagtttattttcctgtgatattcattataggggaaaggtaatgcactttggatgatgagggtaactaaaaagaatcatattttacaatgaagtgactataaataatatgtttactataatgcatggaaccaattcttttttgtatccctttagtatgcttttttgccatttaaatctaatcacataacacatattaagttactgtgttcatcttgtatttgaactcgtttagtgacacgtgataactttgtctttttattatcctactggtaaaatattatgaacttatatcccctccctcaaacctcactccacccatggagttactaagagtgatttacaggatctgaaatgacatttatgtgatgcagctgtttgagggattgcgtaatcttcttgctgtgaagaaggatcttgaaccagaattttcatgcagaattattcagcgtattcatgaaaatgtaccagaaacagttgttgctttggatgagagggttgagtgtaactccaagattgcagttgctctttcgttaatggatgagtgctttcttccgattgttgaccaaagaactggcatcaacttgatacgtaatgttgtgtacaactgtgggtatgcaccactctttctacactgctcacattactccatgcaattttgaggttatcttgtgaaacctctgtgatgttgatattgttttctctttgtaactctttgcgcgcacttcccctcatttcttcctctctgcttttggtgagtgggtctatggtgggagtttatcttacattattgctatagattcaatctggtgacggcaccagcatatgatactacgaatgggataatttaggctgatttgctagaacatctgcaaattcatttagaactgagtgcatttgcaagtaaccatgctgactatgtatgcaattagtgcacatatcaccaccagtgcttatatgacactgttcactgttgtcctgcaaatttctgaagataattttgtgtcgatctagttcactgcatgactctttaatgagccttttggcgatcctgagttttggatctggtgtatgcatcagctcaatgtgggaattttgagcttttggcatatttcctaatataatagtatgctactgtagccaagtaaaagtttatggaagccttaacattgtttcctccatcttcaatgcatgatatggtataatcaaatgttttttaactcaagagtggtagatgagtattcaatcactgtatatatgcttatgtggattgtggccttatgtgagatttaactaatcaaaataaacatatttatgcatctaaaggtgtatatgctaaatctaaactatatatgaccaaaacaacagaaaagtccctacccactgaagcatcagctatatgtgctccatataaaaaaggtatccaaatgaaaccatgtgattaatgctagtaaggaaaataaatccgtagtagctcacggtgagtgttttttatgattgacctgtggatctaccagctattgctagttttaactgaacacgtatgtgatactgcgacttgtttggtttctgtttagtatacactgtatcaaccttctagttcacgttttgctgatttactggactacgttattaattttatgatttttagttgacatcggatgaagtggccatgatatatttaatagttgcagaatttcttctgtgtttgacaagttgaaatggaaattttattccttgaaggatatttgattgccatcctgtttttgcctatgtgtaggtcaaattttgttcggatggacttccatgggttttatatctttgttttggaacgtggagatgaaataatagccgcagcatcggtcaggtgagttgccttcctcttgccctttttggatgctttgtcctgtgtatatatttcatctagattgaactctgtgctattcaaaaataacatagatgcatgccatcactagttctccgcatatactgatcatggtctagtgcatagctgagttgttttgtttcagttgcaaggttgcaagtactgcaagtgctttgattgcagtgcacacgcactaattgcaatcaattgtatacagtcattgtgccttttctttgcctgaactctctaatgaaataggcttgctatggttacttttatgtaatgtttttcccaatgaatcactgggcactaataagattttctatttggtctcttatcctgaaacagaatacatggaaccaagttagcagagatgccattcattggtactcggaatatgtatcggcgtcaagggatgtgccgcagactgctagatggaattgaaatggtatattgatctgagcccaaatctaggcatgattcatggtgattatataggacaactgtttattgcagaaatcctatttgcattgtgtctagtttcaagacattgaggcactgctcaaaacctgacttcttaatttatgcaacgtttttgtcgctagctgaaatatgtgacaaaagtaggaacaataacagactctagcttgtaaattgtagtgctctgatgtggttctgactacttcaggcatgctataattggtctttacaaaatagcatcttagatagtatttttctatatggtataatttgtaatacatatgtcggatgatacattggcctttgtattacatctctgaagagaataagtaaactagcttgcctgtctgcgtacctcattgataatagtttatatatgggcttacttcattttgcttgtttgagcatttgttatgtactgtgtgtactaacgtattctgatatttacacttcagatcctcagctccctcaatgttgagaagttgataattccagctatcgctgaacttgtggacacctggacatctaaatttggatttagttcacttgatgtttctgaaaagcaagaagtcaagtctaccagcatgttagtttttcctggaacaggtcttcttcaaaagccattgctaaagaaaacttcacctggggaaaattcaagctctcaagaaggtcagcacataaaatttaaccctcatatatcaatgagttattctcctcccccttttatttaatggtgaatggccatttgtgcagttgatggtgttttctctgagctcgagtctgggaaaacttccaatgtggccaatgaagactctctttgttctgcaaatgctgagactcaaggttcggctgccccatgttatggggacaacagcaaagatgctagtgcttgcaatggtaatgtttcacaataatccatgtaatgttactccatgttctcttttccttttcatggcatgacccataaattgaaaactcagaatacccacttgttttgcaaaacatgtcatgacatcttctacaaatctttgaagaacttgaaccgacatactgggtttcttgttgtttgagaagataggaatgcattacatgattgattaatgacatgaacaataggctacaaacttatgttagtggttcttagagaacaacgcatacatttgaattctatgatttcaatatcgttatgtttgtctaactattttgaatatcttttgcagattgacatgcttcctttgcattattttgtccctgtcaaaaggtgcaccctggtagtttcaagcattgacagatactattgaggacatgaagcacaccgatccttcattgttactattattctcttttgactcggcatgcggttcgtcggttggcagaagtagcctggatagagagggcgagtttttgaagatcccttgcagagcagcagcacctcggttctgctcaatattgatgattcaattgactctttggtttcggtttgacttgaaaccagcctgtgcagtgttggactccgatcacctaactttaagtggtttacctttacctgtaaagtcagcatgtagaactgagatgatagttttattccgtgttttttttttctggatggttaacttagtaccaaaggccaacgtgtgccgcaaaatcttcgtacatgtttctttacctgctatgtgacagtagctttgtttttgctagcccatttttttgcagccagatctcatctgtaagacactaatgcatgggcaagcagaaaaaaaatctcagatatgccacctgttctcatgttggaagtaaatctgataatgttatggcatctatcctcgtgttcatgcagatgcaaggtgcttttgttcgctgaatcgaactactgatcaggtgagatgtggtcaaagatcgcaaggttataatcactctggaaagcatttacttgtaatcatatgttctatctgctcttttctgtctttgccaatgatcttttcgcaggcaaagtgaaggctggctacaatgcaattatcactcgttgattgttggcagatagtactttttttttctgacagaagaaaataaatctctacagaaaggcgtctgcagtgttgaggttggcgaggatcttgtccttgacatctttgggcagcgaggcgaatggccctgccttggagtagaactccgccagtgatctgatggccttctccagcgcaacgtatgactcctggatgagcaggcaaacaattttgttaacaaatcgtcaagtaagcaacccagttatgttctgatgtttgcaaaattgcaactaaaaaaatcatgccatctcctgttccccaggtgagtgaacttgagttcaaacttgctttgaatttttttcatgatcgtttacttgtgtgttaattttcatatttattttaatttgatcggtgtaactcacttcaagcctcctttgaaatatacttctccgtcctgattcagggttcaaaatttgtcgccaaatgtaaggggttttggacggaggtagtttgaattttggaggattttcattagaattaaactatggagctagaagataaatcatgggctatatgtgtatccataaaatactacgggtaagtaacgataagcaaatggacgtaggtgaggattcagccttccctactgacaataaaaccattaaaaccatgagagtttcctagagctcttattaatttctttttttgaagtgagagctatagctttgtctatatttcttcctagatccatcacttcctgggtgtgtgaatgtggttagcagcgttgcaaaaatagggggaaaattggcattattacagccgaatgataacgctgagatgcgcgaaccaaacctcagcagcgacggcttgctggcctcgccagccgccgaggaactcccggatggactccttggcggcgtcggcgcctcgccggaacttggccacgtcgccgccgtcgtcctcccccagcgactcccggagcgtccgcaccacctccctcgccgccttcaggtacgccttgggcaacaccttccccgacttggtcctctcgttcgggtcaaatatcgatttgatcgccccgaccaccccctccccctcgccgccgccgccttcctccgtcgccctggcgcgccccgccgtgccggagcccacgacgacgatggcggcggccagcagcgccctcctcgtcgtcaccgccagccgcgctccgcctgcactgtttgcgacacacacaatcacgcaggaatcagagttaagctgtggattaaccgcgagagacgaaaatcgaaggcggcggcgataagttacggatgtgctgctgctgctgctgcttgctctcggcgtctctccgctgcttcggcgacggcgaaggcggcgacgaacagcagtagcaccggctggccatcagcgacatggggccatgaggaggaggagacggcattgcacgcatgcgatgctactccggctgcgacatgcacgcgaggggcgatcggtggtggtggccgagatgggagaggtgggcgaggagagattggtggtgagctcgagcacgagcacagccaccttatctcatatctgcaagtagcttcagggaggaggagcaggagggaggcgatgcgagttggagagacttgggagtttggcgcgagaagacgacccggcccgcgagggatttccctcgcaaattgagtgggcttttctttggaggcccagaatttgttggaaatgggacgacgcagcaaattctcactagccagaaaatatgcaaaatctgctactccaaagaagtattatcctaacatgaaaaattcccttattttgtgtgtgtcggtgagaagtttgaagtttgaacgcagggaattcaaggagattcgacaaaatctgccattggaccaacataaagatatgtgctttcttccaggtcttaaatctgcagcctctctcttgttttctcccccccccctccccctctccatcgatccgccattacctggcttggacagatagtcatagagcgatacttctagtagttttttttaatcctccctaaccacttcgatgtatgagtaaactccgtacaacagatcacgactttgtaatccccaatggtgatgggatgatgtcattgcttacatttgcacgagctaccaaccaaccagcactatctgcgtgtgctctgagctcttttgtgttgtttctgcagtctgcaacgaggtccacttgagcatcagaattcagaacggatgaccccctgtttgccgcacacagaaagaacgcacggctcgatcgagcagagcccttcctctccaccgggcaattttctgcgagattttcgaaggttcttcgcaatattttttatagctaaacacgagaatacgatatcacagctgggttaggaagcagttgagagaactgaatgttttctcatgtttcataaattaggcttcgattattttttaaacctttgacctactgttacaagtaacaatataatcaagctgtcaacgaatagcgaagtgagcgtagctcagtcgattaggtttcttatggtggaatcagttcacccgtatttaaattctagatttgagacgagtgcttacatatacagctatttatttttccagcgatagatggcgtacctataaacaacgagacgtccatagtgacttcatcaatctcatgatatgctggcctaatcttccaaatatgctcattattgtcgataacgaggcatctgtgatgatttcgtcaatctcaagatatgccagcccaatttttcgaaagtgctcattgtggacatctttgtttgtaccgtgtttctaaacaaaattgcaacaaaccttacgggatttgggaggaggtgggttccgtcaaatgtacacgtaccgggttaactgttagtggggattgtctgcaatattgcacttgtagggatccaacatgtcagtggcagctactgtaagtgcagcactgcagataattcacgtccgttatctgcacatcatacatgcaaatgctgttttagaaaagaatagtttttctctgtttatctggaaactgaacaaatttatgcaaattcctatggaatcttgagtgcctgttcactttgatgccatttgtcaacgtttgatgtcgcgattccggtatttgcatggtatggggatcgttggtcctaggatatatgcgagacttaggtaaaagagacggagacaaggatttttatacaggttcgggcccctgaattgttaggtaataatcctacatcctgttggccgaagccggtgttgctctttattcatctagatcacacaagtacaatatttggggtagcctatcaaactgttgtcgacatggcgatctgaagttctgactcatagtcgacaacagggtagccttccttctcgaatccatatccggcgagatcagagacagcgctatatctctcctgacgatattcgtaggcaccgtaggggactagccatgtctatctctgaagtcgatatccggcgtcttgtcttggcgtatgttggcttatatgttgatcttgtgtcttaacctattgttccgtgtcccctctcctcctagggggccttgtatttatacccatagttgtccccttatccgagtagaactagggaaaccaatatggatataatccgagtagtccttgtcgtttttatgtagaaccctattcatcattccttatgcggaactcctcctatatccgaagtttgtttccgtataggacatgatatgtggtaggtcctgtcgagatttagtcaactactattaggtatatggtatccataaccctgacatcatttttaaccatacctttttttttgtaaagttgccaaaattttggctacgtttagtttattgccaattttaataagtacatataaaatcttgccaaaattttggcaactctaccaaaatttgacaatgccaaaacttggtatggtttaaaatggtaacaaagtgaaccatccctgaatatcgtcttaacctcttttaacatttgtttaaagaaataatagtatgacctgcgagtaccgtgacatatatacaaaaatattttctgagcgagaggagatacagggactagtgacaacaactgacaactgacaagtggagcagcactacataaaaagggcaggaggggatgatgcgggcgctacaaagtgcttcacatctttgcctcgttcgtcctccggttttctccgcagtttcttgatccatccgcctttcctctcgcagccgtcggcggggggagtggttagttggttactggttagtactccatcggtaaaaaaatccctccttttcatatctttttttcgcttccaatcttgcgcaattcgggacctttcctgccatttcgttctgtccaaattcagaacattgatacggttgtttggttgttttctcccccttttctgtgtctgtacactgctgttcgtcggttgattcttgtgtgagttgtgaattttggcaattgaagaataagaccttgatgtgtttgcacgcctatgctgttgttatccgtgtccatgcgagtgaaatgatccgctgaatttttgggtagatctgaacttggtaccttgaatccagtagcatttggtgatcggcgcggggattagggtttaccgttcagaggggacgcggatatttaccgttgtgctccaaaatttcactgattgttttgggctcaccaaccttttgctttcttgcaggcttgcagagttttcagagagatttaggcaatggcggaatcaggccaatcgattgcgagtgatgtgactgcagtatgtagacaaaattcgccctttttatgcttgggactagctgaattgtgctttaattcgcctttagtgatgctgattttctttggtgctcgttttgggatgtcagctgatcggcaatactcccctggtgtacctgaacaaggtggtggatggatgtgaggcccaaatcgctgccaagcttgagatcatggagccctgctccagtgtcaaggataggtatctaaagtaccccagtctgtccctcctgctgatagttttgcgctttacttatttttattctggtggccatggtttgcaggattggttatagcatgattacagatgcagaagagaagggtctcattactccaggaaaggtgagacactgagacctgaaagtataaatcaactctcagattagaatatgatggagtcactttgcttatttgtgactaagaactcctaccaataaaatctactccctctagtcaaacatatttgattggagagagtagcgtaccattagaagattaatgtctcagacttctcatttaaggaaaataagatgttttggtctcaccatccctcgtctagattcactaacatccatatgaatttgaacatatatataaagctcatacataaatctattcaaaacctaaaacatcttataatatgaaacagaggaatggtgatgtcatggttggtaaattaatacaagcgtgcgtgtgtatctgaccttttattttttactggaatacatctgactgtattgtctgatcgatcctccctttcttatagagtgttttgattgagcctactagtggaaatactggtattggccttgctttcatggctgctgccaagggttataagctaatcctgacaatgccagcatccatgagcatggaaaggaggatcattcttaaggccttcggtgccgagttggtccttaccgatccacttctgggcatgaaaggtgcaatccagaaggcagatgagctggcagcaaagatgcctaactcttacattctccagcagtttgagaaccctgcaaacccaaaggtgctaaattgctaatatattattatccttgctagaaaagcacaatagtttaattactgttttgttttactggactatgctcagatccactatgagacaactggacctgagatttggaaggccactgctgggaaagttgatatccttgtctctggcattggaaccggtggtacagtaaccggaacaggaaagtacctcaaggagcagaaccctgagatcaaggtaacttatatactccctccgtcccataatataagggattttaagtttttgcttgcacggtttgaccattcgtcttattcaaaaaattttagaattattatttattttctttgtgacttactttattatccaaagtactttaagcataatttttcgttttttatatttgcacaaaatttttgaataaaacgagtggtcaaacattgtaagcaaaaactcaaaatcccttatattatgggacggagggagtacttgtttgcatgtttttatggttttgtgtatatgtgatggtgacttaactgtgtactaattttgtcttaaagatctatggtgttgaaccgacagaaagtgcaattttatctggaggaagacctggtaagatactgctctttgtatagctcaacttgcataaatcacattagtaatactagtactatttgtgatgcataactatggatgtcaaaaattatttgaaacatagggtgcacagtatggatggttcacgtatttgatgtaataatttagctgtctcgattctgttgaaccatcatgacattatcactgttccatgtttttggtttcaggtccacacaaaatccaaggtataggtgctggttttgttcctggtgtacttgatgtcaatctcctggatgaagtggtccaagtaagcaaatccaaattttctgttccaggccactaatcaaatgaaaaagatcttgtattgtttctatttttctgtaaacaatggcaatgcagtatgtgctgctaaacctgccacaaggcctgcatataaaaactctcttataaccacgtctctgtcgaatgtccagttccagttcacctgatgaaccgtttgctaaccccaacgttagaattcaattgttgatccacagatccagacatgcgcacggttatgtatatagaaacaaatgtacggaatgcaattactaaattgatctgaacatttcttgcaattctactctggtaggtctcaagtgatgaagccatcagcatggcgaagcagctagcgttgaaagaagggctgctggtgagctcagtaccccttaagaatccacccaactcttctccacctattgctgcacatatagcctatggtttaattccatgacaaatatttttcaggttgggatctcatctggtgctgctgcagtcgctgccatcagggtcgcgcagcggcccgagaacaaagggaagctcgtagttgtaggttccctcctcagaaccctgttttgccaggcatttcttaaaccgttcatgatctccattgttttgcaacctacaaaaacctcttagattctctgctctaacatgtccatcgccgtcatttgtgctcgcaggtggtcttcccgagcttcggtgagcgctacctgtcgtctgtcctcttcgaatcgatcaagagggaggccgaaaacatggtgttcgagccatgaacggctccagcattgtgcaaattgtgcttccatggtttagggggcttggagagaatggcgtcccgagtgcatttcttcatgttggtcgcacttgccatcatgtagtcgcttgatctgaataaagaacttacatacatcaatcaaagtctggggattcgatcagctttcctggtgttatatgagcagttcatatgtgtactttcttccatactgaaatgtgtatcttagctactgaagcttccatggattgctgggctgctcgagtgacaagaacacgcataaattaattcggcccgctcatagattcagcccacgcgagcgcggtcgtactacgaagctactctagtttattttcttgagcgagggtagctagcttcttctagtttattttctagaagaaactcgactatttttaggagtttttgattctgaaagaagctgtaatcactaaaagtttccttaaacatgtccctggtcatgcttggcaacagtttaatagtaataataaccaaatcaattctgaattttaaaatttggatttttgacctgttgagttgacagtatcttttcccggcgatttctgacctgaaagtctcaatcagacagctttcgaaaaggaaaaaagaaattccaaatcacacatggtttggtttcttcactggcacagagaaaataaataaaaaagataaaaaagtttttatttaggtggcggtagcaatccccgggcttcttttctcccaccgaaagggagctcgaaccagctcacacccccgcgaccgccaccccactccttcgcaccatcaccacaccaccctgtatattcctcctcttcttcttccttcgctttctccctttccagttgttcgcttcgcgtgcgcattcgcagctaccagtttggtttgcggcgccaagaattggtggctatagccttgccttttcttttcttttcttttcttttttgcatgtttgggcggcggcgatcgagctgagtcgatcggccggagtggatcgacgacggaaatggtcagccgctagcgttgtagtagtagcaagctactagctctgttcatcgagttgcagggcttgcgatcgtgttgtgttgggttgggtcttgggtttggtggtttgaatttggtgtggcgtttttcttgggcaggggacgccggtgaacatcatcgtcgggtcgcatgtctgggcggaggatcccgacgacgcgtggatcgacggggaggtcgtcgagatcaggggcggcgacgccaccatcgtcagcaccgatggcaaaacggtcggtcgcttgcttccctgccactgagctagctgatcattctttcgttgtccccggttcttgatatgatcaagaaccccgagtattgcagagctcgaagcgaactgttctgattttctgaattcgtattttgctgttgaaccgtgcgcgctaggtgtttgtagaattgcctgaatggaactgctactgaagcagcagctgttgcttttttgtgggcagattgtggcgagcctcgcaagcatttaccccaaggatacggaagcgccacctgcaggagttgacgacatgacgaagctggcttacctccatgaacctggagtcttgcataacctcgcttgtcggtacggtattaacgagatatatgtgagtgtttaccattcagaattctccatcttgatatttagtacttcgttcaggaccatttgggcttagccatctttccttttaccatgaaaatatatcgaacagacatacaccggcaatatcttgattgcagtcaaccctttccggaggctgcctcatctgtatgacgtgcacatgatggagcagtacaaaggtgctgcatttggggagctcagccctcatctgtttgcgatcgcagatgcttgttacaggtgtgttctgtactcctgttcacgcctttggtaatctatggaccgtgtcagtctcgaattgtgagtttgtgactgatgttcttttcttcattgtgatgctatcaaactcagggcaatgatcaatgaacaagggagccaatcgatattggtgagcggtgagagtggtgctggtaagacagagacgaccaagatgctcatgaggtatcttgcattcatgggaggaaggtctggaacagagggtcggactgttgaacagcaggttttagaggtacaaagaactccccatttctcaccatcttatttgttttcactatcttttttagaacatctccattcactctattgatttctctgcaatgcatatagtctaatccagtactggaagcatttggaaatgcgaagacggtgaagaacaacaactcgaggtgtagatttgaatcagcaactacaaccatgatatggcaattgatattttgtaatttccaaatttgatatgttgaatttttcagtcgattcggtaagtttgttgaaatccaattcgacaaatatgggaagatatccggggctgctgttcgaacgtacctccttgaaagatcgcgagtatgtcaggtctctgatcctgaaaggaactaccattgcttttacatgctatgttctgcaccaccagaggtaattctctagaaacacttaaataccacttccatcatctgcatgctcagagtgccatagtactgattacttctgaatgttgaactgatttcaggatgtgaaaaagtttaaggtgggagacccaagatcattccattatttgaaccaaacaaactgctatgaagtagctaatgtggatgacgcaagagaatacctagaaacaagaaatgctatggatgttgttggcattggtcaagaagagcaggtatacttcatagagtttttttttaaaaaaaggtccttgcatagactagtaagtactaaataagttgcggatgctataattgattcatcctttttacttctcaaggatgcaatctttagagtagtagctgcaatccttcatctgggaaacatcaatttctcgaaggggcaagaaattgattcatcgaagctgagggatgagaaatcagtctatcacctgaaaatagtagcagaacttctaatgtatgtataaattcttcccatggtttataatctatcatctgcaaatatatatttctgctgtaatcaagtgtaaaatatattttaggtgtgatgaaaaggctcttcaagattcgctttgtgagcgtgttattgtaacacctgatggaaatatcacaaagccacttgatccagattctgcagcactgagtcgtgacgccttagcaaagactgtgtattcacgactgtttgactggtaagaatgaaggtatatcatattcatcagtggacagtgatcaaatagcaagtgctattactcttactgcctggtacgtctagatctgaatgtgacaaaggaacttctttctgagctaacaggattgtggacaagattaacaactcaatcggtcaagatccagatgcaactaatattataggagtacttgatatatatggatttgagagtttcaagattaacaggtttgccagcagactagtttcaattatgcaagtgtgctattggttttgtttcttaatacctgaaacacaaatcatactatacttatctggcagcttcgaacaactatgtatcaacttgacaaacgagaagttgcagcagcactttaaccaggttagcgagacctttagattactactcctccgtcccctaatataaggggttttgacattttacttgcactgtttgaccactcgtcctattcaaaaaatttgtgcaaatataaaaaacgaaaaattgtgcttaaagtactttgggtaataaagtaagtcacaaataaaataaatttttaaataagatgaatggtcaaacagtgcaaacaaaagtccaaaaaatttttaaataagacgaatggtcaaacagtccaagcaaaatgtcaaaatcccttatattaggggacgaagggagtagatattaagaaaaaaaatattgcagaatatttatgactaataaggagactggtgaattcctgttacagcatgtattcaagatggagcaagaagactatacaagggaggaaatagattggagctatgtggaatttgtggacaatcaagatgtgctggacttaattgagaaagtgagttcctgaagcatttcacaagtgataattgtatctattgatgaataacacctgccaattccatgcagaaacctggaggaataattgcactactggatgaagcatggtatgaatagtcatctttccagaagaaaaaagtatttttatcaagaaactctgcatgtgcatgctgacacctgcaacagttaaaaatattacttcttatgttttgtccataaaaaaacattggggtagtttttcctagcaaaaaaaacattcagtagcatcaaatgcaagtttccatgtgttaccctatgacatgtgcctaactgcctatccatgcagcatgtttccaaagtccacacatgaaacatttgcccaaaagatgtatcaaacatacaaggcacataagcgcttcagcaaacccaaacttgctcggacagcctttacaatcaaccactatgcaggagatgtaagtgataatcagcgaaatgtgatatatcgtgtttagatttaccatcaaggattttgaacaattgttctagtaaacaggtcacatatcaagctgatcagtttcttgacaagaacaaagactatgtggtggcagaacatcaggctctacttaattcctcaaggtgcccttttgttgcaaatctctttcctccattacctgaggaaacctctaaacagtccaaattctcttccatcggtactcgctttaaggtgtgtcatgattgtagccagaggcttagagttatatgaattagccttggaattttctgtaacccttcattttgctacaatatgtgcagcaacaactacaagctctcatggaaacactgagtacgacagaaccacactacattagatgtgtgaaacccaatgctgtacttaaaccaggaatctttgagaatttcaatgtccttaaccaattgagatgcggggtatgatgtgcattttgctccacattgttattcagaagccttgtttttttttgtgttattttactttctataaaagctggaccgtgaaggtcttttgtctaaaaaatgttaaaaatggttaatgctgcagggtgttctggaagcaatccggatcagttgtgctggctatccaacaaaaaggacatttgatgagttcattgatcggtttggaatgcttgcagcagagcttgtcgacaggtatggatactgatgttatgcaaccagattaggggattgagacatgtgaaaaacactcttaactgaaatatgtccatcaaatgttctcttattcttctaaatggataataaagtgactctaatgcttgtacagctctgatgagaaggctgcctgtgcagcaatatgtgataaaatgggtttgaagggatatcaggtaatctttgtgagaggtgaaaatggaatatatagcaacaattcacagaatatatatttgcaactcattgcatgcaaccttttgttttgatcagataggaaaaacaaaggtattcctaagagctggtcagatggcagagctggatgctcgaagagcagaagtattggccaatgctgcacggcttatccagagacgtataaagacacatcttacaagaaaggaattcatcaacttaagaaaagcctcaattcagtctcagaagttttggaggggtatttcttcactgatgtgcctttagtaattcatatcttccgtattagtaataagttctgacttggcattgacatacaatgtaattcaacactgcagcacgcctagctagaatatttttcgagcatatgagaagaaatgctgcttcaatcaggatacagaagcatgcacgtactcattcagccaggaaatcttaccttcaaatgtatgagtcagccatagtaatacagacaggattacgtgcaatggcggcttgcaatgaacacagattcagacgagagaccaaagcttccataataatccaggtttgtagtattattaatttattatgatggcactgaattaactttcatgaaaagcaaccacaatttttcttgaacagaaataagcagcaaccacaattaaccgcttcattcattatttccagactcgatggcgccaacacaaagcttatgttgattacaaaaagcaaaaaagagctactttgattcttcagtgcctgtggagagcacgtattgcaagaaaggaacttcgaaagctcaaaatggtttgtccaattatacagttgaaacccaagttattcttgtgtgtatgttaatgcaatgtcaagtaaaaaaatctgaaatggtaaacaggaagcaagagagactggcgcactgaaagaagcaaaagacaaacttgaaaaaagagttgaggaactcacatggcgattagatgttgagaaacacttgagggtaattcactgtagagttttatctgtccttggacccaaatgaatttgctaaattggctgtgtacatcccttctggatgtagaggccgatttaatccattttctaaaaagaatgagtttgctaaatattgtcatgctgacagattgaccttgaagaagccaaggggcaagagatttcaaacttgaaatctgtgttgcaagaaatgcaagaaaagctttcggaagcacatgcagcaatagaaaaggagaaagaagatgcaaaactagcaattgaacaggcaccaccaaagatagtagaggtgccggtggtggacaatgcaaaagttgagctgctgactagacaaaataaggaacttgaggtataatactcgataagctttaattttactaaaaaaatgattcagcccttttgcttagactaattaactaattaccatattcatgtttgcatccaggatgaacttgttacatttagaacaaaggctgaagatctagaaaagagacttctagaggttcaaaaggagtccgatgaattgtcgagggaaattctagaaaaggactccaaacttaatcaacttcaggagatgatagaaaggtattaattattttaaatatttacataaattggctcgtgcatattacaaatgatacccagtcacggccttatgatatatggtgcaggcttgaaacaaatttatccagcttggaatctgaaaaccaggtcctacgtcaacagtcactacttgcatctgcagatgacgataaatcaaagcaaatagagaggtaatttttgaaatgtttgcactgcaattcttatccactttgtttttgaaagcctcataacttaacataacaaactcttcttctagtctggaaagcaagattgccatcttggagtcagaaaaccagttgctccgcagtaaatcttctgtagctgttcaagcagtaattactcctgaagtgattcagccatcagcaatggaggtataatcctgtcagtttaacattaataaaacacatctcttatctgataagatggatgatatttctgaagtatagtacacagttgcactaaattttctatcaaaaatctcaccagggccttgtgaatcgatatcagcttgaagaacataaaatcctcattgtacgtgtttttatagctctctattacccaacatgagagcaaaaaaaaaacctcagttggacattttatttatatggatttatatatttgctttgtttttttttcaggaggaggtggttgttcctcctataaagaatttaagcaaacaaaagtcgctcacggatcgacaacaagtatgtttcagtgccttcaaaatttttttatatcaatgcaagaaacaagttccacgttcttagttaacaggcattgtgcacattcaaaataatttttttctcgatttggttttcctgctctttcacaggaaaatcatgatgtcctgatcaaaagtctggctgaagacaggagatttgacaacggcagaccagctgcagcatgcatcgtgtacaaatcactcctgcactggcactcatttgaagcagagaagactaacatatttgaccgaatcatccatacaattaggtcatcaattgaggttgttacttccaaaatactatataaaactttccgtttgcagtgacattatatagttggtgagcaagctctcatgaaactcattatctgagtatttacagcacgctgaaagttctacagaactggcttattggctgtcgactacatcaactcttctctacctattacaaaatactcttaagtctagcagttcagcaggtaaaggatcaaatcgcagccgaaccacaacaggcaacctgttcagtaggatggtgcaggcaagttctttatccatactcatgctttgcgtaaagcaaggttctttattggcattgcaagtcgaagttttcaacatactttcgtactgattaaccaattacttatatatacaccacatcaacgaccaaagtgatattcacaacataaaaatgagcttacatcccaaaaattgcgtgtcagaatgctcgatcgtcgtcattaggatcaggcatatcaagtggatatagtggaatggttggaaggcctgacactgcatcaaaggtagaggcaaaatactcagcactacgtttcaaacagcaattaacagcatatgtcgagaagatatatggaatgatcagagataacctgaagaaggaaataaacccgttcttgattatgtgcatacaggtatgcaccccagacatttccatgccaatcgtgaatataaggcgatacaatttcgttaacaatttgtcaatttcacaggctccaagggctgttcgtgtgagatcatccaggggatcgttgaaaagtgtacattctaattcactatcaaggcaaacatcaagtgtgcattggcaaagcatcattaagtgcctgaaccatacactcgaaacaatgaacaataatcacgtgagtatggcaataattgttttcagttgtcccatgatcagggagttttccttatgaattatctattcgtaggtacctccaatgataatcaggaaaacattcaatcaagcatttgcctttatgaacgttcaactcttcaataggtatctcaccacctctaagtcttgtaaagtaacttcagttaactctggttgactacacaaagtcatatgaaatatcattagcatatgggggaacaaattggttgattctggactataacaaaatctataccttctcattcagtttgctactccgtcgagaatgctgctcctttagcaatggggaattcttaaaggctggtttacaagaattagagcagtggtgctctgtaacaactgaagaggtgaagtgaaaattgtgtataattttgtttggtgacaaatgagtaaaaggcaaggaagtatttgaccaaatgcgttgtgataatgcagtatgcaggaacgtcttgggatgaatttcagcacatcagacaggcagttggatttctggtatgcttgaaagttgaaaccaattattttcaaattatatagatgtttggttagcatcatgtgaattcgcgtgcaggttttgcatcagaagacacataaaaccttggaggaaatcactgatgagctttgcccagtaagtcctgaatatgactaacttgtaaatacttgaatttctgcaaaagcgtatagtatgaaacgtagtgccactttcccaggttttgagcatcactcaaatatatcgcattggaacaatgttctgggatgataaatacggtgcacaaggtctatctcaggaggtaagttgcaaacttctcaatacttaggcatatttcccttttcaactacaatgactacttccacgcaaaaaaagtaaagaaataaaaataaaatcttcatatgatgtgaaacacaccaacgtggtttcaggtcattggaaagatgagaacaatggccactgatgactcaataactactccaaatagttcgttcttgttagatgacgactcaaggtatgaatatgattggctgctcagtactgctattaagatatgaacctaaaatgggagaaacagtagccattgatctaacacccaaactgaatcaaattgcagcatacctatatcgttggatgatatagcacgactgatgcttgacatagacctatctgacgtggaaccaacaccactgctcaggcagaactctcagttccactttctactgcagcaccacgccacacagactgatggcattgtttgttaatgcaaagttgaaaacataattaaacaggttccgctattttgtgaagttcctcggtggtgatttcccttttttttatgggagtgcaggcttgccttttttttgttggcaatttcaggtgggagattttacaagaaagaaaaatatagaagatttttttaccattcttttcatttgttctgattgtttgaaagaggaaaggttgtatttttaatgtaaaagtgtacaagcgaaagtaaatatatgtatattttcagctaaacctgatgtaaaatttctgatatgattgtttctgtgtgtgtgattgtgagagtgtgtcaattcttaccattcttcatttactctgattgtttgacaagatgtatttttcgtgtaaatttgtacaaacgagagtatatttatatatatgtatatttcccccaaccaaatatgtactggtagagtggtgcatttctggtatgattgcctctaatatatgtttagaaggtaattttttcatccttaaaaaaatataatgaaagataccatattgtctaatataaaacttaatatttttatatatgtatctaacttttcaatataaaatttagatatgttgaggaaccataaaacttttcatgtttgggacacaatttttactattaccaactaacagcgtagtatttcagagttgaactgttcagttcagagttcattacaaaaagcaattcctctggcgcacacgacagagtccaatcacatgtggactcaaaaaatcattcacatcacaaccggaggaggaggggtcgagaagctcatgggcggtgcagctgccgccggatgcttcggtcggcgccgaggccaacccaggcccagccacaaccaaccacggcaagcacacgtcgtaggcggcgtggcgctggccgcatgcgcgagaaaagagagaagaaaaagaaaaaggagagatatttgaagggggggaagccgcgagaacacgctgaaccaacaacgctcccccgtcgccgtcctctcttgttcattcattccaggccgacctcactgacgaccgcccgttcttatcctctgaagcgaagccagagcggcaggcacgcagctgctacaacaaatgcatctcctaccaatttcgtcctaaattatactattaacttacacatatttgtattttacaaaaggtgaagtctattttaattttattattgttatatagtttaattaagatgaaattcactctaagagtttgtttggatatatatattttttaaaaaatcatgagctgtagttaggagtccgatcatctcaagttagcacataagttttttaaacagatttcttatatgattccttatgtattgacaaaagtaaacgatcttaaaaactaactcaaatacatatatgtatctccaaaagcaaacgaacttaaaagcctcatcatacacggatgatgtatcaaaataccgccaaaaacatcttcaatttttataatagtagagataacttacataaccaactactggctccaaatcatctatatccgattcatacaatagttacctataaacggagtactacacaagtcatagctggtcccatatgtcatatacacatgtattttaaaaagtttgtattgcagttggctacaaatatatagcatgttactctcctctatcttattttatattagtctgctattgtacctgctcttagatagtttgttatattttaaaataaatagtactaacgcatgagcacatggaaacaaaggaaacaaagttcaggtccacttctttattcttttataatatcattttggaatttactctggaatgcctcttatttgaatatttctggaatttactgagattacctcttttcatatttttcttggaatttactctggtccacgatggcacaaaagagtttttcttttttttctctttaagaatttgaattgctcaggaaaattattattatgttctttcttcatttctctactaggcatttcaattctggtcatattctattattacgatttctatcctacatgtcagtcaaaaatcgattatacagtatagtatggatgcttatgacatcgtccaacagagtttgccttctctaataaaaagaagaaaaaaaataaaggtttgcctttgttatggtgtttgaacagtcttttgtaacaagaagaaaaaagaaaaaaagaaccttgtcgattctctgaatattcatgttgaattggagttcggggcaatatacgtggccgtgaattgatggatgataagaagacaaaaacaactgagatttttcgtcaagcaacaaacatcttccagatatgaacaaaaattggacctttatgagtatggcagttgaacgagcagcatagcatagcagtatgggcctgattgggtcatgggctggcccaatggaagctagggtttctcttgctttttgtggaagtaatttaatagggggcaatgctatggccacacagccactcccactttgtaattaaaacacactacaaaactgggatgtttggaaatacctgaactgaaattgcaagaatagtatgattatggatgatttattagccctggatgatttagtttgctccactagccactgttaaatttattccctcaatgcctaactacaactatctttaacttttattatgacaagtagatatattgggataggatttccctaaaaattgtgagccacctaaggctgtaatattcctagtataaaaaaacacatttattggatgtgtatggcatgccacaaacttaccaaaactccgttacgtcttcttccatcctagtacactgcaaaaataatgactatagattatcacggacgcatttctcaattttgtaaacaattttgtttttacacaaactttcttcctcattccaccttataaaaactctttaaaaattgacatatcaacttcctaacatttaatcaattaatttacgcccttccataacctattacatctatcaatactttcaacacatgcccagatatctccctaagaactactaccaccaataatagaaaatccttactaccaccagttgtcatttatacatgacacttctgaccagtaaatcaactagtactacatttttgcctcaaacattggctgtgtttagttcaacgctaaaattggaagtttgaagaaattggaataatgtgacggaaaaattggaagtttgtgtatgtaggaaagttcgatgtgacggaaaagtaggaagtttgaagaaaaaagttggaatctaaacatgaccattatgtcgtaataacaacatatattatactccttccgttctactccctccgtttcacaatgtaagccccctgttcgtttctcatgcaatctgaggataaaatagatactcgtggcacgtttttcaaactgctaaatagtgcgttttgtgcgaaaactttctatatgaaagttgctctaaaatattagattaattcatttttcaagtttgtaataattaaaaattaattaatcacacgttattaccacctcattttacgtgaaatacttaatcttcatcttcattttcatctttaggagattcaaacaccacctaaatcattctagcatttcccacattcatattcatgttaatgaatctagatagaacatgaatatgaatgtggtaaatgctagaatgacttatattatgaaacggagggagtatagactataaaataaggctgtgtttattggttgaaattggagatgatgtgactgaaaagttgtgtgtgtatgacaggttgatgtgatggaaaaagactgaagtttagatccaaactttggatccaaacacatcctaagttaatcattaatacatgagacaagtagagttgggagagtaatgaaacacttttgggtgggtgcccggagcagaggtggggaagataaacgagcggtggggatgtgccgggacaggtatttgaatcaccgcctctgaatcgcctaaaaccccccttctttggctacccctccccccgtctcctcctcttctcccctcccccctcgcgtctgtggcggctatcttcgtgtccctctccctcctcctccccctctcctagggtttatccaccaccacctatcgcctctacctaccacaagaattttttttaccatctatattccacccctgccttctttgccccccgtacctcctggaattttcgccttcttgggatccaatccgcgaggagggaaagaaggcgggtttagatcgaactgggacggagggaggaggaggaggaggaaccatggcggccgttgctcctggcgctggcgaccgtatcctttttatttttgttttctttgatgtgtttaatctgttttagcagcggggggttgcggtttgtgcggcagttcttcgtaaagatttgaacttctttttttttctggggtgataatttaaacagcctttttttttctttttctcgtgttcgaatcctatggctgtattattgtttagttgctcgcttttgaatcgaagtgtttcttccttgattcgcaagctacagaggctactgacatgatgcagaagctgtcgttggagagcaagaaggaaggcgccacccctgacgctaccaagaaggtagcttttgctggcgattcttgtctgtgatgtgttgcttgtgccatcctttttgtttgtttggaggagaggtagctaaaaattatggtcctttttgtgaattgcagcctgccgggatgccctatggatctgcaagcgccggcgatgcgcagaatgcggcgtcgccggtggacaggtcgatcactcccctgctccaggaggccgtgaatgccaacatcttgtatcagaccaatggatatggaccctcagcatattactatcctactggtacaaacacctagtactttgctggataatcaggtagtctaattaagtgctgattttaatgtttgtgcgttcgtgtatataggttatgacggctcagccaatgaatgggactccagatatgctgcccatgatggaacggagatgcctcctgtaagttaatgcagttatttatagttagttcatcactttgcgataggtattttaaggtgtaatgtgatatcacgagttcacctgtgcctagaggaggctaaggaccaaatatggagatagaaaccgtgggggacatatgttgttaatttggaatttaatgaattgcttgtctactcatgctatgtgttggagataaattaactcgattctgttacaatgatccagcagagtgtttatggtgacatgtatggatatggctatgctccctatggcccatatccttctggttctcctgtcccaactgttgggcatgatggccagtcatacggcgcacagcattaccagtaccctggtcaatattatcagcaaccagctccaaccaatgcaagccatggcgtcaatgctgtcaattctcagtctgagatgccctctgttgctgctcaccaggcacgtgttccggttgaatcagcaaaagctagtgccaatgggactgctaatgggatggcaaatactaacagtagttcattagcacgtaagcaaacccatcaaaatgtatcagtattaaacaatggttcatatggaggagggactttgcaaggtggaccatctgctaacaattatggtcacagtggtcttcattctccagttcagtggtatgatgggccagtctactctaatgggcatcagagatcaaatactaattccacatcttatggttctaactcgtattcagcaaaaaatcagagccagcgcccaactgcaaacctcatggtatgttctaggactgtccaattctccattgcccccctccttcccccactcttcttctttttccatagcttctcaaagcagtatgattgtctcacaattatttttttttctgcttattaaatgcatttacctagtattagattctgcgattactgccttccccttaagttgcacatagcaaaaatgatagtgatgcattatgtggctctcacaaagtacaagtattagcctaaaatatccatttgtttcagggtatgcatgcacagataccttcgtcgggaatgggtttgacatctcctagttatcataccaggatgtacccagacaacagattatatgggcagtatggtcagtatgggaacgcacttaaaactgggcttggtttcggatcaaatatgtacaactccagaaataatggacggtggggaattgttgatagcaagtacaagcctagaggtcgtgcatcttttggttttggcagtgagaaccaagatggcttcactgagcttaacagaggaccaagatctggaggattcaagcaccaaaaacagtttggaccttctgtcactattgctgtgaagggccaagccctcccctcagtcgggaaacaggagaatagtgccattccagataagggccaattcaaccaggaaggttttccagtaacatacaaagatgcaaagttctttgttatcaaatcttacagtgaggatgatgtgcacaaaagtataaaatacaatgtgtgggcaagcactcctaatggaaacaagaagctggatgctggataccgtgaagcgcaggagaaatccagtgaatgcccagtcttcttgttcttctctgtaagtattattattaccacattatgtgatccatttgtccctcatatcactctttattgacattgggcatggaatataggtaaacacaagtggccagtttgttggtgttgctgaaatggttggtcctgttgattttgagaagacagtggattattggcaacaagacaagtggaatgggtgttttccaatcaagtggcatgttgtcaaggatgtacccaacaacatcttgaagcacattacattggataacaacgacaataagcctgtgacaaacagccgtgacacacaagaggtatcctttctcaataacttgccaagttctgttgattgtacaatggtcaattgcaggccacgggccattaagggtactattaatgtctctgttattttagatagttaatttcatcgtcattttcttgagataattcaaatttcttgctgtggaaccagattagtcgttcagtaaatgagaacttaagacatgatatatatcaatttcttcatcatgcttatggtcatgagtggaccttcatgtataagaagctgatgaattttatttttatctattgatatggcatgacaatgtgatgatcctttcagtatgctccatgtgcgttacttaccaagtagatgtaatgcttcaggttaagcttgagcaaggtcttgaaatgctcaagattttcaaggaccacatcagcaagacatcaatcttggatgattttggtttttacgagaaccggcaaaagctgatgcaggagaagagagctaagcagcaactgcttcaaggacaggcaagcattctattcacacatagagccttgtgtggttaaaaaacctgttcagaatgttagcaccactcagagctattggtggtgataggttctgatgcctctgtttttatgcactttgtacagggctctcttgacaatgcttcacatgaaaaggagaagaatgcaattgatgggaaatccacagctcagaagcaggcattgagcaaggagggcacccctattgtcggcgaaatgctgaacgcctcaaaatctgcagttgaaagcagtgtaacaaatggcaattagcgcgatatattttctgcgttaattgccacagccgagcagtcagattgtgcaaattctgaaggttcgcggcgtggctgagcgatagctacttgggttgggacttggcaactaaatttcgtaacagactttctataggcttggtgcctggggagtgggtcagttcttactttgattttagctcgtgtgactggttttttgcgtcgttaggtctcatatattactcttatgacatcgggttttatgtaacccttatcctttttgttttttttagccttttcatctattgttattgttagcgaagcatccaaatttcgataaatctgaacaacagtaaggtagttttccgagttttgcagcactggagaaggtaataagacaagaactctggttttggttggtcctcccttgtgttgtgtactatctgctttcaagtgtcaatgtgccaaaatggcatcaatcatctcgtgcattttaggcatccacgatgtgcatgagaagaggtcttactacctactttacaattggagaaaatcctctatatatccttgagagagatgctctgaattttgcctattcccttatatactctcgagttttcattttgatcttctctatgtaatcgttaaatgtttttgaaattaactatataacccctctcttatacctgtgttagtttaatgataaaagcacaattcttatatggaaaaaatctatttgtaaataaacaaagggaatataattatttgacaacaaattttaaaaataaaaaaaattaaattaacttttatgatatcatcaaaatttgaacccaacaaataaataattttggttcacaatttcttgctaaaactcttctatggattttgtccaaaaaaaataaatttgttcaacagtttaaattttctattcaataaataattatgtcccatttgattttatcatgaattacaatttttcacattggtgaattataaagtagagtagatagcatataactgtaagaatgggaaatggacgatagggtcattttagaaaaaagaaaattaacaggcaactaacataatagggatagaggagattaaaatgaaaagttaaaggtatataggggatgagacaaaattcagaggtatagaaaagattgcgaaacttttcagaggtatgtggaaatttttttactattgtggaggtgggtaccagaggatgtagtaattccatccggcaagagcattactagtacctggtaagaagcaataaaaaacacttaactctctactctccctttttcaaccaaccaatgttttagacgtgggccctagcttactactatctacacattgtactccctccgtcccaaaaaaggtaacttagtattggaggtgacattttctagtacaattaatctggacataaatttatctttttttcgacggagggagtaggagttaggaataactataacctagtttcgtgggtttcatcttagagcaagttttttaatagtatagtcaactattagctccaaatcatctatagttaatttaatagccaattcatacaatagttatctataaatatatattacactattaatatatggttccacctgttatacacatattatgtcttgtagtcagtactgcaactggctataaatatgtagcccgctgccattctcttttatgtattatctcctcgtatgtgtttatagctggcttataatctagtattgtacatgctcttattgggcctgtttggtagagatttgctgcggctgttcagctgcagcagctacaatatagcagtagaaattgcactgcttgtactgttgaggcagtgcagctattgccgcagccggctgtagtgtccagctaacgaacagatccattactcacttgatcatttatacatcgaggatgccatagagacgtcctgtatagcctttttctccatgagaatcaaaatctcagcagaatcaggacctgattgtggctctgttagctgctggaggttcccaatcgtggaatagtgcacgtggaaatagagcagtccattagcgcgtgattaattaagtattagcttttttccaaaatggatcaatataattttttaagcaacttttatatatatgctttatgaaaaaaaaacacaccgtttagcagtttgaaaagcatgcgcatggaaaacgacaggcaatgccgaacacagtcaggttgacaaaggaaagggaattgagcatattaaaactccttcctcttaacacacatggactatatttatttttaaatttattaattttcatttgtacaccgacttctgaacttacaaatggaattacaattccagttacaatcacagggaataagcaatacaaatagctagagttatttacagagtctgctgtgcacatgtatcatgtatggatattgcagtgccaaactcttctcgtttctgacgagttctactgacacctgacctgatcattgtcctgatcgggttcacctgcatgtgatctcaatcgactgacatcgttccacagattacaagttcatatatagatccggcaagatttttcatggctaaaaacagttcagacatcgattccccataaaaacaaagaacagttcaggcacacgcagagtggcagatgcagaactcggaatccgtcggaacatgacatgttcgattgttcaggcctcccaaatcttaataattacgtgaagtgctaagtatacttataattagtagtaatataattagcagtataactagaatgataaagcccataaaacccgtaaggtcagaattaaggcttagaacgaaaagtaaaataacacaacatgcatgcctaatacataaagttaaatctactgaactagatattattatgttctatgaatcattgtgattgaccatttgttcgttttttcccgttctaaaagttatatcttgtcaatcatgataacaagaacgtggggatttgactgtcaaattttaagacctcactatgtatttcgaacaggaccttcaaatcctagctatgacgcggccccttcacatgcaaagctctaaccttcgtcaaggagaggctctacactgcctagatgagaagcaggtatcaattcactgttgcacaaaagataaacctgccaataaacaaggcaaataggagtattgaatatcacgcgtgccgatttcaccatcggaaggaaacgaatagaaaaaaaaaaggttcataatgtccaatgtatgttgaacacataattgtgtgagactgttaattactcactacatcttaaaatatgtacgtttgaggttttgcacataaatttaaaaatagataaaattatagagaggagggttacggttaatcgagatgaggaggtatgtgaagaataactatattttaagataaaaatttaaataaagatagtgtgtatatataaatgtggaggtgctaatgcaagatattgcatcgtaacttcagtgttagatggggaaccgcctatgacaggctggtttgcatgaaatgcaataaatttaatggacaacagtacacatatagcagcagattgagattctctaacttaataaatttaatggacaacagtacacactatagcagtagattgagattctctaactcaattatttcccactgacgtgggtcactgacacgtggaccctctacccaacggacccatacatcagtgactcaaagttagaggagaataagtgagagtatccttttcagtattcgtattggagtctggaaaatgttctcagagctgcagggaggacatgtccaggttagaaagcatttgtgagatattatctcccattcttatagaggtgtactcctgtatacctctttatacttgagaaatattttttctaaaaaaaaagataccaaaactaatctaatatattagaataggattgagaactaattattttttaatttatcttacattttgaggcgtataaatatttgtgccaattaagatatatttttagtggtatatctagaggtagagatacctctggactaacgtacacactataaggtatatatataactctcatacctcaacaattagaaaagtcttgtcattgcttatcataaacttgtttattaatcaaaataattagtttaatttatttacatctcaaatgcagtgcgaaggtatatacgtacctctccaaacataggaaagaacctcaagctaccaaccgatggttccaccactagctaaacaagacccatgtggaacagaaagataaataaccttgagcaacctcaaagtcatttagtatgagaatattttcagtcacataccttccatatttccaaataaaggattgctaggtttaagataggaactgcaatcaccttttaacctagcactgaatttggaaagacaagcaggagggtaattcactagcaatagcgatagtggcatgaacttccaagtggtggtagcgatgactttccagctatgacgatggtgtgttggaactccgatagagaacgtagagtttaggtttatgggtttggggtcaaggtgggagaggggtttgggagaggtggaaagggtgtggccaatgaacacgggaggtgaggtggtgacgaaaccacgactatagaggagggtgctggacaatgtcggtagtaggaaaaagatgtgctagatcctaattgttaagaggtgaggatagtgatgacttcccgatgacgggggaactgtcgaaaatgaaaagcacaatagggccgagtcacctaactgttattgggcttttgggaggaggagagaaaaaacaagttgagggtgatactgtaattgtatagatcttagtgcaataccagtgcgagctactcaaaataatggacctcatgtgccatgtaggccgagatcacacctcctctcccacaatgcagagttgctcttggagtgttttcaatttttcatgtcaacccttgccatcttgtattttagtcctaatgtgttttcaatttacataaagtcaaaaatttagcacgcacacacctagggatggcaattgtgcccgtttgcccgtttacccgcgggtaaaaaccctattagggttgggtttgttctccattttatacccatgggtatcttattggttcaaaagctatgcccgatgggtaaatgggcatgggtatgggtaatcactacccatgcccgctttgcccgtttacccgcgaaatctaacttacatgtaggctaggagtaaaatccactagaatacataagccacgttctttgttttctacggtttcccttttatttcccttattatttctctcctcttactctatcgccgccagaggagagacacgacaccgaggtggagaatatttgatgttttaagttcgattcgaagttagtagcttgtagactttttgttccactgcttttgttgtggcgggtaaacgggcacgcccgcgggcataaggcgcccgcgggcaatgggcatgggcaaccatccttacccgtcatgtagtaatgggtatacccacgggcacaaataatctcacgggcatgggtatgggtaggcactacctgtgcccgtcacacccgattgccatccctacacacaccctaatttccagaagcaaatataaaatctctcccctctactctcctcaatccaccgatggcagccagtggcaaacgagcaccaactgacggctcccctactccacccaccatgatccactagaggccggcgatatatagctccatggtgcccctcctctctcctcgcagcggcgacgtccaaagaggctgggaacgcggcggcggattgagtaggccgaggtggtggtgaagccaccgagtagcgggggttggggggggaggacgacagctccatggtgcccctcctctctcctcacggtggcagcaaccaattaggaggctagggacacggcggtggcggagccaccaagtggaaggcgacgtgacgagctcggtcgggaggggggggagggagaggacgacgacaagctctgcggcgcatgccagtgcccctcctctcccggcccgcgatgaggagacgaagcccctcctcaaaggacgacgacctcgacaacagcggcgtgtgcgctcggctgccaccatcatcgcctctctcctctcaagcgttgaggaggagcgggattcggcctagagctcgacggcgccgcctggatctagccaaaggtcagcgacagtggctggcaacttgagctccaccatagccaactctctcctttcccgcgcctcagcggtagtcagctcgctggggcccctcccctcccagccgacgacgaggagatggggcttgagggctcggagggcgacggcgacagcagtaatggagctcggtagtggattggcgtcctcctcgtcgtccattgccggctcccctctcttctcctccaaggatggggaggtggggatggtggggattgttgcagcctcgcagtaagattccttgtttttcttagctttttcagctgaggctctcggctctcaagttagtcttgtgttacccacgaagtaatggtctctcaccgccacgatagcatgctatcctacgtggtgagccgtggccatgctccacgtaggaacactgtgaagggccacacgattccaaaaatccaaaagtaactaaattttgatggcattttcatgtgattaaaaaaatagacaacaaacagtcctttccaaatataatcaagagctagcgatcaaagttctggctggaccacacagcatacatgctgcacaagtgcacagtctacactacttgtgcggatctacccactcggccactcctgtctgtagtgctgtagtagatctccaatctcaatcgagaaaaggccatcgagtcggtgagattctttcacatatatagttcgccgtgaaagtctatttatagtaaatccggtgcctatatatacgtcaaatcaaatcaactatcagtgtgtgagctatacacactgacagtgtagtgtgctgctctcctagctagctagagaacgccacacactggactggactggatggaggcgtcgtcgaacaccaacgccatggccggcgtgatggcgccgctgatgctgcacggccgcgtggcaattgtcaccggcggcgccggcggcatcgggtcggccgtgtcgaggcacctggcgtccctcggcgcgcgcgtcgcggtcgcctacatcggggaccccgcgccggcgaacgagctggtgagcggcatcaacgacggctacttgcgcgcggaggaggaagagaagcgcgggccgcgggccatcgcggtggaggcggacgtgtcggacgcggcgcgggtgagggcgctgttcgacgcggcggcggcggcgttcggcggcgagatccacatcctggtgacgacggcggccgtgctggacttcgcgtacccggcgctggcggagacgagcgaggcagcgtacgacgccatgttcggcgtgaacgcgcgcggcaccttcctgtgctgccgcgaggccgcgaaccggctggcgcgcggcggccgggggcgcatcgtgacgttctcgtcgtcgggcgtcgggtcgctccggccggggtacgcggcgtacgcggcgagcaaggcggcggtggaggtgatgaccaagatcctggcgcgcgagctgcgcggcacggggatcacggcgaacgcagtggcgcccgggtccacgggcacgccgatgatgtacaccggcaagacagaggaggacatggcgcggtacatcgccgaggcgccgctgggccgcctcggcatgcccgacgacatcgcgccgctcgtcggcttcctcgccagcgacgccggcggctggatcaacgcccaggtcatccgctgcaacggcggcactatctagctaccctggcctgcgcgccaaaataaatgatttctccgttctaaaatataacaacctaaaataaaaaagatatatcatgtactaaaaatttaaacgtaagatttataatattagaatatgtcatgctagctaggttgttatatttgaaatattttgaagtagattttctggctatgaattgcattatcctggtacacgttgtgctcttaccttcagcttgggagagttgtgcgtgacagttataaacagtatttgtctgaatgttctggtcaccttatgagcacctgtttgttctctgtccttttggaatggttacttcggttttgatatactaataggtgacgtttttaactttttatttgtaacgtttgaccattcgttttatttgaaaaattagtgcaaatataaaaaaagataagtcatatgtaaagtacttttgataataaagcaaatgacaaacaaaataaataataattccaaatttttttgaataagacgaatcagctaggaccatgtatcctcgctactttctccgttttacaatataagtcattctaacatttcccatatttatattgatgttaatatcaatataaatatggaaaatgttaaaatgacttacattgtgaaacggatgaagtatatcctttccgtgttcgtgtgcggtgccgaactgccgatgcgatgcatccaatagttgcgctagctacatgctaaaattcgtcgtcgtcgttgtaacttgtgtttgttcgttcaatgtaagagtggtttcacggtactctataagtaccatgatttttacgctataaaatacgataatcttccggttaactttttaagaaccaaaaggatccacctaataattattttagtaaactgttaaactactataataattgatgactagttgagtagaaaggatcgactagactatttgaaaacacattatatatcggattgtcgtcacgaattatctacttatattcataaaagtagattaaatattttttaaaaatatcttgacaaatactcttctgtcccaaatataatgagttttggttgtattagtttagattggatgggttggatgagacatgttttagtaatataaatctagacagaccatatgcccaaatttatagtattaagatatgccacatccaaccaaaacttttttacattttgagatggagggagtactataactagtgatgtactctctccatctcataatataagggatttggacggatgtaacacatcctagtactgtaaatctggacagactatctgtccagattcataatattatgatactccctccatccacaaaagttacacctataaatagatttgagttttttccaaaaaagttgttcctatttatagtctttatatttttttcgacttaaatgaagagataaattaaatgttttattagaacccaaagagtcatctaaatactcattggttgtatgcttgcattcacttcttgattttggttgtatgcttgcatttcctatatttatattgatgttaatgaatctagacatatatatctatctagattcattaacatcaatatgaatgtgcaaaatgctaaaatgacttacatcgtaaaacggaggaagtattagctaaatatggacccacgtgttatcatgcacacgcccacatcacgttcaaggatgcttaaaacacttggagacattattgtattgtcgatgttgaagcaccttaataacttcatcaatttcaatatatactggctcaatttttaaaggtgttcttacgaaacaaagatagatgtaaagtgtgtgtgcatattcatagggatgattgtgtgcttgtgtcaaaatcaatagtctataatatctttcataaaagaatactcaaggttatctgaaagcatcctcatcatctatggttctgagttctgacttccgagccaccgtcgtccctcgctaacttcgcatcatctcttccgccacccaccaatagattcacgtttatagtccaaacccaccaactctatattacctagggttgaaaaccgtcaaattttgaggttctgaagttttacttgggatggaagtagattccacgtaaaacttgaatggttttcaagaattcaaatttgaaatagtaaaattcgacctaatttatcaagatctggtgaaaaatatcatacagatcagggaacaggaaaggcccatgaggcctccacccgacggttcagagcccacagaaccagacaagcccactagcccagtggatttctctgaaaaaaaatgtttttttgctagccgccgtcctccccgaaaccctaatccccaaatcgaaggatcgggagccgccggattggtcctcaaatcgaccccaaatcgaaggattgagccagggacgccgccggatccgtcctctaatcgaccgccatggcgatcgcccgcaccggcgtgtacgtcgacgactacctcgagtgtgagattgctagctcccgtgtcagaggccgtcgaatttttttttgcggttgccttcgatttgcttctgtttattggctccatttcttgtcgcagattcgagcacgctggccggcgacctgcagaggattctctccaccatgcgcgagctcgacgagagggctcatggtgatgatcttttttacactcctttttcatttttctaaaatacagattatccaaaaaaaaatttaaaaaataatcattttgggtacttctgatatgtagtaatttttaatagttgatacaaggctataatgtcatgtgattgttttgtatagggctagtgcccacttatagattaaatttatgtgatattgatagttttctcaagtttgtagttgtacggattatgtttctgttgatgcaggcattatgggacagaccaaagaacagataaagtatctactcggagtgccatcccatgggttcgacaggtcaaacatggatgatgatgaatctgcctcagagagaatgaaaaaggacatcgaagctagtcaggacaatgcgttgagtctctgcaccgagaaagtgttgcttgcacgccaagcttatgacctggttctgcatgcacccttcatttttttctagtcccgtaactcaaggaacttgtacatttcatttcatgttaagtgccatcttagttgcccgcttttcttttagacgagatcttagataccctttaattgatacacctaaacaaacttgatcgttctatattaaagtccaaacttattttgacagtttgcgtttgtcaagttcaactccagattccataatgaatagttacgaacttagaagtatcacacaggaagactaatgtttgcagtctaaaaactctgttttgttacaattacaaaccactaatagtatctggcatcttgagattatctcatgagatttaatgaaaagcctgatgtctgtcatactgtgttatgtctcatactgcccatatactaaattgaatgttcggatgcctgacactaaattacatcaatgctagaatcatatactaaattgcatgtcctaattctagaatctcaattacattatcaactcactgtgtcccattcagggacccagactaacgaaacaaaatccatttttgatatttgttccaatttgtgtcatttatatcctataatattttgttaatacctaactgtaagtaccatggatggattattgtacagatagagagtcatatcaaacgtctggatgaagacttaggccagtttgcagaagacttgaagcaaggtataatcaagagatagtagcatttaggagcaattgtgtttttgaccctgtttttttcaagtttgctcatttgaccctcttttttcaaaaatgaagatcaggcatgaacctgtttcatgaagacaacctaacggggttaactcagggaaaaataccatttatatccttgctcatttgaccctaatttctcaaaatcttcgtttatttgatccaattttttttaccttatccctataaaaatgtgatggcaatttttgactaaaatatgagacaaaattgacacaggtttgacatatttgacttagtttaacaaatttgacctagatttgaggctgaaacgggaaaggccgatactgtggtcttgtttatttttccaagggcattttggtcttgttcattctctaaatgcattttctaataacactcctaatggtgtggttagaagagggtcagacggcaggttcgtttttgaaaagtggggtcaaatgagcaaaattggaaaggaagggggggggggggcaagttggtagttagccttcagaatagggtctgaatcacaattatccctagcatttacttgtatcttagaaaggtcatcctattgagcagaatattgttatattaatgagctgatctcatttgcagaaggaaagatacctccagatgaaccatcaatccttcctgcaatttcagcatttagcagggatgacaaacggaggcctggtttcagtacacctcaagcaacaaagaagttcagagagagggaatgggacagggaaaggggtatggacttcgacttaatgccccctccaggtagcaacaagaaaacaactgcacctatggatgtggatcaaacaattgatccaaatgaaccaacatactgtatatgccaccaggtcagcttggaatgtatagcgattttcctggaaattagtctacatcaaactttttctaagatgttttctgaaaggtgcctctgcttcttattgatatttcagatttcatatggtgatatgattgcttgtgacaatgataacgtaagtctttatggtgctaagtaatgatagttttcttttggaggagtttaattcctatgttctaagttactactttcacttttatcaggtagttttagagaagctttagaacattctgaagtgtgatttttgttgtgattttaattattatttcaagcaatatagcattggatccatgatgttgtggctagactgctagggtggcggtgatcatcttatcttatgcttgtaatttccttttaccatttgttcttacttgctgccatccagaatgaggacatgcctcactgcttaggggtgatcgtttggctgatttggtcagttataatattttttacaccgaatgaattatatatttctgttgaacaatctggaaaactgaattagcggaataaaaaatagaaacagaacctgattaactgaataatactttggtcagttcggtcaatttattcagctctactagaacaaactgatagtaattacacattgtccatcatgtaaaaataaaatgccaactttgcagcgaatgttgggctgtagccatgggcagtcagccaatgtgggaagacgtcagatgttgggctgcattgcgaatccacacaccacataatcattaggatccacgggtgtgtatatatatattattaccatgtatactgcagcacagaattcttggttgattgtgaataaaatcctcgaaggatcgagccatgcatggtaggtgcaaaattcacgacgtcagtagcttagaaagttgattgcatgttagtcttaggttattacgccgcttcggtctgcaaagcctcgaggccgacagaataccagatcaccgaagcctgtcttggtgatttagccggccatattagcaaaatatgggccgtgtggttcggtttctcggccttttaattttcttgctcactcctatcgctgctttactcttgtcatttagattataaatattgggacgcctcttgcttatatatccttgaacttgttgcaattggcagatgttctagaacttgtcaatacaagttgttttgttcttaatgaattatgggtttgttctacgaaaggcatcaacctatgctaagtgttagctgtttaatgtttctcaacagtgcgaaggaggtgaatggttccattacacttgtgttggtctgacaccagaaacgagattcaaggggaaatggttttgcccaacatgcaggaatctttaatgagaggttctccaaagttggtaagaagcatactacttgccgcttttgctttctacaaatcctaatttgccttatagaagctcttgaattcattccatcttccaaatgaatattcattgttgtagaacagtgtagaggtgtaaaggagaatttacgtcatatgactcaatccttcattcaagtccaaagatttgcttttcagatttttccttttacaaatatatagtgcactagcagtatcagaattccaaattggaatgtcggcctctgtagtgaaaagaatggggtaagttagggggagaaaaagacttagaaaaggcaaagctataggtacaacaaaaatgaacttgtctagagaaacttgctagtcatacatcacataattgttaactaggtcgcatgtagcacattgcagtcaacacataatgccccatctttaaatacttccattgccaaacaaaaactgtttgattaactttgtgcaggaaaaaacatatcaatccaactgtgggatcacaacgggaagccaattaaattgtaattaatcatcacatgatcatgtttgatgtgccagctcatgttatattgatcggatagattcagattttgtatttacgaagtggcctttctatcctaagttcctaactattatatgttggctcaacagtgcgaagcaggacagtggctccactgctcatgtgttagttcggcgctcggagcggtttcagaagatgcatgagggaatcctcagtaatgagttggtccaaagttggtaggatgcaaaatggtgacaactttggaattgtagggtgcgcattacttgacagttaacagtgggttaaggttgttggttcaccaggtttactttagtttgtccatgtatatgcaaggggcaacagtaagactatatatataaacttgttcaaaaatctctccctgtgagacagttgttcttatagtggtgaaatgctttactgctcagtgcagctgctgtagtctcccaaatgttggctaccaagtatccatttccatagttggtgaagcttcatctccactgatctcacatgattctgctcttttgagcatcgcatcttgcataagtagaacaccacagtaatcagtgaaacacatttgcaaacatatatatattgtttcacatgtttttcttgcttattgtgagccaacatgtacaatgaccattgttttgttccccagcagcattgagtcgccagctagcctgtcttgtcttgtctatctagaggtttgggttgcgcaggtactgagcccctgaccatgtggccccaggtgacagcacgatgggctccagcatggcgggccccacgcacacgtaggcgtacttcccgtaccactggtactttgaccccgggctgaacacgtacacctcctcgaaccctctccgctgcacgcaaatggagttcctcctcccctgcaccatcaaacgaatttgatcaaaagttcagatcgaatttgagaaatttatttcacttttattacgaaaattgagctgtcgtgtgtgaattttttgtgtttttttagtaatattattttctttctacctcagtattccttaacacatttcttaaaccgctaaatgatacgtttcatgcaaaactttcttatataaaagttgctttaaaatattaactaaatttatttttcaaatttataataaacaaaattcaattaatcactgataattttctcgttttatctgtccttaattttcatcctcattttgcgaacaccattttggttttggttttacgtacgtaccctgtcgatgatggtgaattggcggggggcgtggctgtagatgcggcacatctcctcggtcatccgcttgtagtcgtcgtcctcctcgccgtcggcctcttgcgcccccgcgccgccgccgccgccgccggagaggaccgcgtcgaaccccttggtggcccagcgccgcgcgagcgtcgtcgccgacgacgaccgcgacatgaagtccgggggcacgatggcgaactccgagagcacgggatctatggcgcggtagtcggagccctggagccccacggcgtaggtggcgtccggcgtgctcacgcggaggtgggtggacaccgcggcggacagagccaccggcgacggcgaggcggcgttcctcgccgtgaactccgtcgccagcgcctccgggtgcagcgtcacgacgcacctcgcctcgacgccgctcgcctccggcggcgcggcggaggccagctcgacctcgatggagcccgtggggctccccctgacgtcgcggagcgaccatgcgccgctcggcgaccacggcggcatcccgtcaccgcctccgccggcggcgccgccgcagcggaggtccagcgacacgccgccgcggatgacggcgcggccgccgaggccctcggcgacggtggtgtggatcacctcggtgggggcgccgtgccacatggccggcttgtaggacgtgacgaggccgcccgggagcagcacgtgcgcggcgctgccgttgcgcagctccatcttgacggcgcagctgccgccgacggcctcgaagctgacgccgtggccggcgaactccgccgccaggtagtccacgttgggaggggcgggtgccgccgcagccgccgccgcgtctgccgccgtcgacgccggcgccaatgcgcgcgcctcaacacttgcaccggccggccgcgccctctggccgccgccggcggcggcggcggctagccgggaagagttgcagaaggcgagctgcttccatgaggtggtgagaggaggtggagtggcatgaggaggagtggtggcagtaggagtgcagaacgccatggccaattcttgcaagaattggtcgagtggcagtgtagccttatctgaaagactgcaagttctctctatctgtacctgtgtgtgtcagcagtgtcttcgggttttgaggttgacatgtgacgaaaatatcccttttccgttctcacgctttttaagtgcaaaaaaaattatatgtgatagttgctttaaaatatcaaatataattaattttaaagtttatactaattaaaacttactccctccatcccaaaataagtgcagccataagtttctgtgtccaactttaatcgttcgtcttgtttatttttttttttttgaaaaaactaaaaaaaataatcacgcataaaatactattcatgttttataatctaataccaataaaaatactaatcataaaaaaattttaaataagacggatgatcaaagtttagcatagaaactcatggctgtgtttattttgggacggagatagtaattagttattccctaatagcccaaacgaacggaaccgaaatgagaaaagaacattgtgatctcggtaggatattggagggtattctttactactacatctcattttattttattttaagtgcagttatggattttaatgtccaatgtttgatcgtttgttttatttaaaaaattaattaaaaatagtcacatatagtacaatttatattttattatctaataacaataaaaataccaataatatttttttctcaaataagacgaacaatcaaacattgcacataaacaatgcaaaactgtactcttttgggacagaggcagtacttatacttcctatgatcaaaatttacgttgctaatcttaccggttcctttaaaacataggattttgaaacacggggataaaaatctcatgccttataaaattcctgcataaaatagtagtcgtttgcataacacgacaaaattataggaattaaagacacgttaaaagaaatccacgaggtgagaataaacttctcaaagataaaacatggaatatagaaaaccaggtctataagatttttaaagttgcattccttcattccaaaggacactacagaaattctaaggatttgaattctttgaaaatcctaaaatatcgtccaatcctaaagaaatgattcatttcatatgattttcaaaggaattttcatggttcatgttttttcaaatccttaaatccttctctcttgtttttcttttgttgcaaacaaggcctaagaatttagactaatggctcctttggtatgcaagatttaaaaatacaagaataaaagaatataggaattagaatgtcaaaacacgggaattactcaatcttgttgtttggatgtttcacaggaaattagtataggaatttgaagagggaataacacaaggaatttttctaagagttttgaggaccctttaaatcatagaaatgaaaaaaaacgaaagaatataaaaaactcaattataatagaaatagaaatacaaaatagaggattgcaaaacgtagaaaaaatacaggaaataccatttaaaaacacatgaattggatgagagagatagactcaaaagaaaattttcaaaaagttgaagctcttgcaaaattttcttcaaattctttataggattgtccattacataggaattttcaataataggatatggttcatttttttatttcaaaggtcttcatagtaaattttcatatatgattgaaatccttcaagatcctataatttttctacaaatcaaagaggccctaagctatggtagatttttttttccaaaattcctataatttaggtcattccacataggaaaaattatcttagaattagaatcctttaaagtttctccaaatatcctttggtcaaaatgggccctaaactatacggttactagcatcattgctgctgctcccgcgacacagatgaattgctctcagattgctctttgttttccactgattatccgtacgtgtgcagctggtagtatatgcggttgtgctactaaacaccacaatgtcacctaattttcagattgggttttacgaggggctaaattctcaatttaaaaaggttgtttatatccgattagatgtagagaccgggtaaaaattattattctctaaataaataaataataataataaatgtcacctaattttcagcccctactaatgcactgaattttcagggatacgcacacagccgcaccgatttggcagcagtgctgatgcgccgcgctgccgctggtccagctctcgcctctctgcactgcgagtctgcgacgcagggagggagcagcagacacattgcccgttaattttcgtcagaaaacaacagcacaaaaataaacgaagtaaaaaaatacaaataaaacttttttatatttatagctgaaaaataaactatcataaaaaataaaaatcaatatttaattgagtttaaaatctatttttagatagtgcgtcgtttcgatagtgcgtcgtttctatcgataaagtaggaattaaaatctaaattttagtttgactgataaacaaaaaccaaacaatgagctgtaaagaagcgggcagataacagtttcttgctgtgtgtgctactgtttgcaagggtacaagagtagcattttctggagggatgcagatcatctgcagcagtactattgataggctgatatgtgagtccggatccatacatcagtccctgctactgcactaaacagtactgtagaaaatcaacattgtttctggagacattgttttcttattcagaattcgagctcatgcatgtgatgggacttagtggaggaaaatgattaattaaaacaacttagtggagaaaaatgattaattaaaacaagcagttgattactttatctatcttttgtgctttttgtctgtaatattgtttgcttagggcctgtttagttggcaaaaaattttgtccacgtatgtcacatcggatatatagatacatatttatattattaaacgtagtctaatgacaaaacaaattacagattctgtcaagaaactatgagacgaatttattaaacctaattaattcgtcattagcaaatgtttactatagcacaacattgtcaaattatagcacaattaggcttaaaagattcgtctcgcaatttcctggcgaattgtgtaattggttttctttctacatttaatatttcatatatgtgtccaaatattcgatgtgacagcgtaaaaaattttgttttggaactcaacatgcccttaatattatactgctggtagtgattcttttgagccgtacaaagcttctaattaaccaaatcgaagttctagacaagttcacatggccaagcctgctcttccctgttctctagaatattccaaggcgatatggtgaattaattttccgcatttttcatatgctcgttgctgaaatctctgtaaaatcaaagcaaaaaaaacagtgaagagatttaccgtgtcaagcaaatagagttacaagtttatacgcgacaaatatataagttgcggccgtgtagagtgtagacccaacattccaacaattttcactattcctcatgtgtctcaattgcataggattattcatcagtgtaggtcagttcccttgtttctctccaacatgtccatgtcatagtggatgcgtttatatttttcaaggaattattgatgcttggaattgaccttgcacttgacagggagcatgaacctgaacatgaacttgcttttccaggtagcaggcgtcctacacatttatctttcttgcaaaaataaagcttggtagacagcaagctatgcttttatctgaaatgttcacgtcttgttctaaagtaattaagtatatttaacatatatttcctccgttcctaaaagatattatttttaacatgacggttaatatattagataattgttacaacacgactacaccaatgcactatcccattctttaacaactgctttccactaaatttataaacaaatataataatgtttaaaataccaaattagttttattaaattagtaattgaatatattttcataatatatttgtatgggttgaaaatgttatttttttataagcttgatcaaatttgaaacaatttgattttgattaaagtcaaaacaacctacaaaattttttcagcatttttgttgaatacatgatattggcatgaacttttaacaattttagtatatgtatctataccgctcacaaatccatgggaaattctcgtaccccccctccccccaacatatcgagtcattgattgcagaccatgttaccagttaatgttatgaaaccagcacaagtcattgaattaaaaaaatgatgctgagaaaatcccatcataaactacttccttcgttttaaaatattactacctctgtttcagaatataacaactttttagctataaatctagacacagttgtccagattcatagctaaaaatgcttatatttgggacggagggagtactatctaacacgtgattgaatttgtccagattcattgttctaggaaatatccaatcacgtgctaggtagcaatatttttgaatggaggaactaagagccatactcaaaatcttgaattacaatatgatgagaagaacgggaccattttacaattggccttttttatttattcagagcatgtacaaatagtagattataaaccaactataatcatactttaaggagacaatagagaaaagaagagcactagattatagacttatagccagctataatatagatttcaagacacaatgattgtatgacaggtgggaccatgcattaataatgtagcatatgtttataggtaactattatatataaattggctactaaattgattatacatgatttagagttagtagttagctatactattaaacttgctttttattactatgattactataatgtaccctcaaagcgtgtagattcacggaggatatttagttagcctgtcctctcacccaaaaaaataaaaataaaaatcgaacccaaatttaaaagtcgtttggtaaaatttattaagatggtaattaaattagttgcgtccccaccgataaattttgccataataaaactgacccccctcgagccgcggtgagggaagcagcagcggcggaaggcgagcgccaccaccaccctctccacctccgccaccaccaaaatccgcgcggcgccgccccaaaaccctaatccgcgcggcccaccgcatcccgcggcgctcagatctagggcatcccccggcgatggcggaggcaagggcgacgaggcggcgggcggaggaggcggagatggaggcggaggcggggacggagggggacgacggcgacggtggcggcagcagcgactacacgtcggaggacgagggcacggaggactaccgccggggagggtaccacgccgtccgcgtcggggactcgttcaagcagggcgcctacgtcgtgcagtccaagctcggatggggccacttctccaccgtctggctcgcctgggacaccggccactccgtgcgttcgaatcccttttgccccccccccccccccttaaatttcctcgtggaatgggcgttccccccttttcccttcctagattcgtgatgatttgtgggaaatctcgacctggatgcgttttaatcatctggtgtattgcgggcggtttcgtttgtacccgcaacctgttcgttttattgctttggtggtatcataatggctaatttcgttgttaatgagtactgttttattcgttaatcccaccatcatcatacacgaaatgtatctgttcttatataccctttgtgtttctgaatttgttggttatatatatgcagagatatgtggcgctgaaggtgcagaagagtgcacagcactacacagaggcggccatggatgagatcaagatcttgaagcagattgccgatggtgatcctgatgactctcggtgcgtcgttaagcttcttgaccacttcaagcactcggggcctaatgggaaccatgtgtgcatggtgtttgagtttcttggtgataatttgctgaccctgataaagtacacggattaccatggaattccacttcccatggttaaggagatatgccgacatgtgctcattggccttgactatctccaccgcacactttcaatcattcacactgaccttaagcctgagaatatattgcttgaatccactattgatccctcgaaggacccccggaaatcaggtgtgccgctggtggcaccttctgcaagaactgatgatcctcctccaaaggcacatgcaccatcagtgaatggtggtctcaccaggaaccaaaagaagaagattcggaggaaagccaagcgtgcagccgctgcaacttcagaaggaagtgggactgttgcatctggggagacggatgggtcagatgataggggaaatttgagtacggcaaacgagggtagtccgaatcaggatggagacaagaaagaagaaggtgaagggagtagacggggtagcaaagggaccaggaaaaaaatggcattggaggctgacctgaagtgcaaactggtagacttcggaaatgcatgttggacatacaaacagtttacaagtgatatccaaacaaggcaatacagatgccctgaggtgatactgggatccaagtattctacatctgctgacttgtggtcctttgcatgcatatgctttgagcttgccacaggagatgtgctatttgatccgcacagtggtgacagttatgacagggatgaggtatgtctatttatttctttccaagacatttcatatctatacaaaacttaactcaaactatcacctgtcaacactttagcttaaaaaaataggagtctatcacaatagaaatttgagtgatcaagccaaatgacatctactggctacagcccaaaactccagtttggcatgtacctaggttttcttttgtgacaatacttaaaaggaacatcactctgaaatttgatatttgtcaacatctaattgtgccatgatctcataaccaaaagcaaataaaatgaaagctacaaagattgttttggagaaattatttcttaataaagcttgagcatttcgatgcatcttctgactcagatttgtgggattcggtaggaatctaaccaattattccagaaaaaaaatgataatcaaattttaaatattgtaaataagaacatttcgttttgaaggcgatcatgtttggacaatggtaaggttgatatacataaaacattgtggggtaccggcctgatacagctcatttcttgttcatgtttgcttactgtttcacaataattttgaacacatagtatattttcttttcatgcttagttatgagacctgacaaggcctccaaaccaaaccaaccaccaccaccatacacaattacacgacgcaccctctcttcctccttactcgtggaagaagtactgtagcacataagatgacaggagaaaactttgctatgccatgtgtttattcaatttgtagtgtacttggctattcgagtctgacactttccttttaaccatgaataacatgcacctatgcattagaaactcgctttgttcaagaaataaacgaagtttcggttattggcagtttggcatggtctctggcatacatactttactattataattgtgattttatcattttgaaaatctgtgaacgtactcgtctacatcacgtgttctacagaagctataacttgtagtctataagagagaaaaaaagagagaatgaaactaagtcataccaatgtgataaaagccacagttttcttctaaaaatgatcggcaacagatgaaaggtaatgttaaggactggtctaagctagttcttttcaggtatgtcatatggttatcttgattgaatgaattctgaatgtgattgataaatacatttcaagtttgtggtatatggtattggaacatatcattgactacatgaatgcatgatgccaattgcttttttttgtcaagttgcattataagctcaaaccttttattcagttgtcctagttgattgaccacttcatatttgtgggaaatcaactgctgaatttattcaaacttttcatttagcaatattactaattgaaaagttctctgagtaatctttttataattcttaaacacctgccattgtttggagatgctgtgtgaaatagatatgggcaagtagcaaaaccataatgatagatatgaaatctagttgtcttccctatagtacagaatgccatccctttccattggaagtttattctgatcaattcttgcttgaagcaggatcacctcgcgctgatgatggagctattaggaatgatgcctcgaaaggtaacaaattttccatcttcgtaagctttcatgtaaattgttctgaattatagataaaatacaaagacattgtttcctagattgccttgggtggtcgatattcacgtgagttcttcaatcgttatggggatttgaggcacattcggcgcttgcggttttggccgctcaacaaggttttggttgagaaatatgaattcagtgatatagatgcaaatggcatggcagagtttcttgttccaatacttgattttgttcctgaaaagcgtccttcagccgctcaactgcttcaacatccatggcttgatgtcgggccccttcgccggcagcctaaacggccatcagacctgacacagaattcgtccgatgatggtgtttcagagaaacagaggattgagaatgaagagagagatgcaatggctgtgaacttggggaacattgccattgacggtgcttcatccaagacaactgaagacccccaagcaagtactatgcaaaataaaacaaatgctacccctgctaagtgagatgctattaattttacaagctgcattgtgtaagactgttttcagattagatatgtttcatgggaaacgagtgtttctttagatatattaggaatagttcctcggggaaagaaaagtagggcagacatttgttgtatggggttggttgggcaatgttagatttgttggggctgcagaaatgtagacacccctgacctttttcctggacatattctttgtacaactagaatctgcgattttttaaaaactctttaggagtgcacaatgatgaaatgagagtgatgaacctgagttattttttccccttgttcttggtgtagttgcaagtttacatttatcacatccaaaactggaaatattactgctttagaaatgttagtcctctttgacttggagttggagatcatagttttgagttgctatacattagtatgtgatatattgtcacctctgcctaattctcactatcgttctcagttattgatgtctttattgatgacctctgtaattcttttagacaaacctagattatgcataccgtctgcatccttttctgttccataatcccaatatcacatttgggtctgatcatgctagaacaggcagggcaatgcaagatagtcaggtcacaattcgcacaatgccactgaatttctggaggatatcggcttgaaatctcagtctaattgcaaggattctcgatcgagagattccatatttggtagagcattcggatcacgaggcaccgtgcaccattttcttgacaagtgtggccatgtacttgccgtggtgctcggcgagggccagctcgagctcggacggcggcctggagccgtcgccggagaagacgcccgcgccgtacggcgacccgccgcggagctcgcccatctccaacatcccctccccgaaggtgtacccgatcggcacgaacagcatcccgtggtgcgccagctgcgtgatcgccgtccagcttcatccatgcatgcagccagagagattcacggagcagagtgagatgatctgatgcgagagggatgcgatctcgcggcggcggcggcggatacttacgcggtggtttcttggccgccggcctgggtgccggtgctgacgaagaggccggctggcttgccggcgaggcgctggtggcggcagagcggcacggtggagtcgaagaaggcctgcatctgcgcaggcatggcgccgaacctggcagggaagccgaagaggaacccgtcggcgtcggggagcccgtcggggtccacgacggggatgacgtcctcgccgtcgccgccgccgccgccgtcgtcggcctccatccgcgcgagcacggcggggggcagcgtctccgggacgcggaagaggatcgcccgcgcgcccgggacggagcccaccccgcgcgccaccgcccgcgccaggagccggacgtgcccgtacatggagtagaacacgacgtagatgcgcaccggccgcggggccgccgccggcgccgggatcgaggtcctctcgcgctggtgcgagtgcgacgctggcgctgccgccgccgcggcggcgcggtgcctcttgctcgggatgcagccgccgcccttgcccatcgctggtgcccaccaccaccgcgtcacgcggctcgctcgcgcgactggtgagacgcacgcgccgcgacggtggtgtttggtttggtctccgcctcgcgcgtgcgcatcgcgtgtgctcgcgaaatggtggattccgcgtgatcttgggccgaaatcacggtggattccgcgtaatcttgggccgaaatcacggtggatcccgcgtggtattgagccgaaatctctgagcgattcggcccggaccagaaacggataggaaaaagtcaacccggtagcggattctttcgtgcttttttcctcgctgctgctccacgcgcacgggccaaagtcagtcggccacaactcctcctccgccttgccgcgaccatcgcgaaatcggaaggcggcggcgcgatggagcggaagcccgacgagccggagaaggcagcctccggcgccggcgccggcgaccctcctccaccgccggtaaacctgcttactttttttctacggtagagtgtcctcaatcttgagaacgaggagaaggaaattggctcaatgtgggtggtgtgtgtgtgtgctcgcagttcttggaggtgaagtgcaggagctccggcgaggtgcggcggttcgcgttcgggacgacggcgcggtacgcgctgcacgccgtgaaccgcaagctcgcccccggcgcaccggcggcgctgcacgtcgaggccgtgaaggacggcgaggagcccgtcagcttcggccccgccgcgccgctcgccgactacggcgacggatggaagctgcagaccatcaccgagcaggacgcgccgggttactaccagacgccggcgtccgacacggtatgcaagaagttcagaaaatttttttcctcctcttttcttctcggaaatcaagaacaaaatgagcaacgatttcctctctgaataaaattttcggttgccatgcagagacgagatgacacgaagcagtcggcgaagaatcctcgcgaccaggagacgatggcagcgtacatcaccaagatcgtgctcgcgttcgtgttcatcttcttgctgggcgggctgttcacctacctgctcgagacgctccccgacatgttccagcctgcatctgaacctcaacctctgtagaatttactactgatttgctgatgaaaatgcagcacaaattgtatcgtttatttttgagtgattttggccttcttgataaggataaagtttgctgttttgagcctcgtacggcggtcagctgcaggccttctctttgtttctgtgcaatgtcagtctgccaaattggagtattttgtttttcccttcatctaaaaaatattgtttccccaaagaatctccagagttatatagagattccaaatgcaaaaccacgggccaggaaggtgcggattccaaacacacctcggagttggtcttctccttaatttttaatcaactttgcaaagttcactttgatgtcttcaccatcaaatgtcaacggggcaaagctgtatcaaggtcaatgaagaagacaaacgtctgtttcacgcacgtcatagaagaagagaaaaagatcactgttgtacataaaacaaattaaggaatcataagataaatgctaacgaataggccctgtttgaaaaattgcaatggaattatcagctgagtagatcaactactatttggttcacttcgtttttacatgttacaatctcatctgtgtttcccagtgaggaggtagtatacaaacattaccaagaaaagctggtaaaacctacaatctaacaaaattcatttgcccgcatgcaaaatctttgatgacgtgtatttcttttctgtgtgttcagtgtttgcttagtgtgggcagggcaccaagatggcacaagcaactgcccacactgggaaatgctttccaccactgtgttatcaccaattctgcaactgcgatgccacgcttttcaccactgggtgatacttcgtgtgtagatacttctttgcgttttctgaaccaggttgcccaagccattcatcatataatcttttcgcaatagggttctcgaaggggttggataccgatacctggtacataaggccataagctttacagttagtggaaattctggcatacagcaaacataacatatttgcacagtagtaattagatcctagaagcatcacagctagcatttcatatgcacatgtgatgatcggtaaatatgaattgcatactaccacacagttatacttgattggcatgttaacagcaacatgatggatcaccataaatgaactgtgaggtcagattattctctctgtttttttttactaggatacatcaagtaagaagcttcaggtctactccacattgacatggaagaatccaaccaatgctgagacaacataacatagcatagaaaagcaagttccaaacaaacagcatgaaatttagcgagagatttcgctagcttacatcttggatgtacacatcctctagtagttggataagatccttcgcagactggcctttggcaggttttatttgacctcccccattcaggcagcctgcaagcgaacaattaaggtcatagaatcaagatcctatggctcagaaccatttacttaaagcgggcaagccacactgtatcataaatgggagtacctgaaggacatgccataacttcaataaagtgatattcgcattttcccatcttaatcttcctaataatgttctgcagatttctgaatccataacaaagtgcaaacttaagaacaggtttgccctccacctgtgcattaacacaacacacgttatacaaaattaatctaaggccacttgaatcatgcttaagagagaattgaaagcaggccaacatgatgcaggatgaattcacctccagtgtaacctcacgaaaatctgaatttcgtaagattctgaaatcaactgatccttcaatttttctatcgaagagaacatgtgccgcatgtcgaaagactgtttctgcataaccccctgagccaccagaaaccccatatagttgaccgtcatcatcaacattggttaatctggatcaacaatgaacgtaagtatatgtgagtttccagatatgacagataaaacaactgtgatataccacagcatgttatccaaagcaacatgaattattctattgactttttattgaaggagtgattaaattcaatgcaaaatttgtaaatctgaaatatcggttgaacagataatgactgattttactttccaacttgaattctattaggacttcacccaaaggggctaaaggcacactagggactcacaatctgtccatgggagactcctctagggtcttgaaatcaacagatctggactgcacaagcatgaaaatggtataagcttctcatagttttttaaatgcatatcaaaagacaggacatgggaaaaaaatcagttacctgtatcaaatctaacacttcaccagtggttaatacggaatctacctctgtaacatctttatcttccactgagaaaacaaaatcatccctaacagcttctagttttttatcataacagggcatcacagtaacatgataaacatcatgtggcctacacaacaaattcattcatgtacaactgtaagtccaaatatttaagggtctatagtatataaaatatgaaggtaacacctttacatcaactatggcaaagtgctcacttcagaccaagttttccaaccatatgatgcttgatagcagcaccaatggcctgttgggggctcttcacagctgagatgtaaggcaagataaatgaaccgagagtcttttctgcatagcatatccaacctgcaagttgaagaggtttgaatatatttgtgcactaatcttactcttgtttataaaataagatgcaactaataagctaccccctacggtaaaaaaaaaaagggacatttaggacaagatcctgcccaacttaaaattccaacaatcaattttatattagaattagtttataaaatctaataagtttatgatattatgatagtacttttcgaggtaaatctatgtatatcatttgttttgtttttaaactaagcattcgatgagaaattattgatggtcaaaattttaaaagtttgagtgaatcttattctaaacatcaaatattttttaccagagtacaagcattatgtggaagtacagaattcatgatacctaaattacatagtaccctgcaaacaattttacctgggcatgcagatgaaagcatgggaagattttttccagcttctttgccactagataactggttttgatgataacgagtaacaaattcactgcatgcttcaattagggacagatctcgactggaacttgtgtcgtaaactgcctttacgcccatcgacttgaacagcgcagtgagttttctgaaaacctgagcataaaggtattaagctcctgcttttgttaccacgttcatgataaaaatgcactcctttatgcatctctagtcgtggttatgttcaaataaactagcatttcggacaaaacattttataaggacagatttgacagggaagcagataactgaaaaaaatatttaatcacctgtgattgagaaagaccaaagaatgcagctagcgatgctcttgactgtggagagaccgatactatgacagctttgtcagagttgatgcgagtaatgaagtcacccaagctttgcttctcaagcataactgtttctgctgatgttatgcaaccactatgggattaaaatgaaacagtcagcattatttggatttggacaagctgctgattgaatgaacagtgcaaggtagtaaagaaaacctgcaagccaaacagtccttcagtgaaatcttgactgcttcctctggaggatttgtgctcactgcaatttccttttgtttgatctgttaacagaagtgccaagatatgaggaatggtatgcggatgggaagcgaatcatccagttatactaattttgaagctacttgtacaaatgtgtgcagagatgtaaataccaaaggtgcaaagtctggtattgagtttattctgccattcaacaaacaattagggaactaggtgccagttagaaatcatatatgattgaacgttgctttcatgtttgcaaccaacacctgatactggacttctgttttggtttcatatgtttctctattactaatcaaaaagttttcttcaacacctctggagaggttgttcactcactgcaggctttaatttgatttctctcgactaaaacgaacagcaggaaagacagtatgcagcaaaaaaagcatctgataccataaatcccacccccgaactccgaagaattcagagtgttcgataatggtggctcgtctttagccaagaccattttgtcccctcgtctcgttcacaaacaacctaacagcagaaggacaaaatcaattccgcctccttttcctcctcctctctactctgcacgctctatcaatcgatgcctacaggctagacatcagcagtacagcactcgaaaatcttccaatatcgatacagaatcatcccgcatcgcatggtgagacgaactagtacgctgctaagattaccacgcatcacccatatggctacacaaaactacacacactttttttggtacgacgcacggttccacggccagcgaccaaccacgcgaccggcaagccaaccaacaccggagcagcgccgccgggcatagctccaatccagccccagcctagggcagaaagggaatcagcgagcgcggggtaggagtctcaccggaaggcggcgggcggaggggcccttgttgagggagatgatgcagtcctgcgagggggcgatgaagtcgttgagatccgacgcctgcagcgccggcgagaacctgctcgacgccgacgacgacgacgacgccatcgccgccgctctcctctctctctctctctctctctcctccggaacggaacgagagagcaatcaatttttcttcttttctcctgctttgaaggagagagaggggaagaaattgctgggcctcctgggcctggattggcctggagcccacggcacagtcagctctcgccccatgactttttctagtagcttctagaatttaaaaaaaagttttggatcagataaaaaaagggatttaattattgataagatatttttttgtttgctattttgggggtggattatgaaatggaaggggaggagatggaatgtaattcgtcttccttcatttgtatacacaagtgtgagatgcaaaagcaaaaggatggttggttggttggttggctagttgtgtcatgatattcttctcctcagactatcactcccccaacaactgggagacgcgacagcgacgcgaggagaggataaattaatcaagtggtgaaggggcaattatggtttgggtttctctttcattttgtggtccacagccttgacgctggcgccacgggtgacgcacctgatcaagcggagacgggttggattgaaaccaacttttgttcttccctcgaaaaccaatttttgtcctactttctccgtttcagaatttaagtcattttagtattttctatatatatatatatatatatatatatatgtctagattcattaacatcaatataaatatgaaaaatgctagaatgacttacattgtgaaacggagtgagtcctagttttttttaagtttcaatagtagagtttgaatgtttgttttgttaccaatttatgtctatgataatacacattctacgctatcaatctagaaagtatcaaaatttgccaaggttttaacacttgcaaaatattgataggataaaatttgattacaattcaaacaaacctaagtggtcgccggcggcagccgcttcagttttgacacgaacggattacggatgcacgacattgccagtgaatgcggaattagtacaggcaaaatccagtaccttccatttttcctcacttctcgatcatacatcatgccgttgtatacataataagctgtacaaactaacaaattacataaccatgttcaagggatgcaaccaataatggtcacactaatttgagcatctaaacgctcgacacggagcaaaattccaaaaggggcgatgaatccggtgaaaccaagctcgaatgcatccaaccaataggccaacaaaaaaatggcaccataacaaaactatcatgggcttcttatgaacctaagtactagatgtccttgacaggaaaatcatttcctggaattgtttctggaccgccgcctcggtctactgagcaacttcagcatgttatccgtcaggtcaagaggggaatcatcgccatcatcctgaagctttgtccctgaggtctgtgtcagccnnnnnnnnnnnnnnnnnnnnnnnnccctctcggcgagctgcttgttcctcttgggtttcccggcaaactgcatccctttgaactccactatggccctgaactcgttggtcttgaggtgctttgtcttgtacttgggaggggtgtggccggccctcatcagcagggtctggagcaggctcttggggttcattccgtccttgataatgttgcctttggtgtcgtcgctgctgctgagccttgctctgctcgtctcgcggccaaacacaaaccttccttcgcataggtcgcctgcagcgagctcttgtgcggcatataagatgtactttccttccttgtggatgtcgaagctggggtcttcaagctggagttcagattgaaaacatcgtagagttattacacatgactgatatataatagatgcggaagaatttgactgaaatcaagaaaaaaaaacactgcacagttagtttcaatcttttttgccctaaccgatgatgtaccacaggccatgtttcaatatcaaatatcatttcaagtgactggcaataaacaacaaaaggttgtctctctgtccattgcatgtgaattttctcctttgttcctagcttccacagaaggtggacagatttaagagaaataacatttggcgcactatagcagcatatgcaatgttagttatacatgcctcataagtcataacagcattggcaatgcctgtcaaatacttattaaacgctgactcggcaacagaaatatctagtggaacgaaatcaatagaatattgcatggcttaccttcttctgtacaagtttatcaagctcttctttaagttgcaagtagcattcacacaggctaggatccataaacaaatcgatgtaaccatcgagcatcttcaggtgcccagcctatgatggacaggttagaaggtatataggtagggaaaatagaaatgcaaaaatgtcataaagcacttgaacaagatttaatatttatataccatgcttccttttgtaacagcaccaccaaataagatcaggatggaatctgatactccggttgagtcacggatgaagacagcatttaccttcaccttctcaccaaagaccagccatggataagggatggtctggtacttagcattcactgaattctggaatagcgtaaaatgcaaataaatcagcacaattttggtatctgtgaaatgtaaggcactatacatggcaccctagatgggctatctcccatgaaaggtcaagtgataagctagtaagcagggtgttgcacatgaaaacttcaagacgttccagtatgaacttacagcataaagaagaacttggccatcatccatggtcttgaacgacatagagttttctctatgctgaaaggaaagctcaaaaattaactgacaagttttgtgttttcaaatagaatggaactttacaaagtagtctgacagatctttaccacaactgatgttatgcctgggaaaagtccagaacatatgataccacggaccaatgattgattatggctcaaactattatttgtatttgcatcagagtctaccaaaccagcatcctttaatatatagctgaattgcttccgaagagagtgaatggcttgaagtgtttgagcagaaaggaaatttctccagcagtattcataagcagacccttctctctctgcatccttccatccttcataagcccggactagggccatatgatcactataatcttttgctgagaatcttgatttggcggttcctgccaactaacaaatagaggacaaaaaatcaaacacatccttcttgccataatgaatacacaaagcctgaggcccaattcttccctttttttataaattttctatgaaagcaagaatagtgtctcccaattaataatagtaattagtggaaaatcaaggcatacatctctcttgtcctgtggcagcaggaaaggatcccgggcactcaatccagcaaccacggtaagtataggatcaatgcagcggaaaactgcacccattataagcatcttccccaactttggatcaacaggaagcatggaaaggtatcttcctacaaagttggattagggaatattaaataggtttcagtaataatatgttttgcagtgttagcaaagaaccaaagtgtaggatagatgtacctagatcagttaggttctcattttcatctaatgctccaatcattttcaggaattccactgcattttggacctgtatatttatcaattgatcagccaaaaaaaaaagcggagatgattgaaaacaagaacccttttgctagcccgtagccacccaagacaataagacatacagctagtggtgccgggggctgtaaggcagctgatagaaactccccaatgctgccaacttgcaaactttttatctgcaaacatagtgaattcaatggagttctaaggagctcaggaagctggtaatctgcaaatgcatcatacacacatctagggtagaggtgatagcattctccaggttgcacacgaccagctctgcccctcctctgcacgaagataatggggagactatcagacatatggcaaagaaggatatggtagaggaaaacaatagtatagtgtatctgaattaaggagttatcttcaagtttgatcacttgttacaaagtttctgatttttaatattgagtacatttctgctgcctattgaagcagaaaaaataaaagataggtcgactagccaagctcataagcaaaagagacacatggacgtgcttgttcagaaatataggtatttcccaaccacaaatctaaggcatgccctccccgagaaaatgataaaaaaagctgctaagctgcaaagtaagagtcaaaagtactaatataatactatagactcaaacaggacaaacgttcaattatattacattgaaaaaagtccattctactcccccgaactagttcaatggatcacctaaccccctaaactattttttggctcatttaccccctagaccatacagaaggttaaaatcgagagagttcaagaaaccaaataataatgaaagtaggtacaggcacatgccattttatgctgctgctgctgaaagacgagaagcaaaaaaaaaatcaaagttgggcattttacctgacgagcagaagcctttgaaatccatgagggaagcaagcagggagtgttatttagtgcatcgtatgtcgtttcctttgcctttccacaatccacgccaaaaacaatatcatttattgtaatacttgcttctgccatgttagtggcaagcactatcttccgaacattaggaggtggcttctcaaagattaacctctgcgaatatcataatacattcatagatgtcaatagcatgaattatacgatgcacaaaagatgctacagaaataagtatcaatagactagcagtccagatgcatacattatatataaaatatgtttatgtaatactcatatctccaatccagtggtttaactcgtatcacacaagcaatctcaataagataggggcaaatcagaagcaactacctgttcagctgtagccatggaaccatggcatgcaacagtaaatctctgttagggtcgcccaacaaagggtgtgcctttagttgatccttcaagcaactgatatcatcccatccggtcatgaaaactagaactgcaccagaccgctctttacgacatatgtggcaaagaacagcttctataaggttaaaccctatgcaatcaggattccaatttgacagagaatcgcgtgtcctcgatccataggtctcaaagctagaagttttaagggcatcctgtatagtacaataataatatcagaagaatgttgggaaagtgcgcgctctatatatatatatatatatatatatatatattgaaaatgtacctcaacaagcgttgtgatttgatttttcctttttctaggtaatagttgcctctgagttttccagactttatcttgtccataatcgtcaagttgattgcttgaggtcaacttatagccagtcctctctaatatatcttccagaaaatgtgccctcactggatatgtgaatccctgatagaagcagcattcatgagaagaataagacagatgtcagatgtaatatatttttttatatgagaagatattaactcacaggaatatggatagttggtgctcctccaaaataacttgagaacagttccgcatttagagtagcactcatcaagatcaacctcaaatcacggcgtcgtgataataggtcttttaggacaatcaataagaaatctgagaaaccaacaaagtaatgcaactttatcaggagtttaataaagacgatctcagcaaattcaaaggaaacaatgcaatcttccaaccttcattcatgcctctttcatgtatttcatcaacaaatacatgagttactccattcaggtttctgtcactgagcaatcgtcgtagtaatataccacttgtgcagaaaagcaaatgtgtgtcttttcctttgattccctccaatcgaactttgtagccaacctattaaaaaaactagcattgtatacaaaaaaatacaatagaagaatctagtaaagacattttgtccttaatcatattagagatgggacatggtaccatatgagacgaaaaaagaaagctttatcttaccgattcaccaagattctctcctctctcagtggatactctctctgcaactgccattgcagaaattctccgaggttgtgtgcagattatattacaaaaggccccacggccagattctatctctgactctaatacaaattgaggcaactgggttgttttgccacaccctgtctctccagatatcactataacctagaattgcataagaatgttcagaaaaattgaaagagacaaatgaattgccaaacatgtatgcagtatacacagattctatggctcataaacatatgttgtgaattatacagtatatatacctgattgcgtgcaatggctgctagaagcctttccttttccttgtatgcaggaagtgatttccggaattctagcatcttaactccttcaggtgattcctattgttacagatagatggatgatcaaccacaatggaattgttgaaatgagatataaggcaaattttacactaaatgctgtagaaggaatctctaatctatgtgtatccaggcatttgtaaattatccagatagagagctccctaaattctgtacccattgttgaggtacagatctataaaccatctaaacattttcaaataatccaaacctgtatccagattgaattcaaagttacgtagtcatatcaagagtgacatacctgccaacttctctgaaaattgcgcatccgtatgctcttcctctgaaggatcttctccatgaccgatcgatcgagaagggaatcctgctgctcatccaggttcacattctcagctttctcagccatctcagaaccatttccagttccacatttatccggcaagagtgcacgatcaaggtgctcctgcacaagtccttcaaccctcctctgtaagcttaatggaatcaccacctgcgtatttccatgcataacaaaggcattcgcagtatttaaacaccgtcaatttgcataagggaaagatgtttgatcttgccagtggaatgcatgggctcacctctctttgtggccgcttgtcgtccaggtccggcctgtaattcggcagcgggaccttgctcgcaacaatgaccttcccatacatctcactgccgttccacagagaaaacaccaaaccacaaatttcaatgtttcgacatctacatttgggaattatgaaccggagatagcaaaattacggtggaagacctgtagaggcccatcctcttggcgaggttggcgatctggtcgtagtcccggcgatccctccggtctctggagatgatctcctgctcctccgcgttgcgctgcagcatgctcagcttccacctccactcgtcgatgttcgccaccgacgacgacggctgcgggtcaccagttcaccactcgatagctcagcatggcgaaactggagaagaacaaaaagggaagaaaaagctagctcggcgcctgcgcggaggtggtacccggtgatcctcgtactcgtggtcgtactcgtcgtcggagaactgctccacggcgtagcccccgccggagctgcagaaggaccggcgggcgaagacatcgaggcggcggtggtagacgagcagagcagcgagcgggaccggcggccgcggcgcccggctgggcgagctggagagcgggaggagtaggatgcccagcccgcggcgcaagccgccgcgcatgctactgcccgtcggttggtagggtaggcaggctgggctctaccactgctgctgctgctgcggcgcgggcatgtgttagcaggtggggaggggaggggagggagagtgcacgccggcgtcggcaaaggggaaaagccaagaagccggcgtcgccgtcgtcggtgggcgctcctctgcttccggtcagatttgggctgaaatggttttgttcgacgtgggcttcttccgtcgtgggccacgtggcagacttgttgggccgttgccttcggttctccaaggctcggcttactgtgagactggacctgaggtgcttgatgggctgatacccaagtatagtactgatcgctccactaatggagtggtaataagttttggatttattataagttaaacttggtgtttttataagaaaaatgtaacaatatctataacactaaattaattatattaaatcctgctataagatatttgtattgcgttaggaatgttgttttatttttccaaagtttgaattataacaaaccaaaaatgacttacaccacaaaacggaatatagggattatattattgctcctttccttgataagtttataattcttttctgtgagcattggaatattcatgtgaaatttctacgtttaaatcaggtctaactttagatactccaaaaactaaaactatagaagtatatgtccatgttaaatgtagtgctaggtctttttcttttccctacgttttaaactgggtctaactgtagctccctccggcataagaccctgtttaattcccaaaaactttttccaaaaacatcacatcgaatctttagataaatgcatgaagtattaaatatagataaattaaaaaataatacacagttaaggaagaaattgcgagacgaattttttaagcctaattaatccatgattagctataagtgctacagtaaccagcatgtgctaatgacagattaattaacctcaaaagattcgtctcgcggtttccaggcgaggtatgaaactaattttttcattcgtgtccgaaaacctcttccgacatccgatcaaacgtccgatgtgacacccaaaaattttcttttcacgaattaaacagacactaagaaccaaacctgtagataggaaaaaaaacaaacttgtagataggaaaaaaaaacatcatataggtaggatcctatgttgtagtaacaacattaatttctacagtacaatcaattactaaacccgtatgctgcataatggaataaatatcccggcagtatgctgccatatggctcgtattgaagcgttgcagtaaagtgcttacaatacggatcctgtgtctatagtgagatggtactaaccatggcatttattgcactatgctaaactcgttgcttcttgtttttcaatttccacttcatcgtgataaactacttatacgagtgacataatgacacacttatcgtaataaacaatttcatcagacgttcaaagaaatttcacaagaatgaattcgccgttttacacaggaataggcagaacacgaccttacttatttttagttgacaaggatctataagcaaatggagagcacccgttttcgggataaaatttcatgaattatctttcaacacgtaattagccacgcgttttcctgtgaagactgaagaatatccacaaaccataattcgaggaggaatatatttttttcaaagaaattcaaggagaaaacttcgtcttaaaatactacaacttaataggttaggtttagatttactgttctaagatgattaaatattatcatactccctgtctagaaaaccaaactcatataggatattaaaggttaatttattttagagcgaaggaaacatgtcgcagtatgctggctgagacggagaaaatatgaattttagtagggcctgctcgccagcgagagagatggcaagatggctcacgtcagagcaggtacaatagcatgctataagctaactgcaaatatattttaagcagataaatgaggagagagaagggcagcgggctacagatttgtagccagctgtagcatggacttcaagacgcagtgtatgtataataggtggaaccagatattaaaaatgtagtatataactattgtatgaatgagctattaaattggctatagatgaattggagttaatagttggctaaactattaaacttgctctcacatgcaaagaatacagagctcttgtcatcattccgtggtgggaagcagacggcgacggatgtgccacttgacccccgaccgagctggccgtgggcccaaccaacgaccgttccatttgcacgagaccatatcacatcgccctggggggcccacctcgcccatcagattagattaaccccacggccccgcgccaaaattaaacaccggttttataccactcactaccccacactgacggtgactggagtgtgggcccagccgctgccgtgtcattattaggtcacttaatacagtaatcacccgaaaaaatattaattaatttaattatactagtaagcaagactggtcttgtttacaggtcaggagagatggcgccgccgcgaagcaaactcagcagccagcatgtctcacaagtaacaccccgaccctgcgaaaatactattttacccctcgtaccatccatgtgggtgatatggccgtgggcagaacgggtattacggcctccgaggtggagtttggttcgtgtcgcgtaaataactttctcggcgatcagcgaagcgaacagctcgagaaagaaaaagaaaacgtagaaaagtttttcgcagccgcggcggccagccaaccaaccaacccaaccagccaacgcggatcgcctctcgagcaccaaaccctacccggatcgccagcgcagccactcaccaagccttcccccccaccctgcttctgctgctcgcgccgggattcttggctcgtctgctcttcgcggtcggtgtcgcgccatcagcaaccatggaggtgagcggttcttggttttttcttttcttgcgccgcggcggcggcggcggcggtaggaagaggagtgatcgtgtgagggggttcgctgcttgcagggcgagaggagggcggtgaggacggtgcgggtgcggaacatctcagatctggcaggggagcgggaggtgcgggagttcttctccttctccggcgaaatcgagcacgtcgacatcagatggtgaggcgccgctttgcccttcgatttctttgttcggattgctaatggttgcgcctctgcattgctttagcaatcagaagtggtatatttctttttcgtgttctctgaaatccgcattgtgattttgggcttgcagcgatggggtggcgacggggaggacggcctacgtcacgttcaaggatcccaaggccctagagatcgcgctgctgctgtcggtatggctctgtgcattgattggctatgtttgtggatgggacttttcgctattggttgtggtggttacacaattggtgtgcctaatgaatgatttagtattttagcatactgccattgtgaatagtgtagttggtatgtgtagctacaagcctattatggcttgtttaggcgctgaagaagccaaattttgtgtcggttgctatcaatattgtagcgtgtagcgataaaaaggaaaatatgtattatataaacgggtattttgtcgttattataatatgtcacacttcctatagaacttgttggcatgcatgtacatattagagagcacataaatgtttatgtactaaatattcagttgtgttccttgtggagctctttcatattagatggatgacctaaaagtaagtgaggatcattatgtgaatcgaaggcatttttgatgcaaaaaaacattgaatcttgaatgctttatattcttcctatgattacacataaccgtgtgctttatggtttcatgcactggcaagcaaatgattgaaaggcggtgctttcttccgttgtcggtaaaatcttagaagccattgaccatggactataataaacaaaaacaaaatagatttatattaatgcctgctttgattggcatggaagtgagcagcatattatatggtgttactactgtgatcatttgactttgttattctgttttgccatttaagaaatctgctcccagttatatttctttatgtgcagcatgtgtgcaaatctgataaatgtgcatcaatttcaactgagattgtcataatgaaacacagtgcacagataacaatccagtgaatcttctaattagggtatattcagtttaaatctcattacgctacctaggtcttgcagcactgaaaagaaatagatgtttgataagcttcccctttcagtatggattatggcttattatcttctaagttccctttttcagggagcaacaattgtggatcgggttgtcaacataacccctgctgaagactacatctacatccctgttactgaccaggtgcaccatccaactaatttatgttacccaaatgtcagtactaaatcctttgattcgtctttttcatagagacatctgttttgaaaatcatgcagcaacttgtggtcagtgaggtggtcggtgaggtgacaagtacggctcctaatgcagatttggaccaacctaccgaggtgtccttcatttccagtgtactctattttattttccccggtatagacctgtagcatactatgaagttcccatgaaccaggggaagtgcgcactgataaagtttaacgaaaggagcatcccataacttgtagtaggtgggtggtagggatgaatcaatcaagtgcaacagcatgtgtgacatcttcccctggcatgacaattgggaacctacgcttattttcttatacatttatttagtgtattatgatcggtgctgatcaaaagtatctcattgtaccacataggccaatgccagccccactactggccgtgtttatgtcagcaaggctcatgatgtcatgacaactgtgattgcaaggggttcagcaatgcgacaagatgctgtgaacaaagctaaagcattcgatgagaaacatcaattgagggcaaatgcatcggccaagatcaattcctttgataagcgtgttggaatttcagagaagataaacagcgggataacagttgtaaatgagaaagtgaaatctgtagaccaaaggctacatgtttctgacaaaacaatggctgctttgctggctgcagagcgcaagctaaatgacactggctctgctgtgaaaaccaacaggtctcttcttatccatgcttttgcttatgttcagccaacaaatttgtttgacgttgtaccaataaccaatgaacattttttttttgtaatggttgagtagcttttaattttgatgaaatctattacctttataatgcctaaattcttttaggaggaatatataagatcttttatatacatgaatctccaaacactttactgatttttttccatcttcccctacttgtaggtatgtgtctgctggaacaagctggctaaatggtgccttcagcaaggttgctaaggctggtcatgttgctggctcaagaacaagagagaagttccaaatagctgtgtccaatctaacagcgaaagtaagtcaataataaacttaactatcggttgctactgagtaaatgaatcaagactctctatgtaggctacagctgataaatacttttagcaactctcgagctacagttccattttcctctttcatttagtcaaaattaataaattaccatgaaacagaccttcggttgcattgtcatttataggcatcaggcatgcctgataatttaggtttgactgttaccgtgctgcttcagtgtgtgcaaaggatctctttgcatctacacaatcacattaataaactctcacatgacaccatttctttctgttaggggctgtgttattatattatcctgaacgattaacttaacatcatattttcctggatatattttactcagacttgatatgtatcacaagttcacgatcttaatagaagaatcatctgttataatatctcaacccagagaaggagagaacaaagaagaataaataggggcaaacaagggtgggtaatgctggaacaggttgactgttagcatggaatcttaactaagaacttactgttgacatatagtgtgctgctaggtgatgattttgttaactttttggccaaacctaagtagcatcgctgaaggcagaacaaaggcacataatcccaccaggaacaaaatagcttcttgcaaagttcgctccaagccaattgatatgcatagccttttctcaccagaggaaatagtaattcaaattggaagggctatttatgtagcttgctgggctacaatgttatgtgtgtgtactttgcttctgagttctcatacttaaaattccattatttctccattatgctgcaacagggtcctgctgttgttgcttgagctgctgtggtcctggttttggaagctcttcttcctgggagaaaagtcgatcataaagcatcgtgcaatcaccttcactcagagtgtatcgacagtgtggcttgtaactgtgtatttcactgttcccattttttcttcggggaggtttttccagtgagccatgtcagatttggtacatagaggatctcatgtttttggaactttagagtcgccattcttttctttgtagtgtcgatgttaaattgattataggtgatagtgatattctgggccatatgttgttgactcggtatggattattggttattgaatgtctatgcttgtgccatgtttgttcttagcaatttaactgtcggtaattggaatgctcatccattggtagtgagtgttgttcgttggtatgtgttggcattgcttgaattctttactcacaacagcgactggttacttctgtagtggatacttaggcgccccttgatttaaaggaaattcataggaattttagaggattttatttctataggaattttttctatatagccctttaaattaaaggaatgaattttatggaatcctataaaattcctatggaatgcctaatgccatgcaaattttggaggaattctaacatgaggtagaaactttcctttgagtctttatctctcctctaattcctgtgttttgtctgcggtccaatcaaacggtcattcctttgtttttcctgtgttttgcaatcctctgttttacacttacattcctatcaaaatcctacggtccaatttccaatcaaacggtaattcctctgttttacacttacattcctaacttacattcctatcaaaaatcctatgttttttcatttcaggggcccttaaatatttatgactacatttggcacgcatctaaatgttgcttacttaaatcttgcactgggacttgaaaaatgagccgtttgccactttgcctgtttgaaagtcccatcgtatgctcctattcccgtcttattagggaatttttttacgtgttcttgtcacttacaaaatcaatgctgaaaaaggaactacattgtaatatcttaaaattaatctcaatattaagtttgaaaaattaaattttagttttttctttgacttatttgggcatccgatctatcaatgcaaaaagaaaagaaaggaggaaattcatatgattcttttaggaactgaactaaatcctgcaaaaattatgtaaatttacttcgattcagaaatcaaacatgacgcatatgcgtatatcctgccgcaatttcgcaatccgtagaacagaatctggactggaggtggtccaaagcatctattctcagcctctcaggaatctgcccggcttccgggattcccccacctcagaccttctctctctctctctctctctatatatatatatatatatatatatatatatatatatatatatatatatatatatatatatactcgctctccgcctctacttcgcgccatttccaaatccatttccctcgcctcacctcggtcgtggccgcgaatggcggcggaggcggcgccggagtgggtggagaagggggacaacgcgtggccgctagcggcggcgacgctggtggggctgcagagcgtgccgaggctggtgatcctgtacggcgactgcggcgcggtgaagaagtgggccgtcaactcggcgttcatggcgctctaggctgtttagatgctatactaagtttgccaccattcaccatatttttgtgccacacttgtcttaagttgtggcttaaaaaaatgagccacaccttagctagcaaaattggattgtaccacactttattgagttgatgacatgtgagacctaatagataagaaggaatcttgccacaagtgtggctatgaaccaaacaatagactaatttggttaaacttgtctaacatgagaggtggcaacctttggcaaactttgtgaacaaaccaaacagcctcgtacgccttcgccgcggtgctcgatcgtctgctggtgcgcctgggccttccgcatgtcgttcggcgacgagctcgcacccgttcgtcggccgccctgacctctccggcctcgaccaggcgggcttcctctctcgccggggcttcgccggcgcgtaccacgactaactgttcgatcgccgccatgcttggcttgagtgtgatggtgatggagccatgcatcatggacaggtcggtccgaggacggagaaggacagggaggcgttcccgccgaacaacgtcctgctcacgctcgccggagcggggctgctgctgtggatggggtggacggggttcaacggcggcgcgccgtacgccgccaacgtcgacgcgtcggtcaccgtcgtgaacacgcacctctgcacggcgacgagcctcctggtgtggctcctcctcgacagcttcgtcttcggccgcctctccgtcatcagcgccgtgcagggcatgatcaccggcctcgtctgcgtcaccccggcggccaggctggtgccgggcgatggtgatgggcggctctccggccgtggttcaccatgaaggtgctgcacaagcggagccgcctcctggcgcgcgtcgacgacacgctcgccgtgctccacacccacggcgtcgccggcagcctcagcggcgtcctgacggggctcctgctcctcgccgagccgcgcttcgccaggctcttcttcggcgacgacccgcgctacgtcggcctcgcgtacgctgtcagggacggccgcgccggctcggggctccggcaggtcggcgtgcagctggccgggatcgcgttcgtggtggcgctcaacgtcgccgtgacgagcgccgtgtgcctggccgtcagggtggccgtgccgcagctcgccggcggcggcgacgccatacacggcgaggacgcgtacgcggtgtggggcgacggcgagacgtacgagcagtactccgtgcacggcggcggcagcaaccacggcggcttccccatgacggccaatcccgtggcgtccaaagccgacgagatgatatggatataaggtgttttgactttggtcatgtttagataatatattaaacttagttaaatttaaagtagtttaattttgtctaaagtcaaaacgtgctataacctaaacggagggagtatttgctaagggaaatgctatagtaagggcataca

SEQ ID NO: 9851 - DNA, 2898 bp, Oryza sativa
accacaggaaaaacgatacagagatcaatcgaccaacgcgagcgacgactcatcatccaaaacgcgagaggttattcacatttcacagcgccctctgcaacaatgtcgccgcaaaggaaaaaaaagaaaaagctaaggcagcaaaagaaatcaagaaagcttaagctaacaccaaaacgatcgagaagtgaactaatagctagctaggaaatgataatatgtagtagtagcagtagtagactagtagtagtaatgtaggtaggaaatcagatgcctggcctgcccttgtatgccgcggaatggatacgttttaggccggtttaatccctcgaccgccgccgcattgccgtgtcaggtgtcaccaccaccaccagcagctgctgctcatcatctccgttctgcgagatggatcggagtaggaaggcggccatggcgaaggcgaggagctcctcgatgaagcgtcggtttgcatggagaagaagaaaggaggagatgtgtggtggtgttagagagagagagagagagagagagatagagggagggagctgtgggcgatggtgtccaggcaccggcagcaaggcagctgcgtcgtcttaagaaagagcagaaatggcatggagccctccaaagcatctgatggctggccctgtatgcgtatttatttatgtaggggctaaaggcatcttttcgcaagacgtacactgcacactgctctcattttttgcaagacgtacgctgcacactgctcttatttgagagagagataagagatagagagagcagcaacagcagcagcaattttttctttaaaaaaaataatcgaaaacgcagcaaattctaccactccctcagttctcagatgcataaggttcacaaaaccgtttgctgaccgaaaatcgctcagtgttggttttgtcagttttggcgaaaattgtttgaaaagagatggaattcagataaattgtcaaaattttaagattcaaattgatactccaacagtcaacagagtggtttgtcaactcaagccagctcaaaaccacgaaatgtcgtgaaaaccaagtggttttcgtcggttctatgaacctcaaacgtggaactggtgctcttcgttgcatgatgaggcagcatcgccaatgtgaaaagagaactgaaatattcatggttgatcactttcagcattctccaacggaacaaaggcattgtttagttccaaattttttcttcaaacttcaaaacttttccatcacatcaaaacttttctacccacataaacttttaacttttccatcacatcttccaatttcaactaaacttccaattttggcgtcaactaaacacacccaaagactgattaaaacaggtgtcatacccgaactgtgtttagttcacgctaaaattgaaagttttgttcaaattggaacaatgtgacggaaaagttggaagtttatgtatgtaggaaagttttgatgtgatgaaaaagttggtagtttgaagaaaaactttggatctaaacacggcccaaatctgctagtagagcatagagatagattggtgaaaagagtactgtaaacaatgaacagggattcttgggaaaccagatctctccacaatattatgttatatacagctcatgaatggtccagagcagcagcagattacaaacgatgccagtacattttgacaggtccgggaaacaaagtgaagacattgaaatcaaagtatactaagagtacaagaaatgcccaactagtgacctatgtatagttttttccctgtcgtatgtatagagcaaaattaaatgaacaaacggcaactctatctatctgtatctgtatctatcatgctacctcaaaagtaggcttggaacagaagcaggaaaaaaatcacttctggcagcaaacgttggacaccatgacggtactagttccaccataataaaaccgctatcaggacagaagaacagcccgtgtaatcatcatcatcctgccacaccatttccattttctgctggcggggcatttgaaatagcatcatatgtggtcaaattggacatactatcagatagcgaattcacctcttctccctcagatgcagctgttattgaagcagcgtcctccgaagcaatatcagaagctgcatccgaagccatactagatggctctgattgttctgacgtttcagattgtgactgtggttgcttctgtagactccaatacatgatgctagccgtaagcgttaggatcatcttctgatttacctgaaacagaaacataagagtacgattagtcaacagataataaccatcatttttcaagataaaagagaagaggatcacagacaacaaataatgtagacagtaaagcatttagcccagatgctagataaattgctgaaggtaaagcatttaattccatctgtgatggtaaaagttgcacgctcaatttcatgcttattagcatcccttacctcaatgatgtcctctggcagcagaaacacggaacatccgattttccttgcaacactaatggtatatgtagcatttagcttcttttcctcatctgcagaattgaaaggaaatagtgaatcagccaatgctacggttttccaaaaggatacatatataaacagtcagaaattatcatcaaatagtaattcaaacgtgcatatgaacagaccatcttccccctttgtaacaactttccagttgacaaccctcggttgtactgcactaagaagttcaaggaaaaaccgtccatttgataagctcttgtcctgagagaagataagaaaatttattaactggagttatctaacaacaaattaaaactaattaaacagaaattaataacaccttgaagctttccatttgagatgttcttcctgatgctttcactttgc

SEQ ID NO: 9852 - DNA, 6538 bp, Oryza sativa
aacgttgcaagtaaaaattcaaaatcccttatattgtgggacggagggagtagtacctaagaccaaatacaaacatattactcataatacaaggttagtataaccgttcgcaactctctcgtcttgcagtatatatgctccctctagtcatatagtagtaatactttagactatgttcggttagtcccgagagaaagattaaaagggatttatttcacacctattatggtgtggaattactccccctcaaacccctccaatccgctttaaccccctccaaaccaaacaaggccttatgttttgaaaataaaataatcaaactttataacttttgtttctaaaatacgaagaccatacgtaaaattagttttgtataaattagttttaagaagtacttcaacatccataaaatcatatatctattgttatttttatttatactatagtagaaaataaaggctattgattttttatatttatactgtagtagaaaataaaaagttacagttgttcttttaaggccgtttcgttatcaaccggagggagtagcacacatccaagcccaccgaaaaacgccccacgcagaaaccgggccctataaggttattgcaggcttgcagttatgacaattgacaagaacgatcactaaatcctgggctacaagagccttcggtgtgcgctgaaaaggtcagattaacactgaagcttcgcccaggttaatcgtgctcgaagttgcacaatgacgaggtgaaaggggccaaaacttcttttcccggttcgctggttttttaagtgccggcgggcgatgggaggtggacgactgtgctgtgtgcagagtagtatagagaaaattgattagcgtacaaaattgacccattgcatagttgtacaaaatcataaaagagaacagggtcgatgttgcaggaaagatctgaaatgtaaatgaacagagatagaggaaattagtgacgaatgagacgaagacacatcatccatctttattcatagaatccacagcaacaagagagatacaaacacacacagaccaatgtatgatacaaatgaataagaaataaacacaacatgcctcactcggaaacgcacccaacccaaccactgctactagtactactctatagccggaaacgactcgaaacgagccgtgtccaaatcggagatcatcaacgaaccaattccatccatcaccacctcgcgcgcctgcctagtgcatgatcccacccgcgacgaggatggacagcacggcagagcacgccacggccagcgccgccgacgccgcgccccccgcggccgcgcccgtgaccggcgccggcgccggtggcacgcccccgtccacctgcgccgacgccaccgacgcgaacatcacggccaccgccgcggccacggcgaccaacacggcgcctctagatgccatcgcaggaatgaccgagcacggcaagcgacgcagaagcacctggcagggagagagagagagatagagagagcggtgaaacggtagcggcatgggtagtggggtatatatcgaggtggcgcgcgatgacgcgatcggaggctgccgccccgggcgcgcggggcgcttggcgccgtaggcgcgacgcgtggtgggcctctccgcgacacgttgggctcgagggtggcgcaggtggcgcgacgcgaggcggtctcggcgcgggcacgcgactccccaccccaccactcgtcgggtctgacgactgacgcccacaacccaaccgaccggaggccctctgattggcgaggccccaaccgcaacgagtcccctgcacgactcgacgaccccggctaaaaccgacaccataccattcatcagccgccatgctacgccaagcacaaacacgtattaatcccggctaaaatttacagcaatactagtcgacgaacgatacgtttgtagtactatataccacttgtaatttgcgatgactagcagtagaatggtaatttaacgtcgagtacgaggcgtgtctcccacgcttttttgctcgggggtcaagggtcgttgtcgtacatgtacacgtacgttcgtgcgccacgcagtgacacacaccacaccatgacgcacacaaaaaaaaattaaaagctgtgcacatgatgtgtagggagacgtacaagcccggctacgggcgatgcacagggccacctgccgtatcgatcgatcgatcgatcgcacggtgtctacctccaaagtcgtcgcgcgcggatgcgtacgctgacgctttactgccacgattcctctcgttggctcgtagcgcgtgcgtccgcaacgaacgttccaacgagcagccgagccgactagtaaaaaacgtagcgtagtgtgtgttggggtcaatcacggtacatgcgcccctgtcccgcagaagatgtcacgtatttttttcgcgatagagacaggaggcgatcgaccggacgtgtgaggttgtgaccgtgaaatgtgcctagcacctgcatccatttcatcggtccttccttcgcaagagctgtacgctacattggctacaaagagaagataaaaaaaaaagtgttggtacacctaaaagtccattcagtttcgtgctgagttttctgaactgggtctgaataatgcaagagccgcaaaaaagaaaaaaaaactcgaagtgtctgaactgaacgtgcggcggaagccggtcggcgccgtcgtcgaatcgatcgatcggtcgcacggcggaagttgccagggcgaaagggagggctcagctgcaggtagagagcacgtccgtctcagtagtcggctcgcgattctcagcttgtggccgtggatgcgctccatcgattcgatcttgtaacacgatggcatgtctcgatcgacaatactggaacgatctttaggggatttttatcactcgggtatatatgcatatcatcgccaagccggccggtagatcaggagttagtaattggacttaagacattctgaatctgttctgtccctcgttttgccgtgatcgccagcgtcgatggatgggtcgttgatttttgcgtacacttgtcggtagcacaagacttcagccgaggtaaacagttaagatcgtctacagaattacagataacttgtcgccattgcaagttagcttgaaaagtagttgattcgtacaaatacacaccaaaccagcaagacgacagtgcgaataaccaggacaatacacgagtttctggtactgcccttgttacacgaaaaatattatttctggtagtgtacttataatgtttcactatatatagatctaatgttgcaatgaattaaaatattattttttaacaaatcacccatatattttggaaaccctctattaagataatttggtttattttttgttccacaaaaaatgtttcacctagtgtactcacaatatttctctatgtataaatctaatattgcagtaaactaaaatattctattgcaacaaaaaaaaaactcacatattttggaaactccctattaagagaattcgtttcattttttgttccaccaaaaaatgtttcacctagtgtacttataatgtttcactatatatggatcaaatgttgcagtgaactgaaacattctttagctatttgctgaaacattgttttatataaggtgaaacaatacccgatttaagcaagtgaaacattttcgatctacttagtgaaacaattccgatatacctggtggaatatcgtgcaatatttaaaaataattcaataataagctaatttttttcatcggaatatatccatgtgtagtcttattttgaagatttaattgcaacaaatttaatggtgtaatcggatcatgatttggataagtaatttaagagaaaaatcaatttaaaatagttttacacgtaaatcggataatgacgttagcaccgattttaacctcctcccatcatgcgcccgagccggagtcacgtcctactcctacttcagtgtgattgtgtgaaccaaatacgttgtataacggagaagaggcaacataactgaaccggagacaacgtctactatattgatactaaccagaaagttaaggtttatactgtccataaaaatttacttaccggactatactactcattctaaatactttagcatatattaagttttttttaaaaaaaaactataatactaatgatagtatattgttaggagggtacaaggacacatacaaaggtttctatttgctatctctcagttaccagcaaaacaaaatcgttgacgtggaaaagagaggagaggagatagatgtagttgttttccatgacatcggccaaacaacaactttggcgagcaaaaacaacgaaaaatcaagtgttctacatcgtggtatttaacaagaggcggccttggatcccatgggtgattggatttttggcaaggaatggattggtgtcgcataaaatcgacatcgatgcaagctaccatttaggagttgcacatatttggggaaagagggaggagtaaatccactatttatttatttatttatttattggggggagagggatttgaatggaaggtgatagatgagtgataagtattttgagagacactttaaatgagaaaatgggcatttggtcacgttccaaaaatggtttcgatggaatgccatcccgaaaacacgtttcgctaaaatgccaatatggagcgcgtgatcacagccactttgttattttctccatttttgtcattttcaattccattttcgttggaatatggcttgatgagaccaaattgccccctgctcaccgagaccagcggtcctttcctctaggtcatccacccaggcctcgtcgccggcggcggcggcgaccacgccgtcctcaatgcgcaggagcaggtcttgctccatgtcgtccaacctcttgacatcgtccatgtcctcgacgagcaggagtaggtgctccggcaccgcgttttcaagagtctggacctccttgacgccgcgttcctctccagcctctacggagacgcgaccgggagcgtgtcggtcctcgtccccaccacggccagcctcatggaggcgctggggagcgcgtccagcaggcgcatgcgtactctgccttatctcggacatcatcggcctacgcgagccgccgctcgtgccggattccttgctgggctagaggcgactgggtggatcaccgtgcgcgcgccggcatacgtcacgtgctgggcagggccgcgctacacggaggcgttggtggcctccccggacgccgccgcgctcgacaccgttgtgttcacctccaccgccgaggtggaagtcctgctcagggggctagacgctgcgtggttcttgacgctctcgcctcgatgaggagctccgccgcgagcaagtcgccgctcatgtcgatcccctttcagccggtgagcggcaatttggtctcatcaagctgcattccagcaaaaaaaatggaattgaaaatgaccaaaaaggagaaaatggcaaagtggttgtggtcaggcgttccatgttggcattttagcgaaacgcgttttcggaatggcattccaacgaaaccgttttttgaacgtggccaaatgtccatttttctcattttaaatactagaaaaataactatttttaagaggaaggtactccatccgtttcacaatgtaagtcattctagcatttcccacattcatattaatgttaatgaatctagacatatatatctatttagattcattaatattaatatgaatatgaaaaatattagaatgacttacattttggaaaggagcaagtagtacataactaatacaagattagtagattacacctcaatttgctagtttgctcacgagaggtcctgtcttcccgactgaactgtgaactcccagcacttcgaaattaacaatagacttgatttcaaatctgaacaaacgatgattagtgaccgggaggcagctgttggccgctgtcccggtgtcccctacattcattcacgcgcggccgtgcggcaccatgaatgcatgagaccatatgggcggagagtcgggttgatcgagctccgccccagggatcctcgcggatgattgatgattcttccaccgccgccgaagggtcacaggactcacaggtgctgtcgactgtcgtgctgatccgacggcttccagtaggattacccatacagaggaccacatgaatatgaattcgtgcaaacgaatccctaattcgaatcgctatcaatcgtacgcaaatagaacccctaggatcgggtaattcggtacaagcgggagcggtcctaacttatgcatttaaatctccgatatttatgcaaatcagtctcttccataccgattcgtcgcccttcttagacagaccctaacgtttcggtcggcagcatctcgccgccacgcatggatcgagctgcttcaacctgactgtggcggtgtgccccgccgatcgaccaataaccgcaaccattacctttctgtgttaaaataatctacaactaaattagatataacttgatactacgaaccataccgatattcg

SEQ ID NO: 9853 - DNA, 1730 bp, Oryza sativa
  unsure (1)..(1730): unsure at all n locations
tggggcagggcgggtacggcgtggtgtaccgcgccaccgtggtcggggaagatggccggagcacggacgtcgccgtgaagcagttctccggtgcaaacaccaaggggaaggaggatttcctcgccgagctcagaattatcaactgcctccgtcatcgcaatctcgtcaagatcgtcggtaagcgatcatttctcgttctggttaaccgaaaaggatacttagtttagattgaagttgtgattagagtattagattgggtacggtttgtctaataatttggagtaggaaataatattctgagatggcacacaagttggcacggcaaatagatgttttaagaagctcaccacgctatgtggcaacttgggccacttggcagctaaatttaaaattgaatcatcagtccatgacgtctttgcaagcagattgaatcataagatagatattggagtgctctggttgacaatatgataatgcaagatttgatcttttgcttgcattgtgttagaagaaatatagcgttcgttagttggaacttggaacagccatgcaaatgcacatctctctctatatatatatatagtttaattagctgccaattcaccataagaggagacattcatatcccaaaacaaacaccgtacgttcagtcttcatttttcaaatttcaaaatgatacgaaattctgtaagcaagttctaaacacattttggacgacatgcacgtctgcaggttggtgccgccaaaatggcaggctgttgctagtgtacgactacatgccgaacggcagcctggacaggcacatcttcggcgagccgggcgcggcggcgctggactggaagcagcgctacaacgtcgtcgccggcgtcgcgtcggcgctgaactacctccaccacgagtacgaccagatggtgatccaccgcgacatcaagccgtccaacatcatgctcgactccgccttcaacgcgcggctcggcgacttcggcctcgcccgcgcgctcgagtccgacaagacgtcgtacaccgacatcatcggcgtcccggggacgctggggtacatcgcgccggagtgcttccacaccggccgcgcgacgcgggagtcggacgtgttcggcttcggcgccgtcatcctggagatcgtctgcggccgccgcatctcctgcagcaaccccgccgggtgcagccagctgctggaggccgtctggaagctccacggcgcggcgggcggcggcggcngcngcggccgcatcctcgaggccgtcgaccagaggctcgccggcgagttcgacgaggccgaggccgagcggctcctgctgctgggcctcgcgtgcagccacccgaaccccggggagcggccgaggacgcaaaccgtcctgcagatcctgacgggcgccgcccccccgccgcacgttccgccgtcgaagccggcgttcatgtggcccgcgatgcccgtcgcgctcgatggcgacgacgacgacgagacgtcgcgcagcagcacggtgatgaactcgtcgtcgtcgtactacgtgtcctcgtcgggttggacccagaactaccaggtcagcaaggagcacgaggtggcggacagggacgtggcgacggtgtgaccgtagacgagtccacggcccacacgtgcggccgggacccgacccatcgcatcggatttggcacgttaccgtggagttggtgacaacgttgagaacaaagatgggacgggggctgcaggaatt

SEQ ID NO: 9854 - DNA, 1523 bp, Oryza sativa
cagcgctagtgactattttttctattactattaataagcgacctacatcatactaatttgattcttcaggttgaggatttgcactctataactccaaatcatttcttggaagttagtggtgctgtgatccatccactttcgtaccagcaggtatgtttgccacagtttaatggtcttttctgagctgttgccctctctgccccttctctagcaaataattggattaacatgtttataagtttatgaatcggatagtgtatattttttaatttagaaagtcgtcaagattaaactttgaccattaatctgctataacatgtatatttgatagttaaaaccaatattgtgcgaaagcacgttgaagtatgaatctttggtaaatttacttgtaatttgattatttcttggtcaaaatctgcaaagtttgctagaaatattggatcatgttgaactttttgctagaaatgttagcctccctactctggtcttgcatgaaaatagttgcaactcatttaattgtatacttcatcatatgttccctctttctagaaagtcatttaacatcataaaattatatgtttacaatatttattgagtattgaaacgttactaatctttttttatatgtaggcaaggaattttaggttcaaatgcggtctcgtatatgttgctgaggcagggtaagacatctgatgataacaactgatattcatttcctgaaagggcatcaaagcatagttgtgatttctagctggtctattttaccaggcattggtcatatgataaatccctttccatagattatgataattgagtcgggtttgaactcccaactaagtttcatttttcacagctattactttcagagcacaacaccccttagtgagttttagctgcaatttatgtttatatgttattcatctctttgcaatatttcacgttgggattatatctgtctttttattggcttttcaagtttcctgttggtgtcttgcctgcattaattttcttctatttgttagctgatattctgtctaaaatgtgatgttgtttatcttaccttttctgcaacttaaccaccatcataatatgcaggtacatgctctctcgggcatctgttccacgccatgctattattaaaaagctcgcaggagaggatattgaaaatttaggggaccttattgcatgtatttcaaaactatctagaggagcaagagttcctcttgaatatgtaaagtacaccgaccgttataggaataaggtaggaacatcttccttggaaacttttaatcatgataattagtcatatttctgtgcgtcctagtaaacattaactcacttcaaaaattacaactgatcatttatcttgtttatgtatccagtctgtactggtgaccattgatcggcatgaatggtatgcgcctcctcagttatatactcgaaatgatgcaactggcttgtggactgcaaaatcagctataccgccggaatctccttttatagcttcagctcatcatgctggt

SEQ ID NO: 9855 - DNA, 9688 bp, Oryza sativa
ttgtttgctgcttggctatggatgtgtgatgctgatttcacagcagcagcagttagaacttgttgttgtaccagaagacgcccttgttgtcctcaggctcgacgtagatgcactccttggcctcgcgccatgtcgccttggcgacgggcgtcgggtcgaactggtagtactcgccgaggatggggcggatcgccttagtggcctccatggcgtggtagtgcggcatggtggagaagaggtggtgcgcgacgtgcgtgtccgtgatgttgtggaacaccttgttgaggatgccgtagtcgcggtccacggtggccagcgcgccgcggagccagtcccactcgctcgagtcgtagtgcggcagcgccgggtgggtgtgctgcaggtaggtgatgagcaccagccacgcgttcacgatcagcagcggcacgccgtagacgcgcaccacccaccagaacccgaacgccgacacagcttgaacagggcgagccccgcggacacgacgccgacgtcggagatgaagatctggacgcgctcccggtcgttgtagatcgggccgtaggggtcgaagtggcacgcgaagcgcgggtacgggcggccggacacgttgaacgccaggtacagcggccacccgagggtgagctgcacgaagatgtgcaccagccggccgatcgggttgtggtacacgtacggggtgtaccacgccatcgccgacttctgcttcgggacgaacacctcgtcgcgctccagcgacccggtgttggagtggtggcgccggtggctgtacttccacgagaagtaggggacgagcagcgacgagtgcagcacgaggccgacgatgtcgtcgagcaccgagtagtcggagaaggcatggtggccgcactcgtgcgcgatgacccacacgccggtgagcacgcagccctgcgcgatccagtagagcggccatgccgcgaactccatcccgctcggcagcacggggatcatgaccagcgcgaagtagagcagcgcggcgacgatcacgaggtcatggaccacgtaggagaaggacttgatcaccgagcgctggaagcagtgaggcgggatggccttcttgatctgccccagcgtgaacggcggcttgtccgtcggcgaccgctgcacggccgcgccattgccggcgcggccgagcagcttctgctgctcctcccgctccttctccgtcatcctgccgccggcacccatcttgctgcttacaacaacaatcacaatcgcaggtgatgagaaagtgagaatcgattgcaatattgtagtgggatcagaaggtgcaatttgagcaatattataatgcaataatacggaaaccccacacgaacaaaaatatctcgcaactaagccaataagcaatagattacgtatgcacgagttgaggagcatcaacccaggaaaagaaagggcggcacacccatgatgcgatccatcacttttcttgattaaagtatatgtgataggttattccgagcagcgagccgagcagcatgtgcttgcccatgttcagattcgctttctagggcgtgcatcgtaagttcacatgtactgctacggatctgccttgcgcaagttaccacaagatgacaagactgatcactgtaccatagcacagtgaattagtactagtaaggccattctcaacccattagacatagtttccataaactccacagcatcaagaaactagtactaggggcctgtttggtttccagtgacttattttaagtccctgtcacatcggatgtttagacactaatttagagtattaaacatacactaattacaaaacccattatataaccttggactaattcgcgagacgaatcttttgagtctaattatgccatgattttgacaatgtgatgctacagtaaacttttgataattatggattaattaggcttaaaaaattcgtctcgcggattagctctcatttataaaattagtttttttactagtctatgtttaatactccaaattagcgtccaaacatccgatgtgatatgggctaaaaagttttagcctcatctaaacaccccctagacactactcttccaatacaaacatcactattccatacttcaatttaatgcttcttatctcacatgatgtcttggatattgtgtagaaacaatatctcatgcaaaacatagtttccttctctttactcatttattcacttgtcacatcattttttatcctatatgataacttatttaatgatatagacatcatcctaatcattgagttgggaatagcctaattacgcttagcatggtgcagtaaacgaaaaggaaatggtgattgattcaacaagcgagaaaggtttggtcttgggatgtaatgtggttttgaaaaatactagtactacagtagttatatgttcctcgataaaaatgtgcatatgtcggaacgcacactttgtccagatagtctgaactctgaaggatgatgcctaggaccatccccagaaacgtgtgcagaaggaatttatcacttgtttgggggaaaaaaatggtaccatatctgattatgataaggtcattaaatccagccatacaaactgggcggtcaaatataagctatccatattcatcagacatcgtcatatcctaatgagtggtcaattttgacgaacaattaaacacacaggaagtttcctctactcttaaaaagacaccaatctttgcaaaaaagaaaaccacttgctcctgcaggttggtggaacagtaccatcaagactaattagtataattacctagctagggtcaaattaaccaagtgcactgcacgcgtctagtctaacgcaaatgccatcccacaaggcagattcatgtgcgactgtctcacttgacttggaaggcacacgagcctaccatttttcctacgggctccaggattgtggtgctggtgatctggccttcttgtattccgattagacggctgcactcgtttgattaggatgattgctagctcgctgcacctgtttgtggctggaaatcaccagcacatgcagctaatagcagacaagccagccatgcatgcactagtggtgtgtgaactatcatactgcaagtggtggatgcaaatccaagaagaggtaaggggggccagatccgctaatctacgatttgttcatttctgcgtgtccagcttatctctggctggaaatgtacagagatagaggggggataaattggtgaaacatgccgtcaggtggggctggagttcagcgccaccctgccgacctttgcaggctgtgtgacccctgcacttttgtatcctagcgaagacatgcagctgctgcctgacgatgggcatatgggttccagaccatacagtatttttatgcagagaacagtgataatttgcctggaaagtaagaggcaatcgtcaccgtccaaatgcaacgaacgggatctgacggtggagcgacctggggatcacgatgccttttgctaggtcaagcaacccaccaagcccgcgaccgggcgggggcggcggcggcggaggctgctgcccggcgcgtgagtgcgatgtcttttttattttttcctttcgctttcttttctacaaaatcagtggcatttccaaccacaccaccgggagcacgagaagcatatgccgtgccctgccgccggctaggttccataggcgaaaaaaaaagagagagagatttttttttaatgccagaaacgacgaccgcacaagaatcaaactttttcttttcttgaaatgttgtccgtgtgtaaggtcgtcggtttgtcagcgtcgtgactcgtgcccatagcgctgagtttcagaaaaaaaaaagaagaagagtaatcggccatttcgtcctgaggcgttgaaagacgaatcccaacatggaggggccagaggccatgatggaagcatgcagccaaaggaggcagctttggtgggtaaaggtagcagctttaatcacaagattaacgggaatagctaaaaggtttggcaaaagttcctacaatgagttgtaatggcatagcgatggagataaggtacacaactacagaagcatgcggaaatggagcatatcaaactatcatcctatcggtaaatcctacagatctgcccaggagacacaacaaaatcctatagctctgctttaatccacctcaaaaaggtcccatcaatccccggcggcgagacgagatcaacgacgacgagctcgcctgtcctatcccccaatccaccaccattactcccaagaacacaaactccacagagtgaaaacaaccaaaaatcaccgcagcgatttcacacaccgtaccgaaatcgaaaagaatcacgaaacaacagcggtggcggagggtaatgtgggaggcacctgagttagcgttggtagatttcgcaggcgcggaggagcggagcggcggaggcagatcggggtggggggcgggcgacacccttcccttgttccctccctctttgtggaggaaacgagtggtctgtgcaggggaggaggagaggaggaggccgcctccgaatccaccgggtcgatgcgctatttaaaagcggtccgtgcgacgctggcgcgtggggcccgacgcgcggacaggtggggcccaccacaccacgtcggagattgggaatctgacgcccgcacacgtgtcgcgacgtgtatcgcgcgcccggggggcggccttgacccggatcggggggctggggccgcgtgggccgtccgctgcgtccatccgacggccgggagcgcgtcgccgtgctggagggatcggccgggtggggttttcttgtgaggagggaggggtttggtggtggtgtcgcggcggcgcgatgcgaggagaaagcatatggcgcggcgcacggcggcggggggaatcggtcgcatccgggtaggcttcaacgagggagagaccgagagaggctggaaattggcaaaggtggatcgggccggatggcccggatccgagccagattcatgggaaatcgccgagagagagacgaccgccgaggcgagccgggagaaacggacgaagaaggatgagatatgaagggatcttgggcttttctacaaagtggtaggtcggcttccattgacatgtggcccaagtgatgtatgtatgtatgtataatttgtcctttaactttaaggttttcaatgcaaaagtttaaggcacacagcagctagaatttatacaggggctgaaacaaaaataagttagttattttgtattcagcgaagacaccaacctgtagcttagagagtggttttgtcacctttcttttcagatcaatctgatttgagattttgctagtggtttggtactttggtttacaaaaattatgcgatttctttgacaaccaaatacagcatttgacttcgaagttttaacggcatttttgcttccggtctttatttgaaatgggtggcgctacttggctacttaattcgtccaatactccaattaatctaatcccccaggccttgtctcactaatcgctactgtactggttttttttttcttctaacgcatttctcatgtgcaaagtctggttttgcaagcatacttttctttcagcagatgtctaacttcattgctgtagtacgtaacacgtacagggtcgtgtcctctgtccagtgcacgattttattcaaactactcgtcgacccgaagtaaatagtacatggcatactattgttggatcgtactattagatatggatcgtttgcttgtacacaacccttaagccattatttagaagattataactcgtaaataacgtaaggcgagctttgctttgtgattactgattagccttgtgcatggctcctacgcacgctacctgttccaaagccttcgtttgatgacaatcatggccacgtgatggcgtattctgaactggttttgcagcaaaaaatatctctcagcgagtcgccctcgaatgtcctcctaacttggcctttgggttatccgccagcttgtgtcttttcagcatcaaagtgcagttgcgcagtgtgcaacgccggaaaatattctttcataaattcaggaacccttcgtcggcaaccccttggccgccgcataacagcggattagctaggatattcttcagcaagatacacgcatacaggaaagatgttcatttattattagctagtcacttttctctccaacgatacagtaatatattaacgggttgattattattcgtgaatcgtgatttcgactaggctactaattcctcgacctaaacttcatggtatgcagcagaccaaacgctctcagtattatatcatgtcttttccattttgtttagttaattttggtcatcagagtcagagaccgatcatattcgcgcccacttgtgtccccaagttggtgtattggtgttcgtactgtatactccgataaaatatactgtataacataacatgtcccgtaatgtatatgctgacatatactatgtactccagctaacacgcaattaatcagctgcttcgtccatcgatctaaattaatgttactgtcctctgcagcttttgcgtgaattctcttgtcgcctgcaacgatcgtgcccaattctaactgcatcctgcatgtgctgcaaagatatatagagcactgtgctgctcgtagcagtgtacgtccaacatcacccacagtcttggtcacccaaaactggtggcgagatgaccgtgttcacggtccgtgacagtatcaacgttgtcatccatgtggtcagacactgatctggtgagatatctccgatctgcccaatagttaggtcgattaattaggtccctgtaggtgcaactggttggaaaatatatgtgctagatctagcagcttagcacggcgcaagacggccattgtgttgtcttcttgtagcgccggggactactcttagacggtacttaggtagtacagtactacgtacttagtgattcgtagtcatgtactaatggcattttgctttcggggttggtaattttggtagttttgttaaaccaaacacatgcgtggatctacctggtttggtgaccatacgcactaggcagagcacagagcagtgccacggtagcacggtcagcgagtactccctaggaggctgggattgtgcttactggcagaaagcgatggactggacttcatggcagttcagaaacagattgcttttttcccccttttaataaaatgcatgagttctcaaaaaaaaaatgacttcatggcagttgcagctgtgttttttcttttcttttattttttggaaaggtttggttgcctggctatatttataagaaggcagaaacagttacacacaatcgatttacatgaagcagataagcttcaaagagttgcagctggtatttttgagtcctgtggcgcagcacatatcaatttggcacaatttgcaacatggcaatttgggatggtttgtcagataaattccttggggaggcttcagtgcgaagtgggtgtaacgggtaataataatccactgatacgctgttatatatagagtgcgtcgctgctaattcaatgcttcgatcaggtctattctggcaacagcgtccgtgctgaacaatgcacagatttgcaggaaaccatatgtgcggactaacaggattaatatcggtagaattactcgcgtgacagaaagctgatgatgcacggccatccccactagctgtgccctaagttctacggggacagagatcagaaaagaagaaatggctatagctccatcatttcaattcaagaaggtagtgtggtacctcactttgttctaaaaaagatggcacagtgcgttgcagctttcaacggtacaagctgttaattgagtgtcatcatctgtacaccaaggtctactgttgcaatattccaaaataaggacgatatttagacagctgaaaacaatattttgttttctttcagtaatgatgctgctatactccacgcggtccggtctgcagccttgcgcttgtgcttctagacgaagtacagagtctaaaataacttgaactcgtttttttttcctccaatacgcaagacaacaactactactacttctcatcccgttagcacatcgaaggggatacagctctacctgatgttacaattgtagctttgcagtaaatgtgctcctcgcttctacccgaactcgtgatttgtgagttggcgcgatgcgcgtaagagcaattataatataggttataagctagctaaatgctgaggtggaggagagagagaggagaagctggctgtaaacttatagccggcttggatacaagaaccaaaaaactatataagagagataagtgggtcctatattaattataaagagctaactattacttcctctatcccagtaaaattgacgttttaaggttagcaaccaagattagttgttgtgcaaaattaccaaattgtccccatgatttgattcagcttgtcatttccagcatttatatatgcactcagaatattctagaggatgtttccagcagtaataaagtaaccacaactcactgccacgtgtaacagggagtacataaatcggcgccttggccacacgtttgataaaggggcaaagccattattaacatattcaaaaatttgaatcaaccattaaatttgctttggcgtctaaagtgcctcttctctgtgtagcgacatattttttgagataagcctggggcgttgaacgtcaattttactaggacggagaaagtatatggataagctgagaaaatgcctcttatagccaaccttgctcggacgcactgtggactgtgctaacatggcgagcccaagtgcaaactgctcgagcgagcgaagcagcctcggtaccaacgccaacgaattgctagtagatgttctctgtagtctactactactagtctgtacgtgtcatcgacgcccacgacgcgtgtggtcggcactcggcagtcctgccacgtcccggccgcgtgcggcgcacactcaccagcattggcagtatctgcggcttgccgccgcacgaccgcgcggggtaggtgggctggtccgtgtgcagcgccctcaccaactcgctgtttgggccaaactcaaagctacaaattccacacacatgtattcaagctattggatcgtcacaagattcagaagtcaaagtgtttagcacaaatccaaggaataagttcacttggtgacccttaaaagtgattgaaatctaatccgtaaccctaaaccataaaaccagatattttgacccctaaactacggaaaccggtgcaatttgactccctcggcggttttgtaggacggtttcgctgacgtgacggtattgaccgggttttctttacacatagcattgatgtggcgcttaggtggcatttcaattaaaaagttatacgtgggacccatttgttattcacacacacaattgtggggcccactgacatgtggccccacacgccatcttctccctttcttctttctcccctcccttatctctttctttctccctctcccctacagccgtccgcggggagctagcggcggcggtgacgacgaccatgggctagagatgaagcggcggccgctcgccgttcctctcgcaccaccaccacccgcaccacccagtgcccggcatcgagacgtcggcggctaccgagcggcggcagcgacagcccgcgggc

SEQ ID NO: 9856 - DNA, 9760 bp, Oryza sativa
ggcggcgcgcgaggtgtaggacataaataccggcacgagacggggttagcgtcgcgagaccgagacgacgattgctactaccgtgcgcgcgaggaaagcggagttggggcggtcgatcgatcgatcgatccgcgggcgatgcgatgcgacgcggcgacgcccgcgggcggcagatgggagagggcacggggcatcgtcgccgccgtacgacgtgtttacggcgacacacgatcgcggggcaggcagcaggtggcgtctctacacgaggtgcccgtagcactgtagcagcagctagaagccggcagccggggggcgtcgtcgccctggctgattggtcatatgctgcattgctgcctcgtgtcaaatgcatgcgtgcaaaaagaatgaaacttgcgtgtgtgcgccggtgcaaataactcggctgcctactgactaacgggcagccatggatcgtgccaaggaaacggaaagcagtttggtgcattggtactgtaacaaactactagtagcaggaggaaaccacgagatcgttggaaggcagcgggtagcagtgcaggcgcaatgtaaattatggtcaggtgggggtagtacgtataggagtagtaggcagctagcggtcccggtgccggcggcacgcgtgaatgcgtgataccggtgtgcaggggaggggaggggagggggccggcgacgttccataaataaccttcacctacttgggcggcggcagtgcagatcagatcactctatacgtacgggtgtgggatcgccgggttgccagataaacggcgagacgcatttggaggtcccttggattaaaatgggttaattgaattcatatattaaaaatttacaggttttaaaaatactattactatgtactccctccctacaattctaatattgttgacgttttgggatagaaaccaaagtatgcaatttttttgaagttttaggccctgtttagatcccactccaaaatttaacaccatgtcacatcgaacgtttgaacacatgcatgaagtattaaatataagctaaaaaaataactaattgcataaattgcggctaatttacgatacgaatcttttaagcctaattgttctatgatttgacaatgtggtgctacagtaaacatttgctaatgacagattaattaggcttaataaattcatctcgcagtttactgaactaattagttttttttattagtacccgaacaccctatgcgacaccctgtataatacccgatgtgacgcttcaaaactttacacccctgtatctaaacacccccttagtctctgcctaagccctgtttagattcaaacttttttctttaaactttcaactttttcatcacatcgaactttcctacacatataaacttctaacttttccattatatcgttacaatttctttaaacttccaattttgatgtgtaactaaacacagccctatatataaagaacttacttgctcctgcatgcatgcatcccattacttcagagtgcttcgtttctcgaagataggttccaaaccacctaggatatacaacttgttgattccaattagcacaccggcacatttaatatgggtaaagtagaaattaggcatataataaatcattccttggtacgtaagattatgtctaaaacgtcaattaaattagaaccggagggagtatctatttatagttatgctattaaaatttaatggttactcaatacattcatcataatatttaggtcattttgttctcgtctctctgtttttccctgttacctctctctcatttctagtgaacccgacctgatgaattgatttggattggtgcccattaagacctttcctaccgccggctatgtcactacgctgcaaaacaagatatcttcagctgattttgccgatgcatatggtagagaaggtgacagacaggcaacgggcatgcatgctgcacatggcaccaccgcagctgcggtaactagggttgaggaagctgaagagcatcccctgttagtacaagtacgacatgagcgtgcattgccagatctccttcacctccgcctgcctgcttgccttacagctactcgtgtgtgtcgacctcacctgtcatcacgatttctcctaggaaatgcacagcctctcgccgcgacatcccccgccatgacactacctgtcactccttgccgcctcaccggggacccaggcatctagcgcacgtcacaaattttcaagagaaatttgataaaaataccacctaatactcgcaatttggttatttaccacctaatccgtacgttttctttaatatgcaactagtattgcaaattgctctattttgataccattttttcctttttttttcttctcgggttgttggacatttttatccctgaccccacatgttgtatgaaaggaggtttttattacacatcgatcgatggaaaaatatatgatggaaacttagaaactatcgttggatcaaaatatgtacgtctaagatttatccacgtcatcactgagtaaaaatattactcatgagtaaatctaagaataaaatttttagttgtgatgacttggacgaatagcatccatttttcgattcatttgcactacacatgtggcttgctatacatattttccctcgatcgatccattcaccgctcccgcgacgccaagcgttcgcaccagcggcaccggtctcgccgccatgcgcccaagccgccgagcgctactccagccaccggcccatgccccatcccgcgctgccgtaggtacaaatttataatggcatgggtataattaacctaaaaaagcagacatttgtaggaagtgcagactgcagacgggtaagaaccctagaccagatcagagttttagccgaagtgcgagaggatagagggaggcggcgcgatcattcactaccggagcaccccttatgtggggcgcttccacggcttcgtgatgatggcggctagggctagggccaagcgtaggtaagatacagatagggagttctttgttgatgggatcgaagagatggaggaggagggtacaactacaatgtcgatgccgtggccatggattgtcaaataccatggtaaactttaccatccataacttgttatcatgggatttgatctggaaattgtaacctaatcgatgcaaaatagctaacgggcaatcgatcgcccctagcgcgcccccctcttctccacgtggtttccttttttgcaccacattacttttcaattttagtaaatttatgcacctaaagtttgtacacctcaagtttacatatctaaagtttagagacccaaagtttataaatcaaaagtttatatatccgattcaaatttgaatttgaattcaaatactttttatatatagtatttctatacatctaaagtttatacacctaaagtttatagacccaaagtttataaatcaaaagtttacatacccgattcaaatttgaatttgaattcaaatattttttatatatagtatttctatacatctaaagtttatacacctacagtttatagacccaaagtttataagtcaaaagtttacatacccgattcaaatttgaatttgaattcaaatatagtttatagacccaaagttttataagttaaaagtttacatacacattttaaattttaatttgaattcaatttttttatatatagtatttctatatataaattttttcaactttatttttttaaaaaaaaattatggtgtactgtagtaggaagagaagaaggggaggaggaagggggagaggaagagcgtatagggggaaggacaggtgatcgctaggaggatagggaagcaatcacccgcccactagcaatatcctaatcgatgtatgtattcccccgatttttttttattttttagaccttttaatgctttgattttattaatagactttctaaaagtatttttaagaaataaaccttttggccacgcctgcctggcagtggcagggtggtttggccatgccagctacagtgcgtggcagacaccggctgcgtgtggcgtgagagttatttgggcaccaaaagaaagattcatttcttgaaaatacttttagaaatggtctattaataaaattaaaacattaaaaggtctaaaaataaaaataaaattatattcccccttcacccttttgttcgttattgatgaaatcttagcgtgctgatgtgctaaatttcttaatgctccttgactttctattccgcccatgcccattaccttttcctgttagcgactatttccttaattgtttttagtcttgttagggcatgtacaatggtctttattagcggtctctttttattgtcatgcaagcatatttggtgacgtgaaagagagaggaagaaggaaagagaaagatagttgctacacatgacaacggcatagagtcgactcttaacatttattagaattttttttgttgcattaagtctaataaaggaaagataactagtaagaaagtattttggtacattaatagttagagaccgtattgttttaactattgtaaacgtgatagtctctaattaatgtaattaacgtaccggtctctatctttatacttgcccttataatatttttgatgatctgtttggcaaacatgataagtcaagagcttaccatgtcaatgatttcatctttttttttccctttttgggtagtttgtactgtttggaaagatcttttggcgcgagcattgggatggaacaaactcttgctcacaaacttgaatgggacaaagatcttatcggtatcgataacagatcacttggatcatttcaatttgcgatacggtagctcatggcatttacctatatatggtcttagtgcatttttatatttttgaagaattccatctatttttagataatgtaccaaacttgtttttggaaaacaaaggcgtaagctctgccttagagatacacatcgacggctcacaccgaaaacaccatcctacaagaccaaacttagggcccctttgaaaagcaggataggaaaaatacaggaataggaaaaacgtaggaattgaagttgtatgtttttccaatcctacaggaattgaaaacataggaaatggagagaagagccatttgattacaccacaggatacactcaacaaaggaaagtttcacaagaggtctaacctcttgcttattttcctatggaattgatcataggaatacaatcctatggaagttttcctatcctcttcctatgaatcaaagggctctataggaaaaaatccttaggaaaataaatccttcaaaattcctttgctaatcctccatttcaaagggacccttactctcaaaatgcaaacacggcaagcatagctcaagcttttgcggtcttcagtcttcaccagccagttctgctctcataagcaaaaaccgtgtactagaacacgtggtgataaaacttctttgtgcataattttcatgtcttagctcactattgtattttttaagagtaattcaagcttttagcaagatgtacgtatatagggcatttagtttattgtggttactccatcgatgttgcaacttgtaacataatctccatactggtggtatggatgaatagtgctatgcctgcatgactgcgtcctttgcttacctggttacttcacttacccttttagcacaagcaagaagacaagattacacaagtcttcaacttctagcaatgttgaataaatgctggtcattagtcgcacttgctgcgtcacaagtatatcatgaaggaggcttcaatgcttcaaagggtaccaaaaaatagcttccattgaatgagatcagatttcgattacatacaggcaatcaatgaaaacgctatggccgacgactgctcgccttgatcagcaaaactgcagcatgctaaaatggtatttcccagctgcacaagagctctatttcgctaacaggaaacgacaccacaaggttaactcatctaattctatagtatgtacacggtgacatgggatacctatacacgggatggggctaccaggtctaaatgttagttgccaccactatctacaagcatcgactagaaaacatccagagtcatgcacggcgatcaaatgattctgatgtatcaacaccatgcctgctgacagaaagattgcctttcctgtcacgttaggaagcaatcaagcttatgcggttgcatgtagcgtctgatgaagcccagaatgttcaggttcaagagcagagctgctgcttcatatctcccaggtaccggcatattgctgcagcaaacacctgaaatggttgcgaggtcagttagctgaatccctttatttgcatccgaggcaagctttttgcaaaaactaattccagtttggagccggactaaagcattaaagtagcactgcaatattctcttgcactgatcgagtaggaagcatggaactactcaaatgttttacaaggatcatctacttaccattatctgatcctcttgaacccacagctggaatctgcatcacttgaaccccaaaggagcctgggccagcaacagcaaggcacagctaccagcagcgaacacatctagtatgaatcttgcattaaacagcttctagcttgattggtgcttttgtaaaaactgataaaacaaaaggtgcttcctctccaggatggatggttgtgggcacaattgtgtatccttttggataaggctccaacactaattcacatgatatctcccttgagttaacataatctgttccacccactgattcatgcatgtagatattgtaagcagcacggcagccccgtgtcttgagtatcctcattccaatgtaaaacatagaagagtcatggctagattgatagttccggaaaccatttgtctttctagaaaaaccaacaccctggcaaagcatggaatttgtttatatcaacatcatagtgaaatctccaagtacattaacattcaggatggaatatacctgcgtaagggtaataaatacatgtacaggatacagtgcatcccgtcctgttactctaagccggtactgaggattttgatgccatgagtcataatcttggcaaccacctgcactataaccacgccattggccatggacagagtaacgcatctcgggtggataaacacgacagacatatattgaccgaaagtggatctgaaaatcttgccaagacatccagaataccccattctttgactgcaaaaacaaatatgggtagggtcaaaactgcacacggaaataaagttgggaaaatatattttgtttttgtaggtacaatgccttaagctgaaatcaacaaactggaggggtgacaatcaacacatcggtttttttctcattctattttaaattaaactgtagtgtgctcactcaagagcacagtcaacgagataagcaacagaccaacaattttatcatgctaaaaggaaccagtatttggtgggttcatctattaaatttgacgcagttgtgtatctttctaatcacaattagtggaataccagctgttcaagtacacggtcacagagaagagcaagtacctgtggaacatgcttaagtttgtgcttcattcgctcagtccactcttgtgatgagtctgaccacggaccattccattcaacttcatttgcccacggatttctaatttgcacgagcttatggccatcaacttctcttacctgtaacatacaatataaatttgtctagcgcaaaaagaatgggaactaagtgattgccaaaagatacagacaagtcagagcaaacctgcaaaattgagtaagcatgtccctgaacaatgccacttgatgaaatatgagcatccgagccagaaggacttccagcaccaagaagaaagccctcttgtttaaaatgcaacaactgagaccacaatcttccactagcaagatcaatctgcgcttgggggctccgcatgtcaatctcttcaccagctcctcctgtgagatccactagagcatcttgcacaagcccaccctccaatgcctcataagagccatgaagctttgcataagctttttcaagaatggatacccacagctcattttgctttctactagtagcaaatgccggtttccccggagactcacaggggatccaatcatcaaccaccactgccacccattcaccctagtaatttacagaacattgaaatataagctcagatcaaactggtcaaagatagttcttcacaggacaatctcaagtcttttttgtgttggtgggaaatactccctccttcccaaaatgatcatcatatatgtttgtgcaccaagaccaaggataatttaaatcacatcaatcaagacaccatacacacattctcccacaatgcatgcatcgatcaaaacaccatgccaattacacctagcatgcacacattctcccatgctgcattaattgtattctgataaaatccgcgtctatgcggttatatgatgatcaatttgagaaattttgaattccattacatgatgatcaatttgggaaggagggagtaatccacaaggtctggtgaatatgagctatttatactattatttcacttttatcaacttacctttgagtttcatcgtaaaatttacaagcatatactgcatatgtaagttgtgcattagtgacttgttcactcatggttttcaatgttgtttatgcagggcataatgcacatgtgtaattgtatatattgtgtcattccatttgggaatttccctaaaactcgagcaagataatggtatgcattatgttcttcatggtggtatgccccttactagggtctcgcaatgttagcatttcagaagacgttggcattcttatatgcaccctatggaatatgaatagcaaatctaaagtcatgaatcccatttttcttaattaaagcatataggttgtaagcctatgtataaatatatattagacagctctaacaactgtttatgtatttatgtagtatcaacttgtccaaattaattatttcgaactagcggaatttatccaaactaaaatctgcaagtcaaggtttcactgagcctctaacagcactattaggtagcacacatatccaccatagctctagtaacttgtggctgttgtattatttctgattagaacttctttcccacaatgcagaagaaaatggcttgttgatatatgttgaacacaaagtaacaaagagaatcaacttgcagctcacaaatctgttagtttgcttaaccaattcaactttgatatttaactctgtatgagactaaaatgttaaatctcaccaagatggtgtgctctaccaatatactttaccaaaggaacaacccaagaaaatggaatggaggacagatgggtcagatcattgaatacctggatacagaatctgacagtgtaaatcccttcttcattatactcaggagtgattataacttcagatatacgggccatctctgtcaaaactgcaacagcgctcaagaaccaacagtcgcccaaccgaccctgaaaagaacaatcggacaaattggattgtgtgtcatgtataggaagatggaaatgtataaagttgaaattctagtataggggaagaccccacatcagcacaaagcaaaatctgcgtacctgacacacatctgacgaattcacagaaccagaaaataagcacggttgtgaactgatagatacctccttcgcaatatcagaaggcctcatccactcagagacaa

SEQ ID NO: 9857 - DNA, 2588 bp, Oryza sativa
gcagaggagaagctcatttttcacaagaggatgatgctaacctcaacacattaagtgaagacccaaacaaaagtaacctccccagtatctccatcattcatgaagctgtaggaccattagagtcaagagatcagaataaaactgctgccttccccagtacttctggtgtccaggacactggagaaccaaatagtgctttacacaatgtcagacatgaattggattcattcaagagttctcggcagtgttctgcatatatagaagcaaaaggaaggcaatgtggtaggtgggcaaacgatggtgatatttactgttgtgtgcatcaaagtatgcattttgctgaccattcgtctagggaagataagtcacttactgttgaaactccactgtgtggggggatgactaatcttggtagaaagtgcaagcatcgagcccagcatggttttatcttttgtaaaaagcaccgcttccaaacaaatccagatgcaatgagctcagatagtttgttaagttcgtctgagggccgtaagtgggaagagtcacagaaaagcgtggagaagatgtcttcctcaaatgcaacttgtagtgtaggctcagagcaggcaaataatttccaggttgctgtgcacatgaaagtgacaccaaccatggctgttgagacaactagtgataaagttaacgtgtcagagaacgctgatctctgctaccccatgtcaacttccatggaaaactctaacttagatgcttctatttgcattggaattcgctctcatgacaatattgctgaatgccaggattatgccgtacgacacacactttactgtgagaggcacataccgaagttccttaaacgtgccagaaatggaaaaagtcgactcatctctaaagatgtctttatcaatcttttgaagtgttgcacgtcaaggaaagaaaaactgtgcttacatcaggcatgtgagtttctttattggttcttgagaaacaatctttctcaccaacgcccgggtcttggtagtgaccatatgccccagatattagctgaagtgtcaaaaaatcctgatgttggagaatttttgttaaaactgatctctagtgagagagaaaagctttcacatgtttggggctttggtacagatagctctaatcaaatgcattctgagaaccaagatggatcagtgatggtgttacgtgaagatgggacacatccttcacctggtctgaagtgcaaaatatgttctcaggagttctctgatgatcaaggacttggattacactggacagaggttcacaaaaaagaagtgcggtggcttttcagaggctattcttgtgctgtatgcatggactcatttaccaacagaagagttctcgaaaggcacgtgcaggaaaaacatggcgctcagtatctccaatattcgacactcttacgttgtatatcgtgcaacagcaactttttgaacacagatcttttatggcagcacattgtttcagatcattctcgagatttcagccttctggatcatgtccctcgacgacctaggggtcaatctatcaaaagaacagaaagggcaagtgatgagctcctttatgataaccataaccttggtaaggatgatggtttacagaagttcacctgcagattatgtgggatgatgtttgatcttttgccagatcttggccaccaccatcaagttgctcatacaaactcaggtacagtcagtgatatcccttcaggacgtgaaaagtatcagtttaaccgtggtcggcactattattcagccttcaagaaaagtttaagaccatccggctcattgaagaagaggactagttctggagttgagaaacattttaaggctcaaagcttggatctatctatggatacatcacacattgtggaatctgagaccaccacccttggtaggttactggatttccaatgctcagacgtggcattgactttattttcaaagattcaaaagacaagaccccacccaagcaaccttgatattctgtctattgcccgttctgtttgctgtaagacaagccttcgtgctgcattgaaagctaaatatggaatcttgcctgataacatatttgtgaaagctgcaaagctttgtagtgatgttggcatccaaattgattggcatcaagaagaattcttttgccctaaaggttgcaagtccaggtctagttctaattccttgctccctttacagccattgataattatattcgatttttaaaatctcaatgataataaaaaggagaagcagcaggcacgatgtataggagtatagttgcagagccgccaacggttggcgggatttctagaaaataaaaaagaattccaacgatacttatgttcgatttttcgaatcccaatgacaataaagagtaggcgtcggatgggtcgtagaggaatatagtggcatcgtttgacgtgacttctcaaaattataaaaaataaaacccaacaagacaattaatttttaaaaactacagggtccaatttttaaagatacgaaacttctaaaaagtaaaaaaacaatgataatcatgttcgattttaaaatcttaatgaaaataaaaaa

SEQ ID NO: 9858 - DNA, 25745 bp, Oryza sativa
cctggtggcatcgactgtggtatatggcttataattctttcactcagtaaagtcgtcctccaaccacgatgccacatttttaacaattttatccttttaaaatttataagcatgtctctataaaatttattctagacataacccaaagctcggcgtcgacgatccttgtgccaagttttggcgctaggttagggccaatggtgacccttggcatggagctagcatagatgcgggtcgacattagtctcattgacaccaacatcccacaccttcggtctcacacatactcccgcttatgaaacaaacacttcctagggtttcattctgaactctaaatccaataaaaatgaaaatagattgaaataagtggagaggataccttgctttgtcaatttcactataacattcaatgctacatcaataggatgtgtgaatagactggttgaggagagagggaatttgtcccatctcgaaggtaaagttccatcccaatctcaaacttcatccaataaatagaaaataattttgaaaaccaattttgctacaaaatcaattgataaaataaccagatttgaagagagagaggagtcagtcccttctcggaggtcagcaccaacgacgttgtctcaattggatagaaataaaaaaaacatacaaattgaaatgataatttagttttgtgccgaccttagcgtcaaagagacgggtgccatgcaaatgtgtagggcggtattgcggccacgatttaggtgccaagacgttttcgggcaatagggtcctaggcaccgtgctatcttttttttatatttttttataagggcttagttgtaaaaatacagcctttttgccaaggctaagggtgtcttcggaactatatgttgtcaacttctactcccttgtttttcttaagcacatgcttctcaaacagtacggtgtgctttttactagaaaaaatataggaaagttattgttttaaaaagtcatattaatccactattaagttataatagcatttaattaataatgtgctaatgagttaattatcctattttacgtgcgtagggaagaagttcacaaccttctatccgaacgtttcgaacgttttggagccagcacaacttctcttgttctctgtgacctttgtgtgttttggacctttggtactactgcacagtgcacattttagcagaccccatctctcaaaagtaacagcacaaaaccttatagagatattggagatcgaccatgaatgacactaacgaaggtatggcaacctaacgaagaagcatattctacccttgtagagtgctgattgcttgaaattaatatatcgaacactgcactaatccaaaactagcgtatacatgatactaaaattctgggactgatgaaggatcacctgaactttcgaaacttccatccgtcatggtcatgcaaaggcaaaaacagaataaatgaacaaaataagacgaacaatgcattatcagcataagaacagacatacatcggtatgctttctcgttcgacaagtacaaattttaaaggtatccgggtggaatgtttcaaaagtttttgccatttttcacaaagtgcacagattacacgtaggctaccaacggtgataaatacaagaacaagtgtagatgcgatcattgggcgtggagaaaatcaaataagtcattaaggtaatatatcttataatgtagcaacaattacttcccattacaatgtcaaacattataatcgctaatattcagttacttgtataacagttcaaagacaattagtaaatcagtaaacttagtaaaacaaaagaggcaaacacagacaatctatctcctatatccacataaagaaaaaccaaaaacctttctaagttggtataagagttccactctctgcacaaaggaccaaacacgtctgcaacagctaatagaaaaccatcagtttaactgctaaatattgtataattctacagttgggacatttagtagaaagcttacatatcaacttgagtcaaaatactgttgctcaatcaggtaacgaaactggggtttatttagttctttttacaatgacgccactgtagtcaaagaaatccatgtcagcaccaattacccttcattgcatatatagcagaataaatgcagaaagcacaactacttcatcaaaactttaataacttggattcatctgagagcagccaatactatgcattgtgaagtatgattaatcatggtaccaacataatgttacttgtggttcgatgtcgtatccaaaacagccaagatttatcatagaaagatctctgaaggtcatttattcttttataaataatagtgttacttcaacctttatgtgtctagtgtatctactgatcgatttgtcgcaatgagcaaatgcagaaacagtctctacttaataaaaacatcatcacatatttaatagaaacaattgcacatttccgctccccaaacatccaataatcaaatttgcatgaactatgtggcaagcatggaactatgaacctatgacataatcatgctaaaaaaccaaatatcatgttctgatgtcatatccgagacatggaaaaaaaaattatctggcctcctggagatatctcaggaaccaatcatcggcttacattatgctacttccacttcacagctttgttataaaatctgcagatggcaagtgcatgaagaaacaaccacgagtttatctttaatttcatatatggtaagaggaggaaccacatattgtgcatgaagttacaaaggaacgatgcaaattacctgatatgatgtttcaatttcacatgtatactgcatcaggaattgcacaagtaatatttagcattgggcaattgttttatgctatcacactgaatacacaatagctgattcagagatgcaaatgactcaaccatttgttgagacaagactgaccccctatgctgatccgaatattttctgagacgagtaaaaacaaggaaaaagcttcttgggctaaagaaaggtatgcacatgtgcaaaacacctatcaatcacacataaacagaaaccaatgcaattagcaatcacacggtggattgagctggctacatacagatacatatacaggtttatctggagcagcatcacccatgacacaccccagttccccagaagtacacagacaggactaacaggcagcagaacactattctgaaacaaaaccagatgaggtgcctagttcaatcaggaaaagtgtttgtcacactcagaatgaatgatcacctccatatagtgggtggcacacataacagcttgctaatctcagaaaggacataataccagggtttttttaaaaacaaaatgtctacaaggccgcttacgtatacaaggaacaggtactccaaccttgtaccgcttaagacacataagcggtcgattataccgcataagcagccagttatgctacataagcactacaaggtggggtaaccgaacgaaaccgcttaccgctttttaaaacattgcataatactctacaatcatttcacactagcatgacagacaatataatgaatgaagcatctggggctgcaaaatctagattaccactatgttcacacttttcgttggcaatagcataagccagcagcttctagagaaacactgtttttctactaaaattttcttatcaatagcacacgcaagcagcttcaaggggaacaagtgcacccacaaaaaagtactacatattagctgagcagcagtaattgtcactagaaactaacgcaagcacacaggtaggctgagatgagtactacaggtgcagataatggtattagaattgaaaattttgcatcattcaggacaagattgggaagcacaaaacataattcacagcatattttagtagcggaaccagtcgggaacgtcacgtcgccttcttcttcttcttctactcggtcatggcggccccttcccccttctcctccagctccacccccttgccctcgccctcctccaccggggccgccgccgcggcgggctcctcgacggccctgtccgccggggcagcggagttctcctcgtcggggtcgcgcgcggggtcggtgttgcgggtgagcgcgccgcggaggcggtcgaggaagggcttgaacgcggactccatggtgaaccaggcgaggacgaggccgccggtcacgaccaccgccgtcttcagcgcgttgccctctcgctgccctcctcctcctcctctcgccatggctgctcgtggattggattgcgatgggacgggtggtgtgggatgctctccgcgctcgaggtttgggggggttttgttgtgagttggggaaggttttttttttttttttttgtcttgcacgaaagggaaaggcgagacgaggaagaagaaagaaagcgacgcgaggaaggcacgtaatttcgcggaaacgtgaggggcaaaacggaaaaaagtttagcacgggaccaacgtggcacaccgctaccgcgatcaagacaaaaaaccgtcgaaacgggacagcgacgcagcgagcaacgtgacgcgagagacaagaactttttttccaaaaaaaaaaaagaacggaacgggggatatggaacaacgtgaaaggaaaagagaaaaacaaaaaaggaagtgtcatttcccgacttgggctgggttgggttgggttgggccccagctttcgtgcacgatccattttggaagccaggagattggaaattttgtaaccagttgggcctggtttttatgggccaaagtccgttcctttctccatcgaaggctggaggaatgcacgagcaaaaagtacagcatcgcctaaatgaaaactgtgccactctcaccgaaccactaattttcttgtgcttcacaagaggacactttcatgatgtaatactaacacacatggtgacagattccgacctcctgcctacctgttcagtcgtgacacctcacctgtaatctccctttttttgtgagattaattgttagattcaccagctattcttgatcttcatacaccaaacacatgtaactactcaaagatgctaaaatgatcatggtaaagagaaagatggtagctcattacaatgagaactcagatctgagctgaaactctgcaagatcatcccaagaacaaataaacaagcaccatatttcattagctttttatttactgcaggaggcaaaagcataaggaatttgaccggagacatttacatcgcccaacgaactccaaaaagaattgaaagaacgaacatacattcggcctctacaggacactagatctacacaaaaaacagatcacgtagtgagctacaatttttttttcatcattcatcaaatttaccgtgtaattttacatgtaatcgtagttgcatcttcatcaccatatattatatcaatctccctgagcttcttcttcatttggatcccatggagacggcgaccaagaaaaggtcatgtttctcactggaggaacatgtgagaagctctcagtacgccatggcggtttgcccgctgtggaagctctgggtgtagttgaacgtggccgccggcttgcactgggccgacgccgacgccgccgccgccgccctgtgcgtggtgggcagcgagtgcgaggtgacgagccgccggacgccggagcgcatcttgtagaggatgtggccccagctgcccctgctgccgcggccgagggcggccacctcctcctcgttcatctcgaggtcggtggcgaacccgggcttcttggacatgagccagccgacgccccagtcccaccaccgcttcagcgggccgccggcgaacgcgcccagcgacggcgccgacttggaccgccggaacgcccactccgccgacgcggaggagatgggctggatcttgtcggagaaggaggacagcctcttcctcagccccatcaggtggctctcctttccacccccaccgccaccgccgccgccgccgccctggaacgtcggcagctcgtccttgagcggccttgtcggcaagaacctcgccttctggatgttctccaggatggtcgccatgtcccaagaaagagaagatgaatggaggaagaggagaaggtcaggtggcaatggcctcctacctcttcttctccagatctctccttctcctcttcttgagaatgtgatggcgcaatgtttgtcttcacagctatggcctggacaggctggttttattcatgcaagaggggtgggtggggccacgacgaggtgtgtgtagttgaaagctttgtgctgtgcagttgcgagcatgtttacagagaggcgaagcgccgaagccggcgatgtgaactgaacattttggctgttttgtttttgttttcttttttttttaggcagctcagataaactggagccgtgttggcgaaatgatgggtgggtggcagctgccggtgcggtggcgctgccaccgtgccatgtgtggggtggattgccgatttgctgggtgctctggggctttgacatccatgatgaattccatccaccatgtgggctgtggcgtcttgcctgcctgcccatctatttgactctcttgcaaattgcaatatgttgggttgattctggccaaatcgatgcaaagcttcccaatgtggtgaaagagcactcaatgatgtagtgtgtgtcctaggatacattatcaaacagcattgatgctcttcataatctacattgaaataccttaaattgtcttttagaaaacctgaaactgaaggttttcagtccttgtctatcccattgcgcagtttttatcataagcttcctactctgattcttcttggagggtcacagtgtgatatacctttgtgctcggtgtttttaactgtgttcagtgttcataaggaggcaaatgtttccatttgttcttgctagtttcactggagccttttgattatcactaattttcagaaaggaaagggtgttctgtgtttggttagcatctaatactcaaacaaacgggagaggcagctgccgtgtcaccaaaagcaaaagggtatatatcacatgagaacatgggggaaggaatcatccaatgaaacatttgctccctccctcttcctaccgaagctgtttgtcatcttccggttgcacctagacttttcaaggccttttcagcaattggactctgccttttctacgcaggaaacaatcaaacatgccagccattgcaaccatcacaaacatcattctcatcagtacaatgcaaaaactgaaactgcatgcctacatttctcatcagcacaaatgcaagcgtgtgtcacgttttgttcctacgatatgtttctgcccaattctttccaagatcagaggactttgaccttacttacaccatatattccttgcggcaacgtgcaatcatcccattcagtcaaaccgaaaaatcaatcgacagaaaaattatctcatacgccaattcattcgacagaaaaatcatctcatacagtcaaaccgaagggacctgaaatgtgatctggaagaagcacgcgagccacacacaaatcgacggattgcgcggctgcagttcacaagtcgttcacaagtccaactccgataataacactcgggcctcacctcacctattcttcttcttttcattcggttgcttcctctcgccgccgacactggcttttattaaatgaagggcaaaggttggttgcgaggttggtagaagaatcagacgagtggaggggcacaacacagctgcaagcctgcaacaactcatttttctcatggaagcagtttaactgacctgtcgtcactctgccatcaggctgtaatatgcttgtagttcttgggacttccagttcagaggtaggtagatagctgcagagaaggaacaaagaccaatccaagagtactccagttctgcattggcaaaagacagggtttgtgctgtatatgtacgtaactgacaggcaagagaagctggcttttgttcagctttccaattattgatttatagttcagtttcaaagcataggaggtacagtatggtatagcctccaaacatatgccaattgtaacaatgacaacttacaactccattatgttcaattgttctctccagtcccaaaacaaatgccatctaagctaatggtacaagctgcaactctaacaatgtgctgtgtggtttggcttcatgcaagatcgaaaaccatggctgaatacctactatcatagaagaccatgggttctgcacactctgcttctcaagactgacagaagtcacatatgactcagaaaaatgaagttccacagcagttaaaagtgcatatgctgaggcatttcagctagaaattactgttgaagatttcctgacaaagtgaagggaataacagcacaaatctactctctcattctcttaagcagataccgaagagaaaagaacccgagcatgaatgtttgccaaaaccaacctgtagcattcctcgggtcatacttctttgccaagaaccaagcataaacagcttcaccaacgtgcaatgcagttgctatcacaaagactaaccgaatcaccaactttgatcggaaaacaaataaatggaggtcaagcacccatttcaatggaccgacgggtggaaggtaagcagcagaaaacaatgccagcatgccaattgttacaaacagccaaggaaatatggttgggccatctagttcttttctcttcctctcctgccagtaggaaatagttgcagccaatccttctcgcgggctcaccataggtacatagccgatttcctctctagctttcaaatatgaaaagtagtgtgtaacacccacctgtcacagcgaactatcaacattagcttcgactatgggtttgacatcatgtttattcccactcagctataaaaatagaattgcaattatgtaattctacatttctacttgcctagtcaagaaattactaaagatcaacagaaaatgattaatttatatataaaaaaggataaaatagctgtaagcaatactgcacatccatcattacatcttagcactatattacgcttaacaagattcaaactcctaccaaacaaattagatcttattacccctcactcatcatgattaacaacagagttgccgtcacatgagaagatagtaacagtgtaaaggcatatttccataatggactacattaggtaaagtcattggaacatgataaataagccgaccttgtatacttcagcaggaaggagaagaggctgaggaatccatttactatccaaccatggatagagtagtgtatacatgaacacaaaaaatcttgagatggcaagagcaactgaggtatccattctaactcgtggaactgtgtaatccaaactttgaaatagaggactgagaaattcaaaagtattgacaggcgatcctgcaaacaaccaatagtttcttgttaagaaaatgcaacatttctttcaaattacaaacaacaaacattaagagcaattctggtaaggaatataagtgtaattgctcaagttgctaaaggagtaatggttcagtattgaatgtaaatatattcaacagagcatccagtagactcattacgtatgatctgtaagcaataaaaatttcaactccctctaaaagaaaaaaggtttcaacctcagaataagcaaaacaaataaatagctaaaacgagctatgcagtaaatcattttgaatagatatcctcaacaaagacaccaatgcagaacacaagagtgtaaactactgtttttttatggtagcattcagcttagtagtctagtgttcaacagttcagatttatcaatatgacaagacaaaaataaaaatggctgcactcctattcaaaagatggaaataaaattcagaacatagtgccatggtatcagaaaaggttaaccagtaatatagttgccctacaggctaactgcacttaccatcacatatgaaatatgcttgaccagcagctacaggaattcccttcctgtcaggaatatcatctaaaagtcccatgcttgccaatatcagtgcaagaacaagattatccacatagacccaatctgacttcacatttggatccccaatcttgaagaatgctaatcccaacttcgcaagggatagtatccttggaagatgccgctcttcacctggaccatagatagcggcgggacgtattgagcatgtataaagacgactgcttttatcactcctgtataaaaacatcaaatcagtaagacagcctgtatattaccaatgttcaacttaagtcccaagccaaaatgaaataattggtggtggatcttgacacatggaaagtagaaaatacgctcatcataggtgaaaacaacacatttgaagatattatatgaagggtatcggccgacccggcaaaattatatgaagggtatgtaagtggcagatatacatggcaatgaggcagacataagaatcatggcaaaaatggctcaacttacttagtttgccggccattactcttcagcaccaactgttcagcaattgatttgctacgcgcataggcatcaacatggtcttcaacagggaaataaggcagcgcctcgttcccattgacaatcggctctcctccaaaaaccacattatacgtgcttacatacacgagccttctaacaccatgctcgtggcaagcgtccagcacattgcatgtaccatttatattgacctcgtcggctcgcccagcctgtaccatttccttccctgacatgccatacgaagcgagatggaaaacacagtccacaccgcgcaaagccttccccacatcttccttctttctaacatcccctgcaacacaggttcaccgatcaggtatttgataacttaattcgtgcatcggaaatgcagagccgactgcaatggacacacaagttaacaagctaaccaggcaattatgcgcagtacatcatgggtattgttggtgttactaacttactgtcactgtgttgagaaaacaaaattcaagattccctaactactccaagagccaaaacatatgtactagctaatagcacagaggcagtagtttactccaatttcacactagttagcaacaaatccggaggtagaactatagccaagcaaagcagcgcagcgctagcgctccagtgcgtcttacttctaagaaaaaactcagtgaccgcgtcagttacagtgaaggaaaagccaaaaccactgtagtgaggatgaactcgagatggcggaccttggaagaagcggacgccggcgccgagcagctggtcggaccagggggaggaggcgcggaggtcgagggagcggacctcccgggcgccgcggcggagcagctcgaggcacagtgcggagccgacgaagccctggccgcccgtcaccgcgaaccgcacgccctcgatcccctcgttctcgctcagatgcatctctgactctccccccaagccgccgacgccgagatgcgctcggtggcggagaaaacgagggcgagtggaacagtatggctgtatgggtcgccggcgacggcgaccgcgctttactacctgtccgggtggagatcgtcggatgggaactcgaaaggcctatctctcatgggctcatgggccatggcccacgcggaatgttttttctaaaaaaaaatataaacaaccaacctgtttgtagaactaggcaagaattattttaagagctattttttagataagaaaataaccctctaaaaaaatagccctaagttgtttggattcaagggttgcttttatgtatcttcctatggagagagatagagagaaaagacgttttttcagtgagccccacccgaaataggctcaattagcaccccttgggtagaataattttttttgagtgggttatttccaaatagctcacccttttggatctttttggctatttggactattttttagggagggctaaaaaatatcccttggatccaaacagggccattgccactgtcttttaacatacgacgttattaacttttatgacattcgtcttatttaaaatttttatgtaaatattaagatatttttgtcatgcttaaaaaatatttaataataaatcaagttttaaataagatgaatgtttaaactatcttaaaatattaacagtattatatgtttaaaaaaaggaggaagtaaattggaacgtatcatggctttcatatcagaaaatttcattgcaaatgattgcatgattgcgtcactgtagcagacgctggagaaaagtagtggtgtggataagattttttaaataaaaattataaacaagaactggatgtgatttttaaaaagcatgtctgggaaaatgaatagacgagaaatgtgaaaagtggctgacaattttttttgattgacctgaggaggagaaaagagggaaaataaaatgtgtaaaatataggctgacaatttttttattgacctgaggaggagaaaagagggaaaataaaatgtgaaaaatatacggaagagaatagacgagaaatgtctgctgagaagcaaaaaaaataaaagaatatatcaaggtcccaccgagatttgaactcgggttactggattcagagtccaatgtcctgaccactagaccatgggaccattttgcttaaaaacccaagctgtcattatataataaaccattgctgtgctgcttaagagctccactccgaagcatccaggaattgcacagcgttgcttaggccggttctttcttgtcagagacaaatggattacaagatcgcctacaaaactagctatgaaccccagccagtgacgtttttggttgggtaagaagcaatcttgtatatgtcacagactccctccggcttgccggtgcccctcctgatcctgaaatacccttgctctccccagttcttgccccacgagttcttcatgatgatgtagtcctggccgtagtacgagccgtagcccacggccgtcagtgcatgatccggttgaatgccacattccccatcaaagatcccctgcatccagtattcagatacacccattttgtcagtttaatgtttttgtgctgatctgtactgtatcatggtgaatgaagattgaagaacagctgataattttgtttacccctttgtagaactgaaagtctctgctcccagctgctatccccacactgacaggctgatgagccagtgccttcagtaggcttgtctcgctgttcgccgggacatcctcgtagccggttatggtgatgactttggaatgaggctaaccaccagtcatcagttcatcacagcagataaattcaactgttagagatcctgctagatcactacatgtgtttacagctgaattgcctctgaagaagaagtggttttcatgtttctacctgcttttctctgcagtagccttcttccatgaggtatgggtagtcttcctctgtgtagatcccctggttccccattatgtatgcgaaggcgaagtccatcagcccacctcgacagccatgattgaaggtgttgtcgcagtccatcagttcctgctctgatagtgataccaacttgccggtcacaatctggtttatcccctcaacagctgccaccgttgaaaaagcccagcaacttcctgcaagagaccgttttctcttacagcattttcatggaacaaattgcatcatatcatacactatttcagatagtgatttagtattaatatgctgaaacagactgtgtgcactctcagtttcaggcattgagtatcgatgcgatgaaatagattgtgcacattttcaggcattcagcattaatatgctgaaattgattgtgtgcagggattcagtatcaccgtgctgaaataaattgtgtgcattttcaggcattcggcctcaatatgctgaatagatcgtgtgcattttcagggattcagtatcactatgctaaatagatagtgtgcatttttcagacattgagcttaccacattctccttggttcttgaccggtgtcactgctcccttcttcctccagtccactgcccagggcaagttaacggcgttcgcgtacctgaatgttgttgaaccatgtggctgagcatcccttcttgctaaccctggcttcagtcccaggtaactggccttgaattcttcatgtgcaatgtcagcaaaatgatttaagccgagccaatagctgccatttctcctgttcgtctccacaatgtgcctcaggtttcgcttgaagatctcatacctcttgaccttctcctttgggcttgcatagatcttgctatgttttactgaccatgatgtgaagagaccaacaagcttatttggcaatgcaagatcctcctgcgagtatccgacaacggaaggatcatggtgactagcagtggcagaacatgccacaaagcctagcaacaagaagagcatggagagcttggagtccatggcaagaaggctattgtttcctgccatggcatgcctagaattcatgaacactctttataatgaccagccatgtttcttgcaagtaattcactacacctgaaatctgaatacctgacaagggcccttctggctcaagctgtgaaggagtggtactagtaccttgctttatgaagaagctgcagttgcaggtatacttttgctctatagtttattcagaaaattgcttgatgtattactttattgttctattgatgacctcttatcatgtttaaattttgatttatgttaaaatagaagtttcttatgcttgcagccttgcaaacctctgaattggagataacttgctcaaccatgcgaagcaggtgcacaggcagcagtggatttttggaaggatggacaagtatcctttgcttatctgctcaagtcatcaccaaacagaagtacaccaaactattctattaccagatcaaccaaccattagtattttcccagttcgagcttggtgtacgtgctcataggaatgcagaattggctgggatgagatatctaaaagaatatagagaaagagaaatgtcttgaaaaaaagaagcaccatgggaaagaaagaactaaaaaatagacgcggctttgcctatgaaatactccatccgtttcatattgatcatcatttaacacaaattgaattttttaaattgatcatcatgttatcatagccccttcgtttgacgtgtaatattattgcatttaagcatgaaaattgagtatgcatgcatgtatgtaggaattcgaggtagtaaagctatcgtttcttagagcaagtttaatagtatagtcaaccactgacttcaaatcatctatagtcaatttagtaggaaattcatatactcctataaacatcactacacaatttatacttggtcgcacctgtcatacatacatgtatcttggagtctgtgctacagctggctacaaatctatagcccactgctcttctctcttctgttttatctcatcgaaatgtgtttataattggacctgctcttatgtatggggcctaagaggagttaaagtgtgcatgtttcttgatttttccctaccacatactcacattaaatgaaatataggaaagttaatacttttttttgtcttggtgaaaaagttatatggtaatcaatatggaacggagggagtaaatgatatggtatgataagtacacttaatttctttatctatttaatgcctgaaattatggaaactatgcccttttattcatatattaatttaaagcagcgagacattgaattcatagacataagttggaagtcgaatatatgcgcacaaattccaaattccaacgaaaccaaagtaatgaaactacttactcccttcttctaaaagtctaaaacttattctattctttggtttttccaaaagtttaagtcctatttatagtcattatgttttaaattaaattattgatcggaacccaataaaccattttattacttattggttacatgcttattggttttgtcacattgtaaataaattaattactccttggtcttggtgccaaaagaaataattcctccatcccaaaataaacttaattcctgggtttttgtgtctaacgtttgatcatccgtcttatttgaaaaaaaatatgaaaaattttaaaaagataagtcatgcataaagtattattcatattttatcatctaacaataataaaaaatagtaatcataaaaaatatttcatataagacggacggtcaaatgttgggcacgaaaacccaagaattgagtccttttggaatggagggagtaggtcttagacttttggatggagggagtattttcattttatctcctggcggagctaaaaagattttttgagcccaagcaaactatacttctagtatttattatataaatttcatcatcaattcattcaataacatataaatttaatggagtttttgtcggtgagtttgcgcggccgcctgcgatagccaggtgtggcttcacccctgcctccacatgtctgtaaaaatcaagaaaatccttttttaaaaaataattttatcttcttattctttaaacataacgttctaaaagtgcataacattaaaaaattctatttgcacaataaagaagagtaaggaataaattatttgtttgaaaatttggaattgcgttgagctcaagctaaagcaaaagatactggtacctccttattctcttctactacttaattatatcctggatactccctaaaaaaattatatcctggataaatgattgcaaagaggctttatctgcccattgcaacttgtatgtgcagccgaactgtggtccgcatcgtttgcttatttcctaataagccaaaacggcttattagaaaataaaaataaatttgtaggtaaaacttttataaatgtattcttggtgacttaaaagccaatgttgaaaaagaaactacgttgaaaatatctcaaaattaagcttgaaaattcaaaatttagttttttctttagctgattaggccatccgatgggagcctgtaagtgtcaactgagagcacaatcaaatgatataataagatctttagtttttctcccccacactatctgaatgtaatactcactgttttttcatttagatggcaacgtcatgcaaaaaatcagagccgtccgtctgtacattgatctagccgttcgtacgatgtcttcagttgcaggcttgcagctaaataaagtcatatatatatatatatatatatatatatatatatatatatatatatatatatatatatatatatatatatatatatatatatatatatatttgtccttcccagtccccagcccccgttcctagtcgtcgacgactccgctgctctccagtctccattcctcaatctgctccttgctcctcagcgtctccatcttcgccacggtgccgctgcgacaacggacagtatatggcatcctttgcaggaagttcgatggcgcctgtgtctaaaagatcgaagtagcgccgtcaacatgagcgaggagaagtctgcgatgcgctccctgtcctccacctcctgcaatccctcctgctcctcgggccgtcgacgggtggttcgccgcagcgtcatagccgcgacgtgcaggtgacagaggatccggcgcgacgccaccacttacccgtgcacgccgcctcctctcctccgctagctagcgccccctcccttctcctgatccggcctccgggtcgacggccaccaccgctactcttctcttcattgggctcaatggatcttgccgaagtttgtatcgtcgacggctatcgcgtgcttgaggtgactcctgcaacatggcgacaaccccgcgtgtcaaggaagggcagcagcatggcggcggggagcgcaggggagggcaaggtggccgggtggtggtgaagaagacgagcccgcgccttgagggaggacatgagtgggtggtccgctgcggcacgcgggtggcggaggatccggtgggcggcgaggcgtgcatcgggaggagggatgggtggattaagggtcgagcgcttttgccagaaaaaatcaagcttcgttggtccatcgcagtgaactttcggagagcaaggagacacatggcagattttcggagatgagaagcttaatttataggacgccacatggcccaatctctaaccagggatagagccctgatatcggtattagagatgagcattatagaaacactcggaatgtcacctcatgtgactaccccatacttaggcattttttacgtttttaatccctgtgaatacgtcttaacctcaaccgaataaatagtattttaaagatatcactatgcgttgtttaaaaaacaacactatgctgatcaattaaggttttggttcaaatggatttttttgcgtattattgagggagattatatactatattaacaagataaattaatactccctccttctatttatatatatgatgttttttagttaaaaatgaactaaccaacttcatatataagtggaaggatggagtaatttgagaaataaaatttagaaataacctagagcaagaggtacgaacaaaacaataaaagatttgttttttgagaatttgtatttgtataagcatggagaatatattgatatttgtaaaagcatggagaaaataatcattggcaatttttttaaagaaaaagtgaaaagaacagggcctagactcaggtttttccatcgtcacggacaatagaaaatcttggcttattcctagcactaggttagttttaacccaatatattaattaattccaaactaaaagtgatacaatgttttatccttaaggcccacttaaattatcctctgaattattactacatattatctgcctgattatgtgaaaaataaacttaacaggtggtatgaaacaagtcgactaggcattacagtagaggaaagtattttgaaaaaaaaacatataccaagtaatatgtgtaataatttgatgaagtggcaaaaagaaagaagacattgtcagggttatggataccacatacctaatagtagttgactaaatctcagcagtatccaccacataccatgtcctatacggaaacaacctgcggatataggaggagtttcggataaggaaagacaaccagagttctatatggaaacgacaagaactactcggattgtatccatattggtttccctagttctacttggacaagaggacacctatgggtataaatacaagaccccctaggaggagaggggacgccacaaagccataagccaatacaagccaacatacaccaagataagacgccggatatcgacttcagggataagcacggctaggatactgtcaggagagacgaaagcgctatctctgatctcgccgggtacggattcgaggaggaagactaacctgttgtcgaccacgagttagaccttcagatcaccatgccaacaacagttagataggctaccccaaatattgtactggtgtgattatggtgaataagagcaataccggcttcggccaacaagatgtagggttattgcctgataattcaggggcccgaacctgtataaaaatccttgtctccgtctcttttacctcagtctcgcgtatatcctaataccaacgatcctcatactatgcaaataccggaatcgcgacatcaaacgtcgacagacatataaaagtggtactcaacaatatttacacattcaaaaaggagtgtaacttaggctgtgtttagttcgtgtgacaaaatttttaaagtatatggacatacatttgaagtattaaacataaactaataataaaacaaattacagattccgcctataaactacgagacgaatctattaaacctaattaattcgttattagtaaatgtttactgtaacaccacattgtcaaatcataacgcaattaagctcaaaagatacgtctcgcgatttacatacaaactgtgtaattgattttttccgtccacatttaatgtttcatgcatgtgtctaaacatttgatatgatgaaaaagttaaaaaatttaaagaaaaaagttcgaatctaaacgataatattataggctaaaagttagcctgcgcgccaacgggagcgctcattttctagtatactaatctcaagctggccgttgtgccagaatttgattggtccacgtggcttaatcaattgcgaatgaattggtgaattcgaggggtcgttccttgagaaagaaaacgaaaacctctagacaagcgtaaccaaattctccaacattacacaagcgtaaagagaaaaaaaaaaaaaaagctccgagcacttagttgggcctagctagcccagtcgctcacctggacctgcccactcggtgcccctcactatgttgatgtatgcaagtgacgcgttgccaattcatctcctcctctcctcccttcctccttcccttcttctcttcctaatatagtctacagtataccataaaaaattttaaaaaacaaaaaattagaaaaatttatgtatagaaatactatatataaaaaaattaaattcaaattcaaatttaaatcaggtatataaacttttaacttataaactttgggtctataaactttaggtgtataaactttagatgtacagaaatactatatatatagaaaacatttgaattcaaattcaaattttaattagatataattcaaatttaaattttaatcgggtatataaactttaggtctataaactttaggtctataaactttaggtgtataaactttagatgtatagaaatactatatatgaaaaatatttgaattcaaattcaaatttgaatcagatatataaacttttgacttataaacttttagtctctaaactttagatgtgtaaacttgaggtgtataaatttactaaaataggaaagtaatgcggtgtaaaaaaaagaaaccaagtagagagaggggggggagaatctcgcccagtagcatttctgcctcaacagttgcgtgcgtgaacaaggaaaaggaattatgaggaaaacgaaaaaggaggaaaaaaattaaatacaagaaagaaagaagtaaaaatattttatataaattatatactatggcttgaatcggaaattgaggcagctaccctaacttcttcttcttctttttttcagggaagctaccctaaccaaatcgatatatttctggaaattaaagacaacaaaaagaatgagaggaacaatgcgaacttatatcataatttgttgtcacgataaccatgttttaaaatatgcatttttcacaaatacactacacatttgataatctctactaatatagaaagtacgaattcattaaacacctctctttcctaaccctcagatttagggcattcaacccatagtgtccataagcagcaatgtctatggtgccatatcaataagacatcacaatagaaactatactctacaacccatggtttcttaaagtgggctattaataaatacatcatttctctcctctacccacggattgccatgcatttggcactgactttccccgccctttttcgtaacaactccaaataaagatggcaccaaaatgatagttaccgccatagacaaggattcatttgtgaatgataaataaaagttacccatatcaagaccaaataatggatcaatgaaaaattgatccaaggggcttgaaattattggtccgccgcttccagggataactcatatttattcttcatctattataaagtcactattcttttccaatacaaaacttgatagtgtctagtgcataggttctcatgttgaagctgtgtcttgcatgagatccagtttcttcctctcttcactctctcttaattaatatagtgccacataagataaaagtcctacatggcaatatagttaatgccatagacaccatcctaaatggagggttaggaccgcccttattcatccaacgaatttatggctgtgtttagaacttcagctcccaacccctctctcgcgcacgcttttaaactgttaaacggtgtattttttaaaaatatttctatatgaaaattgtttaaaaaatcaaattaatttattttttaaaataattactaatatttaattaatcaagtattaatgtatcgctccgttttcgttctgaggatttgggttcccaacccgggctgaacaaacacagaaattagcgatcccactccgtgtgaacggttatagaaattaattagcgatccatctccccctcccctgccccgccaccttctccaccggcgccgacgcctcctcgcgcctaccccgtcgcccgccgccggcagccgcgaaccccgccgccgacgcctcctcacgcctatcacgccttcatcgcctgccgccttctccaccgccgccgtctcctccaccgccgctccttgccgccactgcatcctctacgtctccccgcacgggtggacgctcgccatcgaccccaccgacctcgccgcgtcgctcctccacctcttcaccggagccgtccgcgccctcccgccgctcccggccttcttcgccgagacggacgacctggcctgggactggtcgccgcatggcgtcatggcgtcctgcggcgagggactcctcttctacgcctccgacccgcccgccgccgcctgggcccctatcgccgccatggccgactgcaacgcgagcagcatcaactactccggtggcgagttctttgtcttcgaggacgacgtctgctactgctgcaccaccatcgtcgacgccctcaccctccccatcgccgccgtcatcccggtgcccgccgtcgagctccccgccgaggcgcgcatcgcggtggcaggcgacgagctcttccttctcatcaagtccaaaggatgtacctcttcggcgacgacatcgacttctccaaggcttccggacagctttgacttggcctgacaggagctcaccggcatcggcggccgcgccctgtttgtcgattcctgcacggatttgccatggagaccgcgggattcgagaacctcgagggcaacaccatctactcggtgaccaccaaggaggtgaacgatcggcattccaccacgatgaagtacagtcggtgttcagcctggagaaccggagcttcaagaagctcgcctgctgcctcaacaagctggagatggccctctgcggcgagacgccgtcctggatcataccaagctggaacgaaggatgaacggaatcagagattgccggattggtggttcttgaagcaatggtggtcgacaaatctctgtctcactctcagaggatggattctaatctctcttttcttgcattccacttaaataattatgaaaaaattttaaaaaaatttacaagatagattaatacgtaatatattacttcacaaacatgtaagttcaagttcgacttctataagttgtaacaaaaataacaaattaaactctaactagtatatgtatatttacagtcaaatttgttatttttgttacaatttgtagaagttgaatttgaacttgcatgcttgtgaagtgatacatactaacctatcatgtcaattttttaaaattttttcataactatttagataacattgataaccgcagcatcactattgcataggacgccggccaccttatcctccaggaggaccggtgcgcctgacatgcctttcgccgtcggcaaattggtaggggagaattcatttagatcatcagaatctgttggaaagaccactgcttcgcccctgcacatgcatgttgtgaaacagacagcgtcaaacagcattagttacctactaggagcagtaggtttgcatcagcgtgtacagtaattaacaaagctattgcattgaacatacatatacatatgtagtttcataaagaaaaatgtgaaagaaaggctctcgttaattacagtatgtggccgcgcgatgttcccggatcaatacacatggaggtgccgtcaagtccgaagaatccaatcgcgacaacctccttcccagacaaatcagcctcatcggagaatcccagaggaatgcagttaggcgccccttggacacggatcagagcaagatcaacgtgttctgagacgtgcaccaatcgagcagaggcgatatgatccgcaccaaaccgaacggacagttccttaggctgtgttcctcctgacacggagaacaaagcacacgatttagtgagattaattaagtattagctaaaaaaaacttgaaaaatggattaatataattttttaaaacaactttcatatagaaaacttttaaaaaaatacatcgtttgacagtttgaaaaatgtgtacgtgaaaaacgagtgaagggagttgggaaagagggaaaaagaacatagcttactccgcttaggatcgattacgtgggcacaggttaataccaagcacgacgctccatcgttgtgaacaacaaagccagttcccacgccaagtttcctgccttctttggtaaccagcacgcacgtcacctggactaccgaaacgcggtgttcgtcgtacacgcgctgttccggcgtccgcgacggcggcgaatcaccttggtaagcaacacaagagcaaaaagaagcggtacgttaaccacaagcaaattttttatttttttttaaaaaaaccattttcttttcttgcaagaggatcaatgaaattaagaacaaagcgctagttgcaaaggataggagtgcaagatttgtaactaacttctcttgcaagagatcgaatgaatgaaagaacagttaagttgtagatgagtgcagattcaaaactagcagcgccacagtaggatcttttggccttaattcaacagtaaatgggagggaaaaaaaaaagaacagctggcctacctgttggcgctgatgaggacatcttgacttgttggacttgcggaagaatgggacggagtatcggcatgtagagcgctgtttgtccttatatcatcgcccgccggacagagctgtccaaaaggctcgagacgcaagctagttcggctcgtttcaagcttgtttggagctcggctcggcaagaaatcaaacgccgagcccgttatgctgtgcgctttaataacttacgcttttacccccttcatcagccaagccatccaccccacaggccacagggaggttaagatgttgggttattaccccctttagtgtgctcaacatggacactgtcgatggccgctattgtcaccatatatacgagcccccacgtcgcgcaggaaccacgcccgtctgttcggcgccggtgttccaggaggtgcacccgccgtctgaggctaccatgcagtggcggacgcaggatttcaacaatgggggtacgaagttacagactacggactgtgtacatagtaccaaggaaacagttcgacgatgaaaatatactcaaaccactaatgaacactcaatcgaagcgcaggcatgcatatataaacaaagtatatctcaatctttatacataacttgttgtgaatgatttgtagtgaacaatgaacgaaaaaaatagtacagaagacacaactaaccgttgcgattgtagcgattatatggctgcaccacccataaagattggatccaatctagaggaagaaaataccattgaatgatacccaattatctctattatctagaagaagaaaataccattggacggatggttgtattgcttttttcaaagcctacaaatattttggcctaatgatctgtatacatagtatatattatcttttttgttaccaaaaatttt

SEQ ID NO: 9859 - DNA, 16390 bp, Oryza sativa
ccaggcaattatgcgcagtacatcatgggtattgttgggttactaacttactgtcactgtgttgagaaaacaaaattcaagattccctaactactccaagagccaaaacatatgtactagctaatagcacagaggcagtagtttactccaatttcacactagttagcaacaaatccggaggtagaactatagccaagcaaagcagcgcagcgctagcgctccagtgcgtcttacttctaagaaaaaactcagtgaccgcgtcagttacagtgaaggaaaagccaaaaccactgtagtgaggatgaactcgagatggcggaccttggaagaagcggacgccggcgccgagcagctggtcggaccagggggaggaggcgcggaggtcgagggagcggacctcccgggcgccgcggcggagcagctcgaggcacagtgcggagccgacgaagccctggccgcccgtcaccgcgaaccgcacgccctcgatcccctcgttctcgctcagatgcatctctgactctccccccaagccgccgacgccgagatgcgctcggtggcggagaaaacgagggcgagtggaacagtatggctgtatgggtcgccggcgacggcgaccgcgctttactacctgtccgggtggagatcgtcggatgggaactcgaaaggcctatctctcatgggctcatgggccatggcccacgcggaatgttttttctaaaaaaaaatataaacaaccaacctgtttgtagaactaggcaagaattattttaagagctattttttagataagaaaataaccctctaaaaaaatagccctaagttgtttggattcaagggttgcttttatgtatcttcctatggagagagatagagagaaaagacgttttttcagtgagccccacccgaaataggctcaattagcaccccttgggtagaataattttttttgagtgggttatttccaaatagctcacccttttggatctttttggctatttggactattttttagggagggctaaaaaatatcccttggatccaaacagggccattgccactgtcttttaacatacgacgttattaacttttatgacattcgtcttatttaaaatttttatgtaaatattaagatatttttgtcatgcttaaaaaatatttaataataaatcaagttttaaataagatgaatgtttaaactatcttaaaatattaacagtattatatgtttaaaaaaaggaggaagtaaattggaacgtatcatggctttcatatcagaaaatttcattgcaaatgattgcatgattgcgtcactgtagcagacgctggagaaaagtagtggtgtggataagattttttaaataaaaattataaacaagaactggatgtgatttttaaaaagcatgtctgggaaaatgaatagacgagaaatgtgaaaagtggctgacaattttttttgattgacctgaggaggagaaaagagggaaaataaaatgtgtaaaatataggctgacaatttttttattgacctgaggaggagaaaagagggaaaataaaatgtgaaaaatatacggaagagaatagacgagaaatgtctgctgagaagcaaaaaaaataaaagaatatatcaaggtcccaccgagatttgaactcgggttactggattcagagtccaatgtcctgaccactagaccatgggaccattttgcttaaaaacccaagctgtcattatataataaaccattgctgtgctgcttaagagctccactccgaagcatccaggaattgcacagcgttgcttaggccggttctttcttgtcagagacaaatggattacaagatcgcctacaaaactagctatgaaccccagccagtgacgtttttggttgggtaagaagcaatcttgtatatgtcacagactccctccggcttgccggtgcccctcctgatcctgaaatacccttgctctccccagttcttgccccacgagttcttcatgatgatgtagtcctggccgtagtacgagccgtagcccacggccgtcagtgcatgatccggttgaatgccacattccccatcaaagatcccctgcatccagtattcagatacacccattttgtcagtttaatgtttttgtgctgatctgtactgtatcatggtgaatgaagattgaagaacagctgataattttgtttacccctttgtagaactgaaagtctctgctcccagctgctatccccacactgacaggctgatgagccagtgccttcagtaggcttgtctcgctgttcgccgggacatcctcgtagccggttatggtgatgactttggaatgaggctaaccaccagtcatcagttcatcacagcagataaattcaactgttagagatcctgctagatcactacatgtgtttacagctgaattgcctctgaagaagaagtggttttcatgtttctacctgcttttctctgcagtagccttcttccatgaggtatgggtagtcttcctctgtgtagatcccctggttccccattatgtatgcgaaggcgaagtccatcagcccacctcgacagccatgattgaaggtgttgtcgcagtccatcagttcctgctctgatagtgataccaacttgccggtcacaatctggtttatcccctcaacagctgccaccgttgaaaaagcccagcaacttcctgcaagagaccgttttctcttacagcattttcatggaacaaattgcatcatatcatacactatttcagatagtgatttagtattaatatgctgaaacagactgtgtgcactctcagtttcaggcattgagtatcgatgcgatgaaatagattgtgcacattttcaggcattcagcattaatatgctgaaattgattgtgtgcagggattcagtatcaccgtgctgaaataaattgtgtgcattttcaggcattcggcctcaatatgctgaatagatcgtgtgcattttcagggattcagtatcactatgctaaatagatagtgtgcatttttcagacattgagcttaccacattctccttggttcttgaccggtgtcactgctcccttcttcctccagtccactgcccagggcaagttaacggcgttcgcgtacctgaatgttgttgaaccatgtggctgagcatcccttcttgctaaccctggcttcagtcccaggtaactggccttgaattcttcatgtgcaatgtcagcaaaatgatttaagccgagccaatagctgccatttctcctgttcgtctccacaatgtgcctcaggtttcgcttgaagatctcatacctcttgaccttctcctttgggcttgcatagatcttgctatgttttactgaccatgatgtgaagagaccaacaagcttatttggcaatgcaagatcctcctgcgagtatccgacaacggaaggatcatggtgactagcagtggcagaacatgccacaaagcctagcaacaagaagagcatggagagcttggagtccatggcaagaaggctattgtttcctgccatggcatgcctagaattcatgaacactctttataatgaccagccatgtttcttgcaagtaattcactacacctgaaatctgaatacctgacaagggcccttctggctcaagctgtgaaggagtggtactagtaccttgctttatgaagaagctgcagttgcaggtatacttttgctctatagtttattcagaaaattgcttgatgtattactttattgttctattgatgacctcttatcatgtttaaattttgatttatgttaaaatagaagtttcttatgcttgcagccttgcaaacctctgaattggagataacttgctcaaccatgcgaagcaggtgcacaggcagcagtggatttttggaaggatggacaagtatcctttgcttatctgctcaagtcatcaccaaacagaagtacaccaaactattctattaccagatcaaccaaccattagtattttcccagttcgagcttggtgtacgtgctcataggaatgcagaattggctgggatgagatatctaaaagaatatagagaaagagaaatgtcttgaaaaaaagaagcaccatgggaaagaaagaactaaaaaatagacgcggctttgcctatgaaatactccatccgtttcatattgatcatcatttaacacaaattgaattttttaaattgatcatcatgttatcatagccccttcgtttgacgtgtaatattattgcatttaagcatgaaaattgagtatgcatgcatgtatgtaggaattcgaggtagtaaagctatcgtttcttagagcaagtttaatagtatagtcaaccactgacttcaaatcatctatagtcaatttagtaggaaattcatatactcctataaacatcactacacaatttatacttggtcgcacctgtcatacatacatgtatcttggagtctgtgctacagctggctacaaatctatagcccactgctcttctctcttctgttttatctcatcgaaatgtgtttataattggacctgctcttatgtatggggcctaagaggagttaaagtgtgcatgtttcttgatttttccctaccacatactcacattaaatgaaaataggaaagttaatacttttttttgtcttggtgaaaaagttatatggtaatcaatatggaacggagggagtaaatgatatggtatgataagtacacttaatttctttatctatttaatgcctgaaattatggaaactatgcccttttattcatatattaatttaaagcagcgagacattgaattcatagacataagttggaagtcgaatatatgcgcacaaattccaaattccaacgaaaccaaagtaatgaaactacttactcccttcttctaaaagtctaaaacttattctattctttggtttttccaaaagtttaagtcctatttatagtcattatgttttaaattaaattattgatcggaacccaataaaccattttattacttattggttacatgcttattggttttgtcacattgtaaataaattaattactccttggtcttggtgccaaaagaaataattcctccatcccaaaataaacttaattcctgggtttttgtgtctaacgtttgatcatccgtcttatttgaaaaaaaatatgaaaaattttaaaaagataagtcatgcataaagtattattcatattttatcatctaacaataataaaaaatagtaatcataaaaaatatttcatataagacggacggtcaaatgttgggcacgaaaacccaagaattgagtccttttggaatggagggagtaggtcttagacttttggatggagggagtattttcattttatctcctggcggagctaaaaagattttttgagcccaagcaaactatacttctagtatttattatataaatttcatcatcaattcattcaataacatataaatttaatggagtttttgtcggtgagtttgcgcggccgcctgcgatagccaggtgtggcttcacccctgcctccacatgtctgtaaaaatcaagaaaatccttttttaaaaaataattttatcttcttattctttaaacataacgttctaaaagtgcataacattaaaaaattctatttgcacaataaagaagagtaaggaataaattatttgtttgaaaatttggaattgcgttgagctcaagctaaagcaaaagatactggtacctccttattctcttctactacttaattatatcctggatactccctaaaaaaattatatcctggataaatgattgcaaagaggctttatctgcccattgcaacttgtatgtgcagccgaactgtggtccgcatcgtttgcttatttcctaataagccaaaacggcttattagaaaataaaaataaatttgtaggtaaaacttttataaatgtattcttggtgacttaaaagccaatgttgaaaaagaaactacgttgaaaatatctcaaaattaagcttgaaaattcaaaatttagttttttctttagctgattaggccatccgatgggagcctgtaagtgtcaactgagagcacaatcaaatgatataataagatctttagtttttctcccccacactatctgaatgtaatactcactgttttttcatttagatggcaacgtcatgcaaaaaatcagagccgtccgtctgtacattgatctagccgttcgtacgatgtcttcagttgcaggcttgcagctaaataaagtcatatatatatatatatatttgtccttcccagtccccagcccccgttcctagtcgtcgacgactccgctgctctccagtctccattcctcaatctgctccttgctcctcagcgtctccatcttcgccacggtgccgctgcgacaacggacagtatatggcatcctttgcaggaagttcgatggcgcctgtgtctaaaagatcgaagtagcgccgtcaacatgagcgaggagaagtctgcgatgcgctccctgtcctccacctcctgcaatccctcctgctcctcgggccgtcgacgggtggttcgccgcagcgtcatagccgcgacgtgcaggtgacagaggatccggcgcgacgccaccacttacccgtgcacgccgcctcctctcatccgctagctagcgccccctcccttctcctgatccggcctccgggtcgacggccaccaccgctactcttctcttcattgggctcaatggatcttgccgaagtttgtatcgtcgacggctatcgcgtgcttgaggtgactcctgcaacatggcgacaaccccgcgtgtcaaggaagggcagcagcatggcggcggggagcgcaggggagggcaaggtggccgggtggtggtgaagaagacgagcccgcgccttgagggaggacatgagtgggtggtccgctgcggcacgcgggtggcggaggatccggtgggcggcgaggcgtgcatcgggaggagggatgggtggattaagggtcgagcgcttttgccagaaaaaatcaagcttcgttggtccatcgcagtgaactttcggagagcaaggagacacatggcagattttcggagatgagaagcttaatttataggacgccacatggcccaatctctaaccagggatagagccctgatatcggtattagagatgagcattatagaaacactcggaatgtcacctcatgtgactaccccatacttaggcattttttacgtttttaatccctgtgaatacgtcttaacctcaaccgaataaatagtattttaaagatatcactatgcgttgtttaaaaaacaacactatgctgatcaattaaggttttggttcaaatggatttttttgcgtattattgagggagattatatactatattaacaagataaattaatactccctccttctatttatatatatgatgttttttagttaaaaatgaactaaccaacttcatatataagtggaaggatggagtaatttgagaaataaaatttagaaataacctagagcaagaggtacgaacaaaacaataaaagatttgttttttgagaatttgtatttgtataagcatggagaatatattgatatttgtaaaagcatggagaaaataatcattggcaatttttttaaagaaaaagtgaaaagaacagggcctagactcaggtttttccatcgtcacggacaatagaaaatcttggcttattcctagcactaggttagttttaacccaatatattaattaattccaaactaaaagtgatacaatgttttatccttaaggcccacttaaattatcctctgaattattactacatattatctgcctgattatgtgaaaaataaacttaacaggtggtatgaaacaagtcgactaggcattacagtagaggaaagtattttgaaaaaaaaacatataccaagtaatatgtgtaataatttgatgaagtggcaaaaagaaagaagacattgtcagggttatggataccacatacctaatagtagttgactaaatctcagcagtatccaccacataccatgtcctatacggaaacaacctgcggatataggaggagtttcggataaggaaagacaaccagagttctatatggaaacgacaagaactactcggattgtatccatattggtttccctagttctacttggacaagaggacacctatgggtataaatacaagaccccctaggaggagaggggacgccacaaagccataagccaatacaagccaacatacaccaagataagacgccggatatcgacttcagggataagcacggctaggatactgtcaggagagacgaaagcgctatctctgatctcgccgggtacggattcgaggaggaagactaacctgttgtcgaccacgagttagaccttcagatcaccatgccaacaacagttagataggctaccccaaatattgtactggtgtgattatggtgaataagagcaataccggcttcggccaacaagatgtagggttattgcctgataattcaggggcccgaacctgtataaaaatccttgtctccgtctcttttacctcagtctcgcgtatatcctaataccaacgatcctcatactatgcaaataccggaatcgcgacatcaaacgtcgacagacatataaaagtggtactcaacaatatttacacattcaaaaaggagtgtaacttaggctgtgtttagttcgtgtgacaaaatttttaaagtatatggacatacatttgaagtattaaacataaactaataataaaacaaattacagattccgcctataaactacgagacgaatctattaaacctaattaattcgttattagtaaatgtttactgtaacaccacattgtcaaatcataacgcaattaagctcaaaagatacgtctcgcgatttacatacaaactgtgtaattgattttttccgtccacatttaatgtttcatgcatgtgtctaaacatttgatatgatgaaaaagttaaaaaatttaaagaaaaaagttcgaatctaaacgataatattataggctaaaagttagcctgcgcgccaacgggagcgctcattttctagtatactaatctcaagctggccgttgtgccagaatttgattggtccacgtggcttaatcaattgcgaatgaattggtgaattcgaggggtcgttccttgagaaagaaaacgaaaacctctagacaagcgtaaccaaattctccaacattacacaagcgtaaagagaaaaaaaaaaaaaaagctccgagcacttagttgggcctagctagcccagtcgctcacctggacctgcccactcggtgcccctcactatgttgatgtatgcaagtgacgcgttgccaattcatctcctcctctcctcccttcctccttcccttcttctcttcctaatatagtctacagtataccataaaaaattttaaaaaacaaaaaattagaaaaatttatgtatagaaatactatatataaaaaaattaaattcaaattcaaatttaaatcaggtatataaacttttaacttataaactttgggtctataaactttaggtgtataaactttagatgtacagaaatactatatatatagaaaacatttgaattcaaattcaaattttaattagatataattcaaatttaaattttaatcgggtatataaactttaggtctataaactttaggtctataaactttaggtgtataaactttagatgtatagaaatactatatatgaaaaatatttgaattcaaattcaaatttgaatcagatatataaacttttgacttataaacttttagtctctaaactttagatgtgtaaacttgaggtgtataaatttactaaaataggaaagtaatgcggtgtaaaaaaaagaaaccaagtagagagaggggggggagaatctcgcccagtagcatttctgcctcaacagttgcgtgcgtgaacaaggaaaaggaattatgaggaaaacgaaaaaggaggaaaaaaattaaatacaagaaagaaagaagtaaaaatattttatataaattatatactatggcttgaatcggaaattgaggcagctaccctaacttcttcttcttctttttttcagggaagctaccctaaccaaatcgatatatttctggaaattaaagacaacaaaaagaatgagaggaacaatgcgaacttatatcataatttgttgtcacgataaccatgttttaaaatatgcatttttcacaaatacactacacatttgataatctctactaatatagaaagtacgaattcattaaacacctctctttcctaaccctcagatttagggcattcaacccatagtgtccataagcagcaatgtctatggtgccatatcaataagacatcacaatagaaactatactctacaacccatggtttcttaaagtgggctattaataaatacatcatttctctcctctacccacggattgccatgcatttggcactgactttccccgccctttttcgtaacaactccaaataaagatggcaccaaaatgatagttaccgccatagacaaggattcatttgtgaatgataaataaaagttacccatatcaagaccaaataatggatcaatgaaaaattgatccaaggggcttgaaattattggtccgccgcttccagggataactcatatttattcttcatctattataaagtcactattcttttccaatacaaaacttgatagtgtctagtgcataggttctcatgttgaagctgtgtcttgcatgagatccagtttcttcctctcttcactctctcttaattaatatagtgccacataagataaaagtcctacatggcaatatagttaatgccatagacaccatcctaaatggagggttaggaccgcccttattcatccaacgaatttatggctgtgtttagaacttcagctcccaacccctctctcgcgcacgcttttaaactgttaaacggtgtattttttaaaaatatttctatatgaaaattgtttaaaaaatcaaattaatttattttttaaaataattactaatatttaattaatcaagtattaatgtatcgctccgttttcgttctgaggatttgggttcccaacccgggctgaacaaacacagaaattagcgatcccactccgtgtgaacggttatagaaattaattagcgatccatctccccctcccctgccccgccaccttctccaccggcgccgacgcctcctcgcgcctaccccgtcgcccgccgccggcagccgcgaaccccgccgccgacgcctcctcacgcctatcacgccttcatcgcctgccgccttctccaccgccgccgtctcctccaccgccgctccttgccgccactgcatcctctacgtctccccgcacgggtggacgctcgccatcgaccccaccgacctcgccgcgtcgctcctccacctcttcaccggagccgtccgcgccctcccgccgctcccggccttcttcgccgagacggacgacctggcctgggactggtcgccgcatggcgtcatggcgtcctgcggcgagggactcctctttacgcctccgacccgcccgccgccgcctgggcccctatcgccgccatggccgactgcaacgcgagcagcatcaactactccggtggcgagttctttgtcttcgaggacgacgtctgctactgctgcaccaccatcgtcgacgccctcaccctccccatcgccgccgtcatcccggtgcccgccgtcgagctccccgccgaggcgcgcatcgcggtggcaggcgacgagctcttccttctcatcaagtccaaaggatgtacctcttcggcgacgacatcgacttctccaaggcttccggacagctttgacttggcctgacaggagctcaccggcatcggcggccgcgccctgtttgtcgattcctgcacggatttgccatggagaccgcgggattcgagaacctcgagggcaacaccatctactcggtgaccaccaaggaggtgaacgatcggcattccaccacgatgaagtacagtcggtgttcagcctggagaaccggagcttcaagaagctcgcctgctgcctcaacaagctggagatggccctctgcggcgagacgccgtcctggatcataccaagctggaacgaaggatgaacggaatcagagattgccggattggtggttcttgaagcaatggtggtcgacaaatctctgtctcactctcagaggatggattctaatctctcttttcttgcattccacttaaataattatgaaaaaattttaaaaaaatttacaagatagattaatacgtaatatattacttcacaaacatgtaagttcaagttcgacttctataagttgtaacaaaaataacaaattaaactctaactagtatatgtatatttacagtcaaatttgttatttttgttacaatttgtagaagttgaatttgaacttgcatgcttgtgaagtgatacatactaacctatcatgtcaatttttttaaaattttttcataactatttagataacattgataaccgcagcatcactattgcataggacgccggccaccttatcctccaggaggaccggtgcgcctgacatgcctttcgccgtcggcaaattggtaggggagaattcatttagatcatcagaatctgttggaaagaccactgcttcgcccctgcacatgcatgttgtgaaacagacagcgtcaaacagcattagttacctactaggagcagtaggtttgcatcagcgtgtacagtaattaacaaagctattgcattgaacatacatatacatatgtagtttcataaagaaaaatgtgaaagaaaggctctcgttaattacagtatgtggccgcgcgatgttcccggatcaatacacatggaggtgccgtcaagtccgaagaatccaatcgcgacaacctccttcccagacaaatcagcctcatcggagaatcccagaggaatgcagttaggcgccccttggacacggatcagagcaagatcaacgtgttctgagacgtgcaccaatcgagcagaggcgatatgatccgcaccaaaccgaacggacagttccttaggctgtgttcctcctgacacggagaacaaagcacacgatttagtgagattaattaagtattagctaaaaaaaacttgaaaaatggattaatataattttttaaaacaactttcatatagaaaacttttaaaaaaatacatcgtttgacagtttgaaaaatgtgtacgtgaaaaacgagtgaagggagttgggaaagagggaaaaagaacatagcttactccgcttaggatcgattacgtgggcacaggttaataccaagcacgacgctccatcgttgtgaacaacaaagccagttcccacgccaagtttcctgccttctttggtaaccagcacgcacgtcacctggactaccgaaacgcggtgttcgtcgtacacgcgctgttccggcgtccgcgacggcggcgaatcaccttggtaagcaacacaagagcaaaaagaagcggtacgttaaccacaagcaaattttttatttttttttaaaaaaaccattttcttttcttgcaagaggatcaatgaaattaagaacaaagcgctagttgcaaaggataggagtgcaagatttgtaactaacttctcttgcaagagatcgaatgaatgaaagaacagttaagttgtagatgagtgcagattcaaaactagcagcgccacagtaggatcttttggccttaattcaacagtaaatgggagggaaaaaaaaaagaacagctggcctacctgttggcgctgatgaggacatcttgacttgttggacttgcggaagaatgggacggagtatcggcatgtagagcgctgtttgtccttatatcatcgcccgccggacagagctgtccaaaaggctcgagacgcaagctagttcggctcgtttcaagcttgtttggagctcggctcggcaagaaatcaaacgccgagcccgttatgctgtgcgctttaataacttacgcttttacccccttcatcagccaagccatccaccccacaggccacagggaggttaagatgttgggttattaccccctttagtgtgctcaacatggacactgtcgatggccgctattgtcaccatatatacgagcccccacgtcgcgcaggaaccacgcccgtctgttcggcgccggtgttccaggaggtgcacccgccgtctgaggctaccatgcagtggcggacgcaggatttcaacaatgggggtacgaagttacagactacggactgtgtacatagtaccaaggaaacagttcgacgatgaaaatatactcaaaccactaatgaacactcaatcgaagcgcaggcatgcatatataaacaaagtatatctcaatctttatacataacttgttgtgaatgatttgtagtgaacaatgaacgaaaaaaatagtacagaagacacaactaaccgttgcgattgtagcgattatatggctgcaccacccataaagattggatccaatctagaggaagaaaataccattgaatgatacccaattatctctattatctagaagaagaaaataccattggacggatggttgtattgcttttttcaaagcctacaaatattttggcctaatgatctgtatacatagtatatattatcttttttgttaccaaaaattttgggggtacagctgtacccccatgtcccagtgtaggtccgcccctgctaccatgcatcctgcagctgcttttttgcatgtccagtccttccattgtggcattgtccattctagagtttggaaattaacatgaccaattgtacataagttttttttctttacacgaattgtacataagtatgttccatgaaaccatggccaagttattttgcaactcaactacatcaattgtgtaaaattgtaagttgattgtagtatttgttttaataggagagaaatgcgcatcactacttcttagagttgtctatttaggccgtgtttagatttaattttttttcttcaaacttataacttttctgtcacattaaatgtttggagacatgcatagagcattaaatgtggacggaaaaaaaaccaattatatagtttgcatgtaaatcgcgagacgaatcttttgagcataattacgtcatgatttgacaatgtggtgctacagtaaacatttgctaatgacggattaattagacttaatagatttgtctcgtagtttaccgacggaatctgtaatttattttgttattagtttacgtttaatactttaaatatgtgtccgtatacttaaaaaaaatttggcacaagaactaagcacagcctaaaccagcagtgatgcctagctagcaccaccgatttaaaaccgatagtaaatgtcccggggcatcattgtcgtatgcctcccacaggttctaaattaaaaccaagagcaaatcctattacgaaccgatcgacaggtctgtactagtgttcagcatcgtccatgatgagtactgggctactggcgcagctaggagctcttggaacggcaacgaatgcagcagcaggctatggcgcttcaccatgctctatgggaaggaattgaagaagagattaagttttttacacaaaacgatatggtatcaacatatgattgattgagttttaattattacaaacttgaaaaatatattaatatgatattttagagcaactttcatatacaaagttttcgcacgaaacacaccgtttagcagtttgaaaagcgtgccacgaaaatcttaatcttcatccaactcgtcacaataattaatatttctatgagttttccgctaaacccacaaaataaacacagggtagctagctagtctaatagtataggcaccaccataacaagactccatgtcgagactgtttggttggttcccataacatatacttcctccatttcaaattgatctacatatagtttttttaggttatttctaaatgatctacatatttgtatgcatttattaaagtctatttgttatttgtgcattggagcaaatggagattgatgcatgcatccatactgtcggtgacatggggccgggggtatcgtgactagaggcttcggtagccgcggtcacccacgtggcctgaccccctcgggggggggggggtcgggcccgacggtgacgtggccacccctccctctgtctccccgaggggtcgggccgctcccgtttcggccccgagggctggggcgccccgacccctgtggttttggcgccacgtgtgtgggttaggtgagcacagcgggctcacctaaccgcatttatagcagg

SEQ ID NO: 9860 - DNA, 9951 bp, Oryza sativa
aatagaactggttaaatgttcagagagatgcctcatttgtttagtttgtgaggacaacatagtcttgcacacatgggcctatcgagtggttaaattagttgctgcaagattggttggtgatcaaggtaaaaccatacaatttttagcaatctgggagtttgcaaacaaagaagtagctctcattcagacaaagaagcatatgcatgtttctcagtccactgatctcaatatttgcatgttacatctaggctctcatggagtatatgctgatagtagtggtgagaggacactgatcttgatttggggaaacgggaatcaaactttgtggagaagtggctgagaaagggggcgctcttgcctcaaaggctctgacccgccgtcaccaccttgccgccgatgcgtatgcgactgcgccggagccatggccgatcccctccctggctcgctgctgctgctgcccccctgcgcactgcctgctgctgatatgcgcctcccgtccgcggatgcgcgccgctgccccgccgacactagtgcttgtcgccgcccgccgccgtgccgccgtgcgcagtcgccagtcgccgtcggtgatgtggcagacaaggagaggcggagagctgagagcgtgagaagagaaagaacgcgaacagaaacagatgcggcgctcggtgatgcggtgtgatgcgcgagagagaggaggtgggattagggttggcttctattgggctgtgatgggctggttgttgggctgagagatgtgggggctgaaacaggccatgtgtggggctgggctatagaatttgggaaaatctgaaaaatatgtaggtactagtccactaaattttttttcacaagtagggcttgggtccaagctgccctaggcccagttccgctcctgtatccactgattttgcgactcggatactattttatgcagattttactggaaaataaccaaacaattcatgatgtgcatcttattacattcttaggttgtgttcggcagtgcaggatgggaacctatccctcttgcacgcaaaacagagcggtctattatcacgtaattaattaaatattagctatttttttttgaaaaatggatcaatatgatttttaaagcaactttcgtatacaaaaattttgcgaaaaacacactgttaagtagtttgaaaagcgtgcgcgtggaaaacgagagaggtgggttgggaagatgaagtgccgaactcagccttaatctgcatatgaactgtctgggtttatcctttttaaaattttcttaattctttgttgatgggaaatgcagcaccttgatcgagaaggaattagcttttgctgtcgaactacatatgatgaaaacgctattactaatgctgttgagatattcaatactaccaggtaattgccttgttctgttataaagttcattagatgtgacctttttgaacttgcatctgtattaatactgttttatccccagtggtgctgttcacttcatggcatcgaataatgactctggtgtaagagactatgatatggagaggtttcagctctacaagcattttcagtttgaatggccagtgaatgtaagtcttttttgtttatttgtgacaccttgcttttggtaaacctactataattagggtatgcatgtatgattgtgtagacattcataatttcacattgccatagtttcgctttatgtggttctgtacttctttcttcatggtgtcgaataatgactcttcaagataaaaccttttgatttcctttttctcatgaaaacataattgtgcactgccttttaaatgtgttgttaacaaatagatccaacatcagtatacggagatcaaaaccaatggaatgctttggatgttttagtttctgtactctggtctcacaattcattgttattttggtgatgcagcatacagcattgagtcctgacagaaagcttgctgttattgtgggggatgatcctaatggtttactaattgacgccaattcaggaaaggtatgccagcacacacgcaaacctgggcataaaacgtcacatatatatgataaccaagctgtgatagaaaattatgtgacattgaagtatggcatgcatgataactggttactttgtttccctgtgcagactcttcattccttgaaaggtcactttgattactcgtttgcatcagcttggagcccagatggcagaacatttgctactggcaaccaagataagacatgccggatttgggatgcgcggaatctctctaaatccctccatgttttgaggggtaaccttggagccataagatcaatccgcttcacgtcagatgggcagttcatgtcgatggcagaaccagcggactttgtccacgtcttcgatgtcgggagtgattacaccagaaggcaagagctggacttctttggtgagatatctggcatgtctttcagcccggacaccgacatgctttttgtcggtgtgtgggatagaacatacggcagcctcctccagtttggccgtctgtataatcactcgtatcttgactcgctgtgttgaggtgaggaacacaaagcagacgttgggcgcgctgtgcctcagctgtgcaccctgtgctgaatcttgtcatcatacattaggtatcccaaatcagaatttgaagtcgtttacccgataattcaattaataaaacttgtacccttctgtatgtgtatataaagaatgtacagagatgcctatagcctgtaccagggtagtgcgccaaatcatgtgttaggttgcagtgagaaatgtgatgtgaaccttaagatcgatgatgctgtaaccggaactgcatcatctgtctatctatcaaccgaagccaagtttcttggtgttttctgggtggaagctgtgcgcctgtgcctgtgctttgtgcttgccttcgcttcggatgtgatcgtgcaaaggttcattccttttagctggtttggctagagtggcggtatcttgtttatgttttgactatctgcgtgctattcgtattgcagtcttgtagtccatcagggagatctctccggatgagtaggccggaatgaattttattttttttaaagaaaatgtcgatacaatatgacaattagtcgtaaaatcggtatgcgccttatcttcgaatactccattaccattttaaaagatgacaatccaatatgacgccttctgttctccgaatacgtaattttccgttggaaaagaggtaaacccaaaccaaaaacagattatccgattcgaagtttcgaactcgccactacgtatccgaatccgaatacgattagaacgatcgtcatctctactatataacgatgtctccccgtggatctcatgaacccccgatctctctctctcaagccacaccgagtagcacgtacgactgcacgaagcggcagagaggctagggccgacgtgcattacgcaagtgctcgcgaggtggcaacaatgaccagcgaatcgccggccatggcgacggcgccggtgccggagccggagccgcagccggagctgtccacggcggcggccagacggcaggatgaggagcggaagacagcgctcaggatcatccgcaacgagctgaggctgctctggcgtgacccgccgccgtacttgcggcccgggccggagcccgtgacggaccccttccactgggaggtggtcatcgacggccccgccggcaccccctacgccggcggcacgttccccgtcgacatccagctccccgccgccggctaccccttcgtccaccccaaggtcaccttcaagactctggtaagcgcacgctcgtctgcatctctgcttgttcctccgatccgttttgcgtgatgcaaatgtcttaaaacctcatctgttatatggtttaaattgcataaaattataaaggttttgacgtaaggcacgtaaccccgtatattattattctgaagtttcacgaaaccacggtattgatcattttaactttgatctaccacactttttaattctacaattacatctcaaatttataaggattttatccattgtataattgttacacctggctttttaaaattttaatatagaagtatgtcaaaatggttaactatgtgattttataaaactttaaaaacatagtattttgggtttatgtgtcatgtgtcaaaatgtttatggttttgtgtaacttggacgatgataattgggttttagttttacgaaacttgctctttcaaaaaaaattgcatggatcgaatttgagtgcttgtctctgcaaccgcaggtataccatcccaacatcgacgaggaagggaacatggtgctggacgccgagagctggagctgcgccaccaagctccgcggcctcctcatcggcttcgtctccgtgctctacgacccgctgctcgactacccgatcaactacgacatcgccgagcagtacgcgtacgactacgagcggtacgaggcggaggccagggcgtggacgcgggagttttcctcggcgcccgtcgtctcgcactacccgcccaacgccgtcgtcggcaggacgccgccggccgttcctcacttcccggcgacggcagccaggagaagagcggaagcggaagctaggaaaagagctgctgccgctgctgcatcttcaggttcaggtgagagcctgtggaggagggtaattgggtatattcagagctggtctccttaccggctacttcatacagactagctgaacaaactcgaggaaaattctgtgtagaatggtttatatgtttactgtattgagacttgagaggtatatatatatacctctaatgtggctgtaaagaatttgtacgtgattagtacaggaaggctgtgctgacgagagtttgtctgagcgactggtattgttcgatgagttggcatctttaagactttaggtctatattgagacttctagaattcacaagtcagaacattatagtgataaggaaatgttgattgtttggctccaaattagtccgtggggaaataagcaaacccttctctcgagaaaagaaaactggtgtaacccgtctccacattttttttccttctctctttggcacacggaaggccatgctcctcatgttttacaaattacgtccaagactttggctatgttttaaagtgattctcggattggctactccctcatttcttgttagttgcgagcatgtttcctgaatgttaaatggtgtaatttttttacacttgaggtatagaaccatgcacaaatagtttgtcttggggagtacgcattttccattgaagaggcctatgtgttggtctgttggagccgacgatgttttcaatcacaactaaaccgagaatatagaggatatggtaagcccaaaaagaggtcagttcttgaatggaggaggtaccatatgctagccatccattccacttaatctaatggcctgggaaggcttggtacttggcgctggcggtactgcatctctcgaaaaagcaggtttcgaatgctgttgatggtgggatgacaaatttgtactttcgcattcaggtaccaagtcggagcagaacaccgtcaccatttcttcgctgcagtcatctactcatcgcatcctcaaatcgaacaaaaattgtagaggcgaacatggtgacgagcctgacgcaactgatgtggcggtctcccgggcagcattgaccttgggggatgtgggccgatggggaacgctggcgatttcggggtacccccgttgacgctctcgtttcctccctcctcctggttcgatcatgacgacagtttttttcattaatatctaattagacttataaatgactaattagggatagggattcgaggtggggctaacacccaacgagccccaacagtggatccgccaatgatagtacgtggagaagggtagtcaagtatactcaaagctggtctcctaccgtttgctgcgtagagactagcataacaacacatggaaaaattgtctttatattttcttttggtatatatagtgccaattatggcataaatacacctccaatgtactggtttagtgttttttcttatattttaatatagggccatgtttggtgcggctctatatatatcccaaacctattgatagatttgaattttgtatgttaaattatagtggattaaaaaaagtttgggatgatatgtaagcacctctaagttagaagaagaggacggcgggatctggcagctcgaggcatatctttctgccctcttgcaccccgccgtatgtacgttcactgcaatcatcggtctttggtagaactctaccgcaatcatcggtctttggtagaactcaagcccatcggatctgggacgtcagcatgaaggaaggcaaagggtggcgaggaggaccaccagcaatggtgagaagaggaagacggtagcaacgacgacacccctcaacctcgagagcacactgcacacacaccttgcctcgacacctctaactgggtgtcgctgcacccgctcggcccgcacccgcacatgggccgggcctggtggagtagctccgacctggctcggaggtgcaatttgcacgcgccgatcctggctcgctcgtccactgtcacgaaccaacacaatcacaccaaatctctcacacaaatgccaccgatatattgcaatccactaagaatacaagtgtttagggatacaaaattgaggagaaagagaggtatagtttgggaagagagatcagacaagaggaagcaggagattgggactagagaataggaattgagaggggaagcagcagcaaggaggaagaagctgtcgcctgaggcgttctggtaattgattcatcgatgaccctagctgctggctgctttgcctcttttctagtctccttctccctagctgaatgggcccaaagccagcccacttgtctagcctcctggaaggacatcacaacagcccatgtacatgacattcttcccccgttaagaatcggcttgtccccaagccgatgcaactgactcgccagattaatgcccccaagatcctagggtacctgcagggaaatgtcttgttgggcagaatcccagaacaattgtttgatgaccttcgaaccatctgatgtagaccctgcccactgttgaatccacttatccagcatacataaaacctgagcattacaaccacactctctaccatgcttttgctgcctcaaccaccaagccttcacgccttcttcaccactactatcagcatatactccatgagagcctagatgtaacatgcaaatattgagatcagtggactgagaaacatgcatatgcttctttgtctgaatgagagctacttctttgtttgcaaactcccagattgctaaaaattgtatggttttaccttgatcaccaaccaatcttgcagcaactaatttaaccactcgataggcccatgtgtgcaagactatgttgtcctcacaaactaaacaaatgaggcatctctctgaacatttaaccagttctattccacgagaattcttactgaaagtgctagcttccaaactgagatggactgcaccaagttttagctgctccctttgtaacaatagctcatgtgtctgcccatgttgattccattgaagaataagctcagatgtacatagcaactgttgtagcactgcccatattaaatcccaagaattggcaactgacagccataacaccttgtttgtatattctcttctaataactttcacatttgtccataacattagtttcccttcagatatacacttccaagaaaaattgagcccttgccctcctgctgcacacaaactgaatacctcactcctccattgcgaaggaggaggccaaggttacaagttgaccaactttcttgttgaaaccctaaatgcctcaccattgtttgatccgaattgagtccaagaagtatcatctagtacatcattgttgttactctgaacctgaaatgaaattggaatagtgtagcactgagcatggcgatgggtacgtctctcatgtgacttgcaagtgcaattaccatcaacattagctccactgaacaaacaatcacaccatgcatcgggtgatggatgggaaatcagcatgagcagcaagaacaattcatgatccccatatgcccaaccataggttgaatgatgtgtgtgttgataggccttcctaaaggcaccagagagacatatctcataccaaatacactatccaacaatcagattttgcagcaagccctcagtggaattaattgttctactcatgaattgggcaacgctgtagttcaaggagacttgatgagactcaccatataaattcagtgtttcaatttcagtttgaacacttgtttgaataagtggcggccagggttgtaagagctttaccaccatgcctccgctgccttgacaaagctgtggatcaggccatggtaaaggccgagaacctgaggtcatctcagctttgttccatggaattgctgctctccaaggtggtactggtggagggctagctgtgtattctgagctccggtcaaagcaaccatagagtacttgcaatttcaatgaaacgaaagagaggcagacaactccaaagtagtcacggctcaagcaccaactccagttcctgggaggaattgcattgatgattaacaatggatctctgaagcataaatacatagtggtgaacttggtatccacttccatgagctccatccactcctccttggccatgtctttgccaccatcatcatcagccaactggttctcacacttcattgaacactcgatggttgttcccatgccaagcttggctgtgtcaacatggttagttgagccggcctctgtactgacctccaatgcgatggaagttggatcagtgttggcactcaacgctgccacatctctagtggaatccttgctcaaggataaatccaccttggtgtggcgaaatgcctccagcatccgatcgatcttggtgcacaggtcttgtctaagttctccaccgccttgtccatgtcagtctcagccttcttggtctcgttgaaaggaaccgatgtcaccatggctgctgatgtaattgagggtacagatgaagctgttgtagcagggaacacgcgttctagtgcagcagcaatactcttggccgctggcctggcggtggcgctacttggtaccattgtcaaacaggtggtgtgcgtggcggtggcgccatctccagggaacatctagacgtgctgcacatccagtaagcagcccccatcgtagatgtcgcgaccgtgggtggcggaccgagccctctccgcgtcatggctggacataaatgacacaagagccttgacttgccatgtgctcactgcaagaacctgcaccgccactgctccataggtatcgtacacttgatgcaacacctcatatgtcactggatatatgatctggctcacggtgacgtgaaggacagcagctgagtcgcctcttggacaggacgatatttcatcgaacaggtggtgggcatctcctccaaagacaccaccaccaagttgctggcagttcctctgaccaccagcgctctcccacttcatctccacaccagaaaccccacgaatcgactactctgataccatattgtcacgaaccaacacaatcacaccaaatctctcacacaaatgccaccgatatattgcaatccactcaagaatataagtgtttagggatacaaaattgaggagaaagagaggtatagtctgggaagagagattagacaagaggaagcaggagattgggactagagaataggaattgagaggggaagcagcagcaaggaggaagaagctatcgcctgaggcgttctggtaattgattcatggggaaaatccaaatacccccctacaagtcactgctctttctactctccccccacaactcaatattgttcaaaacactaca

SEQ ID NO: 9861 - DNA, 20736 bp, Oryza sativa
accgatggttggtgggacttcttgaaagtaaaatatgaattccaacgatagttttgttcaattattaaaatgctaatgacaataaagattaagcgacggatgggtcatagaggagtatattggcagcatttgacgggatttctaaagattctatttggtgtattactaacagtttttatatgtcgaatcaaccgccaccactctactcttttataggcttgttatttaatttatctcaccgtgtgttttagatggtctcttttttaataatctttatttttatcaccagttttagttatttataaattgtattctattttaaatcttttttctttttctttttctaatttcagaattttttttaaaaaatatttaataccgtatagtgttcttttaatatttttatttttcatttttgaattttagttgtttcaaaattgtattcctacttgaactctcttttaatttttctaattttggatattattttattttttattctgaattttaattaatctcagatggggttcttatatggattcttctttaaatattgcttttttttaattctgaattttagttgattttaaattgtattcctacttgaactcttcttttattttttctatttttggattttatttttatttttatttcgaatattaactaatctcgtattgggttattatatggactcttttatcaatattccttatttttaatttctaatttcagttatttttaaattatattcctacttggactctcgttttatttcctaatttcgtattttattttatttttatttcgaatttcgattaatctcgtattgggtttttatatggacacttctttcaatattgctttattttaattccgaatttcagctatttttgaattgaatttctacttggactcttcttttctttttctctgattaatgtgggaatttatagccctacagcgaacgtagtgccttagcatcattatattttctctcatataataacatatatgttttctcaatgtattattcaaatatattaaaatgacaatataattttaaatttctaaattgtatttctatatggactctgtttttatttttctccgattaatatgagaatttcgcgcaattacgcggctagcacccaaacaaaatcatatatttttttagtatgattttacttaaaatttattaaatagctatctagctatctcattgtcttaagattttgaaagaccaaaccttatcatcctcgtgtttctaattatatagttttcaaaagtcacaccagttgctaccccttatgtcatctccttttttatttgcttgctcaatctatcactatttctattcattcttcttggaacctttaaatttggattttatagtttttagagtttattgtcatgttgggtttcatttttataatttctagatgtcccgtcaaacgttgccattatactcctctacggcccgtccattgtctcttctctttgttgtcattgagattttaaaaatcgaacataattatcgtttgggttcattttttactttctagaagtcccgccaaaccatcagcggctttgccattgtactcctctacagctcgcccgctgtctcccttctttattgttattgagattttaaaatcgaacatgattatcatttgcttttttttactttttagaagtttcaaatctttaaaaattggacttgcagtttaattttttataatttttagaagtcccatcaaacgatgccactatgcccctctacagcccgtctgccgccaaatctttattgtcattgtgattctaaaaatcgaacataactatcgttggaattcatttcttattttctagaagtcccgtcaaccgtcggcggctctgcaattatactcttatacaccccgcccgctgcttctactttttattgtcattgagattttaaaaattgaatatgattatcaatggggtttttttttactttctagaagtcccggcaaccgctttccacgtttgcttcacggcctgcttgacgtccctccttttaatcgtcattaggattctattttggtgatttattaacaatttttatatctcgtatcaaccactaccactctactcctttatagctatgttacttaatttatctcgtcatgtgttttagatggtattttctttcaataatctttatttttatcacaaattttagttatttataaattgtattccaaattgaaatcttaattttctttttctaatttcagatttttttttaaaaaaaatagttaatatcgtattgtgttattataatgtttttattttttattttcaatttcagttgtttcaaaattgtatttctgtttgaactctcttttaatttttctagttttagatattattttatttttattctaaattttaattaatctcgtattgggttcttatatggattcttctttcaatattgcttatttttacttccgaatttcagctaattttatattgtattcctacttgaactcttatttttttattttcttttgccaattttggatttatttatttttattctgaattttaattaatctcgtattgggttcttatatggactattcttttaatattccttatttttaatccgaatttcagttatttttaaattgtatttctacttggactctcatttccttttttaattttggatttttattttattgttatttcgaattttgattaatctcgtattgggttcttatatggaaacttctttcaatattgcttatttttaattccgaatttcagctatttttaaattgtacttctacttggactcttctttttcttttttttttcttttttttccgattaatgtgggaatttctaaccctcacagcgaacgtggtgtctcctttcaaagctgttttaataatataatagatagatagatatggacgctcagctgttcagtttgcctggacaatgccttatgcttttctattttctgtttaaaacaggtttgaacaaaattaaaaagaaaaaagttgatctctcccccacgcaaccacatcatatggtccataatgtttatatcattggctaatttttagtctaacagcagctttcaaaccgcattcttttttatttgactatgttgtactactttatccaagcctcagctgatgaagaggttcagagagatatttaattatttacactctttaattattccatatcttataaacaacgagtggtaaatagttaaacatgatatcttaaaagtagtaaatagttaaatgtttaggaattaaaagagagaaaccggtttacgggccgtcataccattaccagcagaaaacgctcgttaagattcacgggaaatgcgtggctttacctgacgcgtgcgtggcttccgtgcatgccttattagctccaaagaccaaaacttcagtacaagaaacgccaatctaggctagctgttagttgcctgtttaagggagatgagcaatgagttggcttgaaagaatcaacgagatcgatccgtcaagccactcgagcttctcaagcaacctaaactaacacctccgtctcactcctccaggcacgctagccacgatgcagttaggcatgggctagctatagctaatagctaagctcgatcgatctcttcttctcctcctcctcctatccactgtccaaaagacggtgatcgatctgtctccgactgccgccgccgatgtcgtcgtcgtcgtgcgcggcgggcgccgaggccaccgggctggtggccatggactgcctggtggtgtgctgctgctgcccgtgcctggtgctgcagatcaccgtgttcctcttcgtcaggctgcccaagaaggggttgtcaagtccaagaggatcatcctccggagatggcacgggagaagatcatcatcatcggcggcggcggcggcggccaagagaggctgcagcacggtcgacccggctgcaggcgtgaagaaacagctggaggagctatttgacgacgacgatctattccaaggcgcattcggcggcgggatcaacggaggcggcggcgacgacgaggaggggtggtggaaagagaggtgcttcgccgtcgacgacgacgacggcggcgtgtgggaggcgctgatcgagcaagaggggctcttctggttcgggagcttctggggccggacgacggagcaggtggatcgtccggatcagtttggagacgacgaacatgcccacccagccttgaggtttcctctcgttctcgagagagtttgtgactaaattagctagagtacttaatttatcaatgcaagcttaattagggacagtcgcaacataattcaggcgttgagctcggtttctggctgatgattgctcattgagttcttaatcaattacatcctgttccggccatttccatttgcatcgctcttcagtggacaactaacaaatcacaaatgtacatgtcacaatattaacttcagagtcgagaagggacaatgaataaaaaacacacggcattaagtctgtaacacagacgctgacggagccattttctctgctggcctgcatgcatgctcaccctgcacctgcagcgtccacttggtctgtatattttcagaggactttgaatctccagacggaagtgtatttacaacttcgcgcacacttaacaaatcacaaatgtacatatcacgatattaccaatatcatatatgacatgtatgattaaacatatcacttcacagacataatacatagaatgtaaagttcaatctacacaatactccaaaatacacaaatttggctatgaacaataatgttgattgaatctatttatgttcttttttggctgtgtggattgaatctgtatgtttacggtgttcacattctaaaaaaaagagtaaaaaatcaattgtagtgaatgacatgtatagaattaaagcattggtacaggtaccaaggataaaaatatgattttgctagtagagaaaaaaaagaacataacggtccctaaatttaaatcggtataccgcgtaggtactagttaagtcgtttgtctggtattggcgtacatgttcttatttgcgtcatttcccctagatatacgtcacgttctctaagattctcattcacatggtttcctatatatttttgttttattccaaataacacgttactagtgtaaaagttctcgtttgtatggttttctttatatttgtgttttgttcccaagaacgcgtcaaaactcctctttttaattattcgtgtcacttagatcttgccatagcttctaccatgtctccttgcgggtgcacctgtccaaaatgtagaagaaaaacatagaaggatatctcattccagtcccttatacaacaaaatttatgaactatatgtaaataactaatcaactacataaaataaatcttatttgataagattcgcttagccattaaccgttcgatctcgtcccatgttgaatcctcaaccatgtagtgcttttccctttgtttcattccagtgaaccactttcaaccctataacaagaacaaaccgaaaagatagaagaaataagacaacctatttttccccataagatctattcaatgcccaaattaaacgcatgatttacattttttccaccaaatgctaccgagcaatgcaaccaggtattcgattcactcaaaatgcccatattttatatagttaattactcaactaccatgatttttattctatatcttaccacttttttgatccatggtccatactgttttacctctcaatacctctaagtagctcgcaggtatcataaaagctcttgttgtataaattttttattttgtataaccttttgataaaagctctcgttgtatcaatggtatcacggtttttattttgtacaaaccttttgattgatactcctccgagaagcaaacgagtacgcatgcacttggagttatagaagcccattccccaaatccagtcaccgatccgttaggttccgtgttagctagctcccagagcgtgccggcgacatatgtatcgctgccgaccgccgtgcacacagaatccatccagtcggtgcgcggtgcgccgtgtctcggtcgacaagcgacaccggacaacgacctcagctccacgcacacgcacgtgatgattggattttggatcgtatacgtaccccacgcattacgccaatataggctcgcgtaacaacatcaaacacgcccgcgtccgtcacgctttggtcccctccgcaaccagccgccgcctctgcaaggcttcgtccgcgggggacgctggtgagctggtctgcgcagctcacgcgccgcgcgcgcgcgagcgaaaacaacgccgccgtgtgtcgcgactcgcgacgagccgacgacggcgactacaacgcccaggcgaccagcggcgcggtgacgggccactcctaaacgcgagcgtcgtgagtgggtcgacgtcgacccgactccctggcacgaatctcgaggcggtcgcgcgcgtgggccccgcgaatctcgttcctactcctctcctctcctctcctctccgtctcgcttggccctccgtggtgacacgagccgtggccacctgaaaaacacactccgcccgggccgcacctcctagttgatggatttcagcgtccgagctcgcatccagagcccgcaccggtcggccgcccacttcgtcgccggcgaggggggacgccgccgcccggcaacgtccagggtatccttccgctccatggcgtcggccgcttccgtggaggagcctgccgctgctgccggcggcggcggctgagacgaagaggggaccgagcggcgcctccttcatccgggaacacctcaggagtctcgccccgtaccagcccatcctgcccttcgaggtaggagcagcactctttcccactggtggttgagtttgtggagaacgctgcaccgtttcccgtgccgcgcgaggtgtttgtggaaattcccccgaggcccccgaggctgtttggttctgtattgtgaaagacagcagtaaagcttagattactgagcttatataggagtagtattaccaagcttactgttggttttgtgatgcgccacttttatagtggttttgctgttatctgaaatttagaactctccttgctaggtgttgtccgctcggcttgggcgtaaaccagaggatataatcaagttggatgcaaatgaaaatccatatggtccacctccggaggtgagtttcttgtaatacccaaacaagagtagcatctacctctaatacttgaaacaatacattcttaagaaacagtagtttgaccatgtcaacatgaaccatgtgttataagaaattaagaatgaatcctaataattcaaattcaaaatagtactagcatattataaatcaattcaaagtggcatattagaaacactagctatctttgaacttccaacagaaaatttaacagatctttgtatgagcatacgaagggctggattctcattgtacataatttataccttctctccatctaatgcatatctcttttatacaggtagctaaagcattaggaaatttgaagtttccctatgtgtaccctgatcctgaaagccgtcagttgcgtgctgctcttgctgaagattctggtcttgaatctgagtacatacttgctggatgtggtgcagatgaattaattgatttaataatgaggttagcatgtagcttgttttatacctgctttttgcacgagatttttgtatccgagttgagtaatagcctagttttttttttaataaaaaagtaatagcctagtttgaatggtgaaaatgcagatgtgtactcgaaccaggtgacaaaattgttgattgccctccaacttttacgatgtatgagtttgatgcgtcagtcaatggtgcacttgtgatcaagggtaggtagttctttcttgagctgtacttctatttactgagccttctgtaatgtcttaattcggtgttcacttcttatactgtttgacatgccagttaccaccctctaatgtaatcctgatttgaactcttatgtagtaccgagacttcctgatttttctctagacgttgcacagattgtcaaagtggttgaacaggaaaagccaaaatccatatttctgacatctccgaacaacccagatggcaggtacacctttctcatgcgagaatggggctgttttggttgtatgttgtccagattctgtatcttagtatttcgctgaattacctcaattctatttttcagcataatcaatgatgaggatcttttaaagatccttgatcttccaatacttgtagtgctggatgaagcatatattgagttttcgagtcttcaaacaaggatgtcatgggttaagaagcatgataatttgattgttcttcggacatttagcaaacgagcaggtctgtagtttctgtttgcctttttcttctctggtctgcaccgggctatatcctctgaaaaatccaaaaacctcacccgttttctcatagtactgcatggaaatcacttatctgtactagaatttctatttttcgttagataattttttttagtgctgctgcattattatgtgatgtccagacattgctaagggagcatttaataaaataatcaattcttcttatgttgccaactcattttactgaatcatgctaatttttagtagttactagcatggctttgtctagctgattcattgaaggcatttttgccacacaattatgaaccaaaaatgacacctcattacaaattattgataatgcaggtttagctggacttcgtgtgggttacggagcatttcctctaagcataatcgagtatttatggagggctaagcagccctataatgtttctgtagcagcagaagtttcagcctgtgctgccttgcagaacccgacttatttagaggtatgtgctctggaaacatatcataaataaatttttgtttagtaatttggcatctgctaactttgtgcttctgttgaacatttcattactgaaggaagtgaaaaatctgctactacaagagagggacaggctgtacgatcttctcaaagaaataccattcctaaagccatttcccagccactctaactttattctctgcgaggtcacatcaggcaaagatgcaaagaaaataaaggtttgcactgcttgttagtactccctccatttctttttgtttgaagttggttagtttgaaattgaactaaccaacatcatacgtttacagaggtagtatatgttactcccttcgtcccagaatagaaacatttttagcatagtgtcaagtcaaccattcttaattttgactattaatagcaaaaaaataaaaaaaagatcaataatgtaaaattgatgttgctagatttatcattgatcaaactatcataatatgtaactctttttatatttaaaacattttattttgatagatattattggttaaagtagcatctcgaagactgtgtcgagatccaaaaatgcttatattttgggatggagtacaagtttctgctgtattttgttgtggtacaatgtaataactgcttctgttgttatattcttaggtggtaaaatgtcaacctggaagtcaaaatatagttattgtgtctaagaccattactattcatactttgaaaggaaatgctgatgatttagtttcaacaatataatgcctgcagcatcattcacataattttgttcaaaaacaattttcaggaagaccttgcgaagatgggagtaatgatccgccactatgacaagaaggaactaaagggatatattcgtatttcagtgggcaagccagagcataccgatgcactaatgaaaggcctgaaagcacttcaactgtgatcatcccatctgtttgacggaagcactgaagcacttgcccgtggtagtgcactagatgcagtctctcaatggaggttgcatcaatctaacacaaataaggtgcatcctctagggtcgattatgtctcaataatacactcttctgttttgaccagtggcgttttgtccagcatttttgtgttggtcgacttgggtttcttctcaaggtgattgttcgaagcaagaatttgtactgccgtgccctgattggaataaatatgagcgtaaaagtatggcaagtctactggctagattgtttatgcaccttctttttaaaaaataaaaataaaaatcttcagacattgcaaatcccatgtgacatcacaaatatggagagtcatgttcaattataatttttcagtgaggaattgaagcacatactccctccttccgaaaatgtttgacgctgttgactttactaaaaatgtttgaccgttcgtcttattcaaaaaaaaaaataagtaattattaattctttttctatcatttgatttattgttaaatatacttttatgtatatatatatttttacacatttcacacaaatttacatttcacaaaagtttttgaataagacgaacaatcaagcatgtttaaaaaagtcaacagtgtcaaacatttaggggaggagggagtattaagctattgccattatggttcgcaacccggtaggcctgaaaagggagcatcaccgcatctgattatccttttcgtgtcctagcgaatagcgaggctaaacgccatcaaaaggcacaagttctttccatgtgagcagaagaaaaaagttcgatgcggcacaacatttgcccatacaacaccacaagcaaagcaaagaacctcccggagggcttcatctaaagcttcttccatcgccttcgtgcaggcgcaccaggagttccgcagttaacaattaatatcgaatcccttatataacaattaatatgtttaatttgaaaaaaataagggcaatatcataaagttagaaaaataggagtaaaatctctgctaaagttgaaaacatggataaaacataaccaccacaaatatttcatagctatattgcatttttgaaacacaaaaactaaatgcaattacaatacaaatattcttaaatatgagggtccacatgactaaaaccattgtcgaggacatatctctttaatacgggtgagggtcctgtaccataatatcacaactggtatatgggtcccaccctcctattgtccacacgtcagtgtctataatggtagtgccattatagtagaggatgtgaatccccttactacataacggtttcaatgggtcaaaacaaccataatgacgaaactgttcacacattgtgattccttgtgcattagctccgcacactaggttactttgatgagagctatgttcgcacaatgtgatttcaaatgtccttttgtgttggtgcctgttttatcttatgcctaatcctatttcgcccttttgtatgagattgagaggtttgctgctttcatctagttgttttcacctattggtgtcatattgtgtttcctttgtaaaaatgggtaacccccatatcatgactcttccgtatgtggctttcaaaaaaaaaagccgggccgtgaggccttctctctaaaaatacaatgtgatttcaagctacattctaagccaaagcttttatacctttaatatgatacgtatatatacctttaataatctcggatacaaaataaatgtacaaggccacacatcatgtattgtaaatacgataagtagaataccacagctatcaaaatttataggttgcaggttagtacaaatgacgcattccccgacattccatacttgctcgtcatgcagcttcgtcgaaaagcctccatggaaatctcctccaaatcttcgcaaaagctttgccactgtgcctccatggaactgcaaacctgcgatagtagtacaacaaatgcataatttatccacttcaagccctgggaaaatcccatattacaaaagggtccctcccttcttttcgatgcccataccgcggcttcccctcctcctcaagatcgccgccgcgaccgccgccggcgcgttggcgctcattgtcgcggcggggctccggcgggatgacgccgtcgcctccctccggcgggagatacgcgacgccgtcgccgccctcgtggcgagcaacgaggacggcgtcgtcgagggggagggcgaaggcgaggacgccgccgaggccccggcgccgtccgtgctgatcacggggttccgcgcccacgggaagagctcgctggtgaacacggcgtgccgcgcgctcgcggccgaggaaggcccgctgctgctgcgcgcggaggcgtcgccgccgggcggcgggtccgacggcacgcggaagcggcggagggtgaaggcggcggtggccggggatagcggtgacgcggggacggacgaagccgtggtggagcttctggacgcgcctccgctccccgaggcgacgagggccacgagagctgacatcgatgcggcgatcagcggggggaacccggagtgcgtggtgctggcgctgcgctgcgacgcgcccgcgaaggagcggaacgccgccgtgaagcgcctgccggagatctccgccgccgtgagggcgaaaggttagtctgctcagcttcaagaaggttctagaactcggcaacttagcaacagtagcattgaagcattattctcaatatctcatttactatgttagtagtattccttttgcgcgtttgcgaaaaaaaaaaactatgttagtagtataatttttcgtagatatctcggatgcttagacaatgctatattgctatgtccttagaagaaagaagatgatgcgatttcgcatcgtccaatgtaggatagttgtgaattgtgattgcttaaagaaatagatgcaattttctaccatgtaggtaaaaggcaagggatggtaatttctgcaggtttggtttgtggacacttgatggttaactagattgtcagttttgaatagttttctgatagagatttgctatcatttggactggtcccctggtgtcatgttgtcatctttatgttcaggtgtgaccgtcagcagttaccaaatattgactgtttgatggagctttttgtgttattaatacacgagcacagatgctgtgctgatatatgctaatatgcatatttttcgaaaccatgaagtagtgcagtatattttgtctataatgtcctgaaagataaccctttctgatccaaacttgtgtagttgtgttagaatcagggtattgcaaatgttcatggagattcctttgtttctctctttcttccacatctatgaagaccttgctattaccatattttactcagcatatgttagcaaagatgaatatatttgttgacgagcacttgttaacaggtctgaatttgattgttgtattgactttcaagaaggccatgagatcagcaagacaagctgaagagctcatacgagaggtttcattcagggcgagaacagattgtgtctacttcatcgagaactacacctggaacaataatggtcccaaccttcgccatcctcctgtcatcaagaacgactttgagacacatttcacggttctgacaatcattcgacagtgccttgagttcatcaaattaaataggagtcaatccaagcgggaggaaaatggtgagaagggtaattcaggagatgttaaaggtatactggaaaaagtcttaacagcaaatgctaaatcttcaggagaacttagcgttaaacctgcactggaaaaagtcttaacggcaaatgctaaatcttcaggagaactgagcgttaaacctgcagatgtcaaacctgttctgactgttcaatgattattactgaaatgtcagagcaattcgtgcgcacactcaatcatcacacatttgcacaggtatgacttactgcagtactttgtatgcgttgtatgaggtagtttgctacactgcacaaagtgtatgttcattcattcatccgttctgtatgatgttatataggtctttttatttgggtgtgtggcacataactgatttgttggtattgccatcatctagagacataattaaagaaagtgcctagaaaaaagcaaagtggaaagcctcttgctatatatcatcgctgtttaacatcactccatacaactctaactcaccaatattatatgatagcattacataggataactttatacattatagtcaattccactataatcaagtcccaagatatacttataaatatatagagatttggacgaaacatgaataaaccatcaatgttggctcttccttattctcttcaaccgatcagttcagccttcagaaatccaggcaccaacagtagtaatctgaacccgagagtgccaggagttcttctgggctcatcctctctagctccctctgcctccaggctgggtagttgttctgcgtctcacctgaaccggaggcgtagtctctcgggtgggcttgcgatctcatcctaatgtacagcctcatcgctgccacgcaatcttcatagggatcctgaatgccagtgtggatatcatacctgcaatagggattcaaggatagtatcttcaacattaataatgcaaagtctaagagtctatagagattgtacagctgacttagcaagtttgcatacccaagatatgcctgtgtaaggtactttagggagttgctcagcttgctagttttcatcagtggtgggtactttgcagtatccctgaaaaaaatgcagagataaattgtgtcagcaagggagaaactggcaaggtctaatttgcagcaaattaatttgccttgtgctgctgacctgatcatgaatgccgggtactccagtcccaggcgctcaagttcatgctccaggccatggccaacgaggatccttgccctcccagagctccttggccgtatcttccatagtggctcaccgttgcacaggatgtcctggatcctcctctgcacaagcttcagtggcattgcgtccctcaagtactccggccttatcccagtcatttcatacctgaacagaaacatcataaatcatcccctcattcatcatctcataaaactatccatcgatctatgcctttaatttctactgctagtttctatagcagtatgtttattgctcggttttccattatgtcttttctgcttttctggtccgatagatctacacatgcgaacaatgacagctaaaaattgtactactagctaacactcagaaacatcatcagtaataaaataatggatcatctcctatatattttacctgtagtttgtgacggtcgtggtgggtttcacataggtctggaagatgacgttctcgtcctctccgatcaggcacaccctcgcgcagatgtcgagcgagccatcgcttcctcctccgaccatcttacacgccatggccaccgcacggcctccgtagctacccctgggcatctgcatgcaaacgcaagaaaaccacgggcaaattcagcaacaagccttgcaaactagcatgcgcagtgtaactgaggtgagaggggattacataccggggcggcgcgggtgaactggcaggtggaggcgcggtggtatctgacggcggcggcgctgtcgaagaggttgaggcagatgctgcagccgcgggccgcgaacacgcgcgcgcactccaccttgggcaacggccctgcatgcgcacggcgtacgcgagaaaccgtcagataccacgcgaaaactccacaaaaactagctcgttgcatcaaccgagcaaattaaaaacggctacttgtgtactcaccgatgaggtgctcgcggagggactcgagggagcggcagtgcttggcgcagacgccgcagcggggctcgtgggcggagtggaacgacaccttcatgtgctccaccaggtgctccatccggttgtactgcctgtagcacgccgcgcatttgttcctgcgagatcatcattttcattcatcgattgagttcgatcgcgtctttagaatatcgcgagcgaggcactatgcacgcatttatgaaattctgattctttgcaccggcaataggggataagaaagttgaaaaggtactcattcattcgtgcgcagaatatgtagtatcatatatacatgcatattcaaggtattgaatggaactagctaggacaagaaaaaaaagggtcctatatatctagctcgatgtttagagcacgagaagaacgtactaccatgcatgattaaagcttgattaattagctagttcatcacacaccagtcttgcatgctcagctcatcttgcaatactactgtagtaatggcattcagtttgtgaccatcttacctcagggtctccgaggactccctcctgctgtccatcatatatagcactactacaactcctgctgatcgagaattaaggtttctgtctctagttgctcttactgatcggtcgaccaaggtttctgatcgatcagttgtctccctgaaacctcgaggggcgctagttagctaggttggtgaggacggtaggcaacatggagaggctatttatagaggcaacaaacgttgaaaggatggaagaaccttcacgaggaagaaggaatgacccctgggaatcaccgtcttgtcgtcactgctgcatgcattctgaggaataagcctgcagtttatcgtaatctagctagtttagtatgggatatatgcttcctagtatctaaggttcctttcttgatctgtctttaccttttcttagggacacacagacacctaggctccttaagtagttgtcactcctaaaacacttttaacacgttgtttggagactttagttaatgacatgtgttaaacagtgcagcatcaaaacccagccttcaaaccttcacgttggaaatgctacatttgggacaacatgctagctagctagtgcaagtgtgtgtaactcatcaaggtaaagcacatatatttacattctgttgatcgaaaatcgggggcaaaggtagaaaagatctgaaaaattaaccgcgcagaattttatctccccatcggtcgaaagcgggaaattctggctgtcgctacaacgtactcgttcacattctttcagcaacgatatgtaaattcagacgccgattttttcttttccccggcctctagtcatcaagtgtcgactcgatcggtcaagcgactcatgaaaaatatataatctaggttcgctgttctgaatcttgtaaagaccaagttgcgcgacggcgagatcagttttcgatcgatccgccaaggtgatcacatcaggctgcagtgtatacgtcgagtccgcttgcaagcaacgctggtcacctcatctgtcgatcggctatacgtcgatgagaagaggagggagctggcccgtacgtgtgcaactgtgcatggaggaggagaggaaagcacagtggcattgaccgtgtgcatcaggtgcagctgagaggagtggcctttaatttgccctaactaatggagtagcagcaaccagcagctagctagattgttctgtgctgtgctgctgtggtttgatcgatggatggatctgtataggttgggttggtcatggggagggaaaaggtagatattcccggtcaaaaagatggccgtggaaaggggccggggtggggggaatgagatgagcgggcgacggcgacggatctccgggaaagagagataggcgacgaggagcgagggctccatctctcgtttctctccgtcgcggattggtggcgcgcggggcgaggtgggccgaggagctaagccccggcccgcccggaattccaccgatcgagagagagagagagagagaagccgcgctagtcaaaggaagctcccgtgacggagacggggccggattccctgtcccccgcacgggccgtcgcgcgcctgtgcatggtcggtcggtcgatcgctcgcccgcgcgacgtcgaccgcgacccgcgcgctgcggtatcggaaaaatctcctgctgcatgcttttcactgcaatcataggagggaggaaggtagatagcccagcccggccagcgcctattcttgcagctgattgatcaccatgcagcacagttcttctcttcttacgtatatactacagccgtcctaaaatattactacctataatagcgccgtgtttagatacaaagtttttcttcaaactttcaactttttcatcacatcaaaacttttctacacacacaaatttctaacttttccgtcacatagttccaatttcaactaaacttccaatttcggcgtgaactaaacactccctaggtaataaattaaataacaaattaatctggactcactttgtccaaattctcgtattagaatttattacatgagaacattttcggagggggaaagtatctctcatgtcgttgatgcttctcttccggctagctccacaaggtggtgggttagacgacctgggttcgaagcctctccccttctaatgatttgatattagttccttccctaatattcacgtcttttgttgatgcttctcttgtttgtcccacggatgcttaatttaccgagttatttgcagctccatttcgataagtttggacttaattaacttgtgatatattctatcatggcaaaaggaacacattttagattctccatgtcctaaatcctctaccccgccatccacaatctggcatgtggctcgcatctgtgcatcagacggctatacttacaatgacatataaattttatgagtttttttattaaaaaatatacatctaaaacagttttaaaagaagacaccacgttcattgtaaaggttagaaatttcaacattaaccagagaaaaaaagtttacgtaagaatacaattttgaaataactgaaaattaaaataaaaaaagaaatatcgaaataatattcaatatgtataacacaatacaagattagttgcaatttaatataaaaaatataacttagacattacaaaaatataaataatagtccaagtaggaatacaacttagaaataactaaaatccagaataaaaaagaatattaaaagaagagaccatatggaacacatcacaagattaattaaaattcgaaacaacaaataaaataaattctaaaattagaaaaatagatattttaaataggaatacaatttagaaataaacaaaatttgaaataaaaaaagaaatattgaaaaacaatccatgtagaacccaacacaagattaactaaagtttaaaacaaatacaaatataaaattagaaaatagaaaaataaaaataagagttcaagtagcaaaacaatttaaaaataacaaaaaaataaaaataaaacaagaaatattgaaacatagtctattttagaacacaacgatggcaaataacgacaaagagatgaataacatacaagatgtaaagtggtagaatggtggcggttgatgggaaatctaaaaactataaaacaacacctcaatgatgattgggtatgattttaagaatcacaatgatggttaagaggagggatagtggcaggccatgaagagtagtgtcatgtgtcatggtggttgacaggacctctagaaagttgaaaaagggacccaacgataattacattcaatttttaaaattccaacaataaacaagatgagagcgggcatggttataaaggagtatagttatgaaatttgtcgggtactctaagaacttaaaaatgagaacctgatgagactgatttttaaaggtcccaaataaaatgaatagaagttatgtcagattgagcaagaaaataaagctggcaaaagagtaagggggtgaccgatggtgtgacttttaaaaactataaaattgaatacccgatgatgataatattcgtttttaaaaatcttaagacaacaagatgactatttagcaaattttaaagaaaatcatatgtaaaattttatataattttgaatgggtgcgccatgcaattgcgtggaccacccaactagttttttagttacaatgttatatttgtcaggaacatatcttgtatgcacaaacttcatgtgcacaccccatgcataccatgtcacaaaaaaaatctagaaaaaaaatcgtgcatatactttcaatagtgttacacctatgtgtaaaatcttaatatcaaattcattatattttagcggtataaaaaaatctgaaagtattttttgttgctatttatgtagaatgaattcgaaggcgggactttacacgtaaatgtaatattactgaagtacatgtataatttttaatacattttttagtgataattgttagttggtatgcacgatgtatacacgtgaaagtttgtgtgcataagatacaccatatatgtcactatataaattttatccgcaagctctagcattcactaaaggagatgtacattaatcccatgtggatgaggtataataactgcgtaaatattccttccgttttagatcacttttcactatagaatttaaagtttttatcaaatacttgccatcctcacattacaaagtgagacgatctttcatctcctcaattcatcgatagctttgggaaacgattaatggaacatagttaataaggtaacgatgtataggtgcggaatttgctagaaaaataagaataatctgaaatggagggattagaatatatagttttgacttaaagttaaaaaaaagagagataccataatgctacaattttgacttttacaggcgctagccagtgcatttttctaaaactcccctttttaattgaatacatttttt

SEQ ID NO: 9862 - DNA, 17685 bp, Oryza sativa
ttcctgcagcccccgccgaacgcctcggcgtcgcaccctccaccgtacaccatcgcgcgctcccgcaccagcgccatgcgcatgcacactagtacactaccaacaaatacgatcactgcacccttcgtcgcctcggcaacgtacacgcgctcctccgtcgtcgatcagtcacacgcacacccttctcctcggcggcgcggcgtgtggtggtgcagtctgcagtgtggtgtagtgggcggcacgggtgggtttgtatatatacacgcgcgcggccgcggcagtcgggcacatggggagctcgggctaaacaaacaactcaagcgtggaggcgcgagtgcacgcgggcgcattaaatgctggaggtgggctcgctgatcgcggctgccgacgccgtgttcccggagccattcgccgtgccgctcacacgcacgcgggcgcgcgtcggggtgggaggatgacggcgtgcgctacagctaacgggagcgtggagcgcggcggagcgagcgggggagtcccacgtctcaagattcccgactcgtctccatgtcacgtggcccatgccatgcaagcagctggctgcggctgcggctcgctctcgccgctttgccgggccggccgcaatacgaccggcatattgtgcaagcccgcacgcacgcacgcacgctggggttgcggggtgagatgagaggtactagaccggtggggagatgagatgggatcggtgactgttttttttttctcttttgctgtgcctccgctcaacttactgtattctggccgtcaatcaatcatgcatgtcagtgacactaaacagggtgcgaggtgatcgatcgcgtaatttattgggtcaggttagcctggctggaattttctacataccctaagctattagatgtgtgcatgcttagctacacctgatttattgcaccgtgccaacacacgacctaattttctataaaatgctactacgtgtgtgtaactccaagttgatagcggtacatgtttctttagaatgtttatgggtattttagttattaacgttgttcggctgtcatttacagcacctaagccagttttcttgttctaggatataagtagttgcattggttgcgatactgtcaatagcagcggagcagcctcattaagttacctacgctaactaatttaacacaaaagcttaaagtgttgagaaaaggtttagactagagatctttagctctattatcgaaagtcacatgcatcgatcactgtcttcaagcaatttgtttacactccaacactaagtaactaggaaatgttttcttttacccgatttgtatgtttagtgcgaattctcagttctgtcgtgctgaattgatcatctgacttgggatttaaccgagtataatcaaggagccgtgatcgatctgaactccctacagttggcaccttccgatcgtaatctcagccgtcgattcttaatccgacggccatcgaccctcacatccagcgacgttcgtgcaccgtggagtacagatcgagcagggaatgttattggcatatcttaagcaggatcctgatgacgtcccacacacagcaaggaggagggacaagatgcttcggattccgttaatacctgtcattgctgctcgctaatcaagcgccctggagtgtaattatattctctgctgctgttgccctgcctgtacttagctaagcttgtccctgacatgattaagaaactcgctgctgtccccccagcttgccttagtttttcttttattacatgtacacgagtctgtgattaatgcacttgtgttgtgacgactataattaataaacttgatattagcagtagtaatttctctccacacatccatggttgcttggtcattaatgccgttgattagcatgctgcttgcatcgatcctctgccacagtttcagcgaggaaaaagtatagtagcaagttggtgatcaagtagcgagtcaaggatgtctatctcgtttctacgtgcatgcacgtctacgtgtcgatcggttactacagtggacacatcgatcggtttaattttgatcaagctgatcgatatgattcacgcggattaattcagctagatatatagcccatgcacacgtcggtctccatcatccgattccgtgctgggtttaattcgcattgatgtcgcagaatcaagcaccacatgcccctccttaatttgccatatttacaggcttctcaatcgtgtgcaattcgtgtggttcctatatagcgaccactagatcgatcaaaaaaatccaggaaaagaaattaagtaaaaacctcgtgcatgcgtgatgcattagctagctatctgagtatatctactcttgatatgacgatcatcagtgattctgaatttctgatgatgaacctctgttactctgttagtacttacttggggcttggtgatcagtaattctgatgatgaacctctgttactctgttagcactggcctgcaccctacagggagaggtcaaagtctggagttttgagttgtaaatgatgacttttacggcgatgaagcgtgtgggatggagtagtaataatctggaggtcaacttggcaaaatcccatcgctgatgtgggaggattaggggcaattaatggcgttcgtgttcctcaattgatcccggcatgtggagctcattaaatgacggcgaccaatctggctggccaactaaccctgctcctcctccgattcccccttacctcttcgcgtaatcctaccggttaatcccagcatcaatcaagatcgagcaactgatccgattaggttatctactcttttccatgcgtcttgccatctcggcaactcctctcggattctcgcatcgaatgcttctgcaggcttcagcagcagatggagatcgatcgatcaagccggcgacgaaccgaccaccatctgacagtgagttcgttcgcgctagctagctgggagcacgcgtgcgtcgctgacatttcgcgggattttattcagacccacgcgtgcgcgtgcgcgatggccatccgatccgaaagaggggaaaaaagtatatttttactggctactctactgctacgaagaactcattccttaaaaaaaataatctagaaggatatgtgacccctcctaatataacgagattcgttatatctttttaggacggagggagtaatcatgtttgatgctgtgttgagttgatctgtaattgctgtgctcggtatgagacagttgttatttgttaagggtttcagttgagctaaggaaagacaggaggcaaagtgttaggttagctagtggctatctattcttgtgtgctatgaatgatagaatgatttatgataattattttatagtcaaacgaatgaattaaacagtgtaaagttgaaaattaatttaaaaccgtttatataagaaatttgtatattataaagtttttatatgatttgcaccatttagaggctcggaaaatattatttttattattccatttcattacaggaaaaacaacacacctctacctcaatttttaatatatggtgcattgatttttccttctgaaagtttgatcaacaatgtttattcagttacttagttaagtgaaatgaaaataatacaactagatctattatatatcaaaagcattttaaacatacctatagtatatttgtctatttgcacaaatatttgtcaagtgaattaagcaagtactagtaccttttgcacaataatattcatatactagtacttgcttaataatttctgtcttaattattgtattgttggggaaaagttcgatcgtaacatgccggatatgtgatattgtacttgcgataagatttacaattagtaagttgagagtagagtgggtagttcattacccgaattggcgcctagtgagagtattccaatcacgattatgtacttgtgataagatttataattagtacgttgccatagttggatatctatatatgtatggagtactcctagttcattgccgaaattaataaaagtgtacgtatacatatgcacctattcaaagtatttcaagtactcgacttgtcctctacataccaagctgtctggagtatctccgctgcttcgcctgtacaataattgtcgtttattatgagtatattaactaattatgattacaacgtactcgtacatgcacggcgtacgtgaaacatttacttcaataattatttttactggtgtaacttcctcttttacattgtttggttctgtgactctaatcatatatactccattcaaatccatctctctcggcgtgaataccgtcaaatgtgtactctgctttgaattggatttaagtataatcaggagaaatttaaaattgtaaagtttgattctcatgaataatgttaggcagatttttacttgttttaattagttctcaaattcaaaatcaacttaaaattaggtcaaccacacaggcaaggtaactcaacatagcatggctacaataatgataggccatcgaactaaatatgctattcttcttatgtgcaagacttttatgagttaaaaaaaactaaatattcacacacatgcacacaaaaaaaaatacctttactcatagcatatctataatttcttattttcgataaatatctgataataagaaactcgtatatttggggtcatgtttaagtgttgcatctctgcaaggaagatatcagttaaattaaagagagatttttatatatgttcgaacccttcttagagtaataagtatacatcttgtcagtcgggttatcggttttattaataccaaaagagtatggttacaaggatatatatggacctagtcaaggtttatatgctagtcttgttggggattccaacgagtttttattgatcagtgggtgcaccggctcgatggatcttgaggcttgatctctgactcaacgacatatcgacttgcggtggcatatgattgttgtgtcttggcttgcagagtatagatagttggataccagatacccatatggcctgcatatcgactaagatagaaggtaggccggatccatatgatatgagatggaataacatctgtttgccatattgccttgtatcctaaaatagcgtacagagaatcccaaccgaacaatgctatggatagataaggtaaccgaaggcgtgttcggctaggtttcctaacttgtaacactaccccctaacatatataagacatgcagggatcccctcgagggcaacagagaataagaaacaccaaatcgacacaatatcaatacatcaggcataatacaatccatcaaaataggagtaggatattacctcacatcgagagcctaaagctatataaacccatgtcttctgcatccatccacttttagatcttgtgcgtagcccctaaattagtattgatacaaaacttcggtatgtacattatatatactatatagttagaacccagctaactctaaaccttaacacatatacctgccacatcatcacttactataaattattacctaaagctcatataagcatggcatatcatccaacttataacgttttagaactcaagcatgtcaaatcatcatcttccatatagttttcacaatatttcaaaatatatctgtcgacgtttgagatcacgactacggtatttgcatgatatggagatcgttggtactaaggtatatgtgagattgaggtaaaaaagatagagacaaggatttttatacaggttcgagccccttcataggaaggtaacaaccctactcctgttggccgaagccggtgttgctctttattcgtctgaatcacataagtacaacaattaggacaacctatctagctgccgtcgacatggcggcacggacaccaacacgtagtcgacgacagggtaatcttcctcctcgaatatgaactcatcgagattagagatggcgttagatccctcttgtcggcctccacaggcaccatattgggtttgtctaggctaatctctgatgtcgatgtcaggcttgtcttggcttgtgtgttgtgtgtctcctctcctcataggaggtcttgtatttatacccatagatattctcttgtccaagtagaactagggagacaagtatggatatgatccgagtagtcgttgtcgttttcatatagaactctactcgtcctttcttatctggaactccttatatatatgaggtatgattccgtataagacttggtatatggtgggccctgcagagcttaatcgattgctgttaggtacgtggtatctataaccatgacaatatctcttcatcttttttacaatagttaacatacattcattcatatgtccctaacaaaacatggggtatcatctagttactaacaattattacaccttagaagtcacaaaaaatatcatattatcacgcaccagcaattattacaactaaagagctcatcatgcaagcatgcaccatcatctccatcacatcattttcacgatatttttaacttatacttattcatcatactataatattcaatatatatttattcatgtatttcgcggtaaaacgcgtgacattatttagcatagctatggtatatatatatatatatatatatatatatatatatatatatatatatatatatatatatatatatatatatatatatataatcactagctagctaggccgtactcctgtctgttggccctgactagttggggaaaagaaaatttttaggtgtcacatcggatatttgaccagatatcggaaggggtttttcggacacaataaaaaaactaatttcgtaactcacttgaaaaccacgagacgaattttttgagcctaattaagccgtcattagcacatgtggattactgtggcacttatggctaatcatggactaattcgactcaaaagattcgtctcgcgatttccatacaaactgtgtaattagttttttttatctatatttaatactacaatgtgtgtccaaacattcgatgtgattttttgagaaaaaattttgggaactacaccagaccttagtgtgtcattaatcagttcaaatctgaactaaggtgaaccaatcagatttataagcaaagaactctaatacggaatctaacctatagcgtggtggcttgttattattgttgattttttcacacattaattgcaataatattctctctgttgatcagcttccagtgagatcagaagaacatgagacgacatgcagcgcactcatgcatatgcattcgaacactgatagttatgatagttttagctgccgctaatgtggatcgatcttaataatactaaaccgaaagcttgtaaagtcagctaacttaattagccactggggctgtcttgtttagtcaggttccatttatgatgcctgtagttggtgtaattggtcaaataatattctactgcaagtttaccttttaaatttttctgtgttgcaaaactagccagtgaaatttgcacaatcgtgcataccatgcaaagctgcgtgaatcgtgccgttgtgtatcctgtagatgctacagcctacatgcatatgcttggtcggtacagatcactgtacagtgagcagtaattatgcatcgactcagatatttgtcccagctcgataacttcctgcatatgctagtaatagtttgtgtagatatacgtccaaaaaatagtttgtgtgcgtatatatgcatgctgatatatatagatgattcgcactgaaacatgtacaaattaaactcgatcgtgataatgtttcggtgcctgaccaacgaacgccgctcttgctgttgcgcagattcattgggaaaaaagaagtctgttcatttatttggaagtcgcgaaaatccctgggtaacgtagtcggtcgctaggtcatcacactgaggccagtcacaatccaaaacattagacatagttttcgtaaactttacatcataaaaaaagtagtactagacactactctttcaatacaaacactatatttccatacttaaatttaatgctacttatctcacatgatgtcttggatgttgtttagaaatcatgtctcatgcaagacccggtttaattctctttcctcatttattcacttaccacatcatctttcaatctaggtgtcaccttatttaatgctatggatatcatcctagtcagagcaaggttaatagtatagccaattactagctccaaattatccatagcgcgccaatctaatagctaattcatataatagttatctagaaatatatactacactattaatctggtcacacctatcatacatacattgcgtcttgtagcccgtgctgtatctggctataaatctatagcccgctgctcttctctctcatattttatctccttaaaatatgtttatagttgtcttgtagtctgctatcgtacctgctctcattggattagaaatggcctgatagtgtgagaatatatttaagtcctctttttttcttttccttttctcccctgcctcttactctcctatttgtttagccgttcctgtaaattttgttcctcttaatacaaaagtgaataattcttttacgtataaaaaaaagtcacgatcgaaacaacaatttgtcttttaagagtagtctggctctgggatggaatatgccgtatattaaactgaagcagctatggctgtatttagatcagcgtaaagtttgaattttggttgaaattaaagatggtgtgactgaaaaattatgtgtatatgacagattgatgtaatgaaaaaggactgaaatttagatccaaacacagactgtggaaaattatgttagatatactgcaactcgtaacgaagtcgtaacagactacgtctacgttctgcatgcagacttttgagtctgcttccgtattagagtagactagctgctagctgcctagctctccctgaaatgtgaggacacagctgggcttcgagattttccttttattaatgggtggcagccttgttaggtgatagacagaagaacaagctctctctctctctctcttcttcttcttcttcttcttcttctcgtcgtcgtcgtttgatttgttcatgacaaacagctacttaaagattctactagtatgtgtatatatgtactgtacaacacaaaagtgttaagccttatcttaaagctataggcagtaacttaacagaaataacggacagattgtcgcgtatgtaactacgctagtaggtactgtactagctacttagagcaaatttaatagtatagccaactactaactctaattaatctatagccaatctaatagctcattcatacaatagttacatactacactattaatacctggccccacctgtcatatacacactgcgtcttggagttcgtgctacagctggctataaatttgtagcccgctgctcttctctctccttatttattttcttaaaatatgtttgtagctggcttatagcctgctattgtacctgctcttagcattggatatctccaagtccattcgtgtgcgtgcagaattttattactgcacccgttaggatctatcgatgcacgcatggcttccagcagacagtgcaaaccgacgaccgatcgatcgcacgtgtgatccgcagttgcattcactgcaatagaaagcactcaagcgtgcgaagaggatcgattcatgccgtcgaaactgtgtgggtatagttactgaaggcagactgaatttagtagtgtttgtgtttcagtttcctgtacctgcatatgacagattatactataccgtgaatcgatcccggagtggcataattgatttgggggtttgagacaaaaccattgttaatttttccattaattgtaggagtaaacccggttgccattaatttcctccacgtgcattaagagtttaacaatctatggctcattaaagtgctgagcactgttcactgaaatcttattgggggcccactagcaggattctaaaccaatcagattgatgttattactgtgttgtgaatattctgatgatccagtaactgcattttgtttttccccaaaggttgttctagaagcattgctcgtgcagcgcccagagcccaagacaaattaaaacctgtcgtcccgttattttcgtgatgaggattctatctcagattttattagcatgttttttaaatagctaacgtaaaaaaaaatatatatataaaaagttcctaaaaaatatcagctaaattaatttttaaaatttgacataattaataattaattaatcatactctaataattttctcattcgtatgtccatatttaatctttatcttcatcttttcgaacgggccttctctgcaattcatatactaatactcatgtataggggcatatcatcatgtattgtcatgactgaggttagttgaggtttaagctggctgaggtttctatagcaaatgtcagatgctaatcataagttgattagccatgaaaagcttcacaatgcacttaagaaatcagcagactagtagtgcaagaaaatggcacaagaaaacaaaaggactcattaattattgtagtcggctattagggtagtcccaaccctccacctaggatgatgtatatagcattaagtacattgccatgtaggacttttaacttatgtgtcactatattaattaagagagagagagtgaagagaggaagaaaccgggtctcatgcaagacacagcttcaacacgagaacctatgcactagacactatcaagttttgcattgcgagagaatagtgtcttcataatagatatagaataaatatgattggtagagaagagagatgatgtatttattaatggcccattttaagaaaccatgggttgtggagtatagtttctattgtgatgtcttattgacacggcaccatagacactacttatggacactatgggttgggactgcccttaggcagccattagacaattcaccatttttttcaagactttgcaattcattcatgtctcttccaagacacaaggctagcagtgaccactcagggtgtgttagttccatggacaatgagtgagatagcacatcgttttccgcgcccacgtttcccaaactattaaacggtgtgtttttttaaaaaaatttctatagaaaaattgctttaaaaaatcatattaatccatttttacaatttaaaatagttaatactcaattaatcacatgctaatgactcatctcgttttgcgtatcttcccaatcttttcaatcccctattcctcaaactcaccctcagtgatcaatttggtcagaaaaacaaaagagagctagagaaacattaatgactggtacatcagtaataacatatatactacacattattgcattatgggtttgaggaacaaataaattgattcataagcagattccatctgatgattcagtctgacgaatatacagtatattcatataacctgatcattttgtgagcacttcgaagcgcaagaaaaagatactgcaatttggtgtggatcctgtagactatatagttaagaaacataagttaattgcaagtattcagagtagtaattacacgtacatgcatgcgcgcaacttaacgacatacatattactataagatcaacctaatcaattaggaatcacacagctcaaaggttctggatcatatcataaatcaactggagtaggtaataatgtcctgattgtcttctccagccctactggggacaagttacaattgagaaagaaaaacaattattggctatttggctgtatcccatgcagtagataaccatttcatgaacactttgactgcagggaccaatgaactcctaccagtcaggctatatatcagattatgcagctctctcctggtacactgcacactgttcaagttcattcgtcccctcaaatgtctgctagtaacttagtaagtatattatttccacttacatgcaactaattaaggcgaggttaccattgatatacgcactaagtacgatgtagagctgccccaagcctggtatcaggagacagccggctgctagatgcaatgttctgcagtcacaaaaacaaaagatgcaccctagaaagtaaaatggataactaccttgcgtgcagggtgatgcttggtgaagaaccgcatgaccagtcaagaggatgaacagaaagtttgattaagtatgatcatgggggtgtgtagctgtgttgttttgacttcatgtaattatgctccgtgattggttttaatacctgtaatacagagctttgtgtttggatgtcctcgttgtatgggacataatacgtactaggattccattacatcgattttgaagaagttttatggggtaaacgaaaaaaaatgcgtatctatacgatcctaggagcatgtttcataatatttttgaacgattgagtagcattgtttttcattaaatagaaggggtattgttcatttttagcccctacaacctttctgaaagttcattttacatatctgaactacaaattggttatttttcaacccctacttttaaaatcgtaaaaataacaaccttaaacatgtgtttagtggttttgtttgaaatagttgcgaatcttagaaatttttatgagttttagcaagcctaacaataaattataaagtatacccaattctatacaaatctataaattattttgggctgagcatttgctttgttagtttgctctaagcatgttaattaagcatgtacaatacactactgattttgccaatgacgactaagtaagataattagcaatagtaaggtaattatgattaatttactgaggtatggctgcatgcaagccggcggagcccggacaagtggccaccaggcgccggctccgccgctggtttgaaatggacatactttgagaactaaataaagataaacatcaaacaaaatccaaagcctaagtggctaagtccatgcatgaacaatgctttgaatgcggtggtatatataatctcttcacggtacaggttaactatatacagataactcgtacattaggttgcatgcgttataattaataatttattacctccatattttaatatatgacgccgttaaattttgtccaacgtttgaccattcgtcttattcaaaaaatttatgtaattattatttattttattgtgacttgattcatcatcaaatgttctttaagcatgacataaatattttcatatttgcataaatttttttttgaataaaacgaattgtcaaacgttggtcaaagagtcaacggcgtcgtacattaaagttacagagggagtaattctctacaagtgtaaatatatggactatatgtacaacattaagcagcatgcatttgtactatgtttctaaaagaaagaaaaatactaagcagcctgctgcacatttgcacgtacggttcgaccatcaaacagacaacaccccttctatttctcttgcattgtctccactctctcgacagtgtgagcgtctcttaaggcctaagcatccaaaatctgaagatttcttcgtgcatgggccaccgtcggtaggcctcacctgcctcctgtgccctcgtgggccgtcgccggtgtctcgcgttgcaccggcaggcggcagcgtcgctctcgcccccattgaacgtacgcgtcaaggcctccatggctccgccgaggagtctgacagttttttatttaacttcttttttatcactttcatgtggcctcatgtttacacgtcagcgagtctaatcacgatttgttctgactgctgccacgccagcagatgcaggcatgcagcttcccaaaccactggaaaaatcgattcgcacatgttttcaaagttggagatgggatatacccgaatttagggttgaaggatgcgattcgaacaaaggcaataggtaagggatgcaaaatagacttatattaaaaaaggaaaatatccattttacctctattaactaccgatagaccgagtttgattcacatctcttaattgtaaaatcaattaagatcggatgtataggctcgtttaatgttagaattgaaataatttattttctcatacggtttagatgagagtcttgttctacgtatcattttgatctggtcttttatacgacacgatgcctacggaatacatagtattctaacatctattattttaaaaattaaagatgtttttaccgatattttggtacgtcatccgtgtataagttggtttttaagttcgtttgcttttggaaatacatatccatatttgagtcggcttttaagatcattcacttttggtaatacaaaatgaatcatataataaatccgtttaaaaaaaacttgcatgctaacttagagtctgatagtcccctaactgcaactcatgattttctaaaaatatatatccaagcgaactcccacagtgaatttcatcttaactaaaccatataacaataataagattaaaataaactttatccgttgcaacgtacgggtattttttccagcagttgaaaatttttaaaaagaagacaagacccacaaacgtgaaggtcccttggaaaaaaagtaaaataccaatggctccacgtgtcatcctctcccattatttctctcctctctttctctctctctccacgaaccccaaggtacaagcttttactgtgcaagtcttttttccccaggtacgtacaaactttgagaccttatagtaggagatcgaggtattatatagttggagaccgaagctgactgcaacccccttcaacgtacaggccaccatgcacatatgcgtaggtgcaatccgtgaccactgaaaacccacggatcgatcgatcgatcagccaacctacgtacgtacgtacgtacgcgttccgcccgttagtgctcatcgccggcccggccgcgcgccgtccgtacgtcgtcgcatcatatcacacgtactgacgtacccatgccgccgccgtgttgcaagtcgtgcggtcgcgccggcggcgtcatcggcgtcgagatatcgagcttcccgggcacgccgccactgcagcgtcgtcgtcggctccgccgccaccgtcacctttggacgactaccatgcgcgattgaagacgaggttttccgctaggacattgctcttcatcttccgggtacgtacgcgttcgtaactcgtagtaagtgtgtatatatactaatatcagacagatcgatgctagctgcatgcacgcagagttcgttaaattcgtctgacgccatatagtacatgacgcgcttgattaattactttctcacggatcaaagcttaataacttgatcgatctatgcctcttaactttctgaatcttcgtaacgaaattctgcctagctcggtttgattttctatgcgtttccaagaaaaaatacacgcgatagcggagccaaattttctaatcctagggcttaaataaaactcagttaataggatattggctttctaaaaagaaattgtatgatggtttaaaaatatttacatataattaattgattatgaaggcaaacctaggtcggcttgccctaggcttgcctccacccttgaaaacacacgtacatgtaagtaaatgtaacatgtacaaacgatgctacaagtagttaactctggactaattctattatacaaattagggcatttaatttgttcagcaaattccttatatgtggacagtcagacacttcctaaagcaaaattcactttcgatcatagttttttattaccagtgtttcactttgtattatattttaagcaatgtttttacttaatcaagtaattttacctttatttcgccttgaaccatcctaactcccttctcaagcatataaacgatttcgagtacactagcttttactcgttaattaagtcccactgttatactaaaactatcgttttgacatatgataagttgatggaaatttataaaatagtcaagggtggtgtactgttgtaaagtgtcacaaaggtaaatccactctgttcaaagtgaaaatatttgttaaaagaggatttaaaccgaaacaatggcaataaaatgtgacgaaaattgaaatttactcagttttttataagtgagacacttgctaactgattttttttattttgctggttgaattgatgcagggtctgatgctcttgctgtggctgtatttgttcgattgcatgagaacatacgtgaccgactacgttggcgacggagactcgtggtttactaagtttgttttgtttgttgtagccgtgcccatggctgacctttttagcatcttcgcgtggctatgccttcggctccctttgcccggatgcagcccacttgaacgtccaagagatttttaagtggtaaattttgaggtcaattataagtaggagttatttacgcaattgtacacgctatgcaccaacctcactttcatgtctatagagtaattaatataagatgtagaagttacatttttgtcttttctttatgggtccatattttcttttctcgaagcgatcgacatgttcatctacttcgatacatcgatgctatatgcgaacttgctaggcccctctgaataaaaaaaattatggaggaatttcataatgtagaaattctataggcaattttcctatgtagatctttgattcaaagaattggagttttccaaattctataaaatttctatgaaatagctcgttgcacgtagattttgaagaaaacttagtaaaaggtttaacctcttgaaaaattcctttgagtctatctctcttatcagattcctgtgtttttcctgcagtctaatcaaatgaccagccatttttgtgtttttaataattatctactttatatttgtatttatgttagaattctatattttttctattcctcgtattttccttcctactattgaaagggaccctaaattttatttggccagcaggcattattaattctgcgtttctgaacaatctataaatcaaaacttgtatatagttacaattaaactcaagaaataaatacggccgaggagaaggagaacacttaaatattataggttacaataaacttaattatattgtaccctcgatactaagagcatgacgaaagcgatcactaatagagctcctcaaataccataagatgagatcgtttgctcattgtcagggagtcaacctgggatgctcatcctcgccacttacattatcatgaacgttccatactatcaccagcgagaaaatttgtcattatattatattatgctaccgttggaaacggttttctctagaatttcatctcgcgtgtagaaattaaatgccacccttgaacggtggcaccgccgcgaccttcttcaacaggagcctcatgtcatttggtcgagaagttcagatctatttatactaccacatcaacgccaccgttgagagggcgccgtcgccgtcgaggccgttagggggagggacggctgtcaccgccgtctccgccgcaccccgccgtcactgcgccgtgccggcgagacaggaaggagagcgggagagggaacgcggacgccgccgtcgtcgccgttgacgctgccacacccgccgtcgccgcaccatgccggcgagaagggagggagaagggaaggaaagtggcgccggtggtgggagagacggcaccggtggcgggggagg

SEQ ID NO: 9863 - DNA, 17907 bp, Oryza sativa
ccccctaacattctgcacgctatccggtaaccaagttggaggccaaatggctcgtttgttaacaaattaagcaaatgattcggtctttctaatagcgacgagactccttatgtgggaaaggacgatgatgctgtaattgtgcccccaaacgctatggcaatcaaagggggtaggggaatggaggcatgttccgaacaaatcattctccagggcctacgcaacaggcccggactccagatctcatcattcctggtcactcgcttcaataatgctggcagggcagcagcagctagggcacacacacgccacaccaggcaacagagacggtacccctggttgtatgctagtggctcccctcctgtccatggctttcattaaacgccatgtctccaagaagagcattgctaagaagcaacggcgcaatgcagtcatggctcaaatgagtattatcactctcgtgagtgactaatatgatttttatagtaatatatacgtgatgagaacatcggcgttgcctgttcactgtgcaggactgcatgaatttgcaagatcagtgcaaggaacctttttaactgacgatcgagcagctgacaatctgaacttgaactgtcgaactgaaccgatcagttaatgaacatagctgacagaacagaagcaagcattcaagtagatgcgttaaatgttttaattgtttctaggactatcatgttcatgaggttttaatgcaaagtaggagtacgtggtatagtagtactaagatgtgatctagtatgtgatcgatctcaccgtggtcagggcgcggaggcacttggagcagccggggacgcctggctccgcgcagtccttctccagcctcctcgccgccgcgtccgccggagcccattgcccgccttccgccggcggcgggccgcacgtcagcctcctcagcctcaccccgcagtagcagaacgccacgtcgcacgtcccgttggcgcccggcgggcgaggcagcgccgccccctccgcccgcagcgcgcggtccgcggcgcccgcgcacgcctccgagtcgtcgggcggcacgggcatgtccacggccgcggcggccgccgacttggccggcctctgcgcgagcgccgcgggcgcgtaggccgcaaacagccacgcggccagcggcgggcagcagcgcagcctcgtggtcagcgcgccgccgccgtcgacgcaggaggacgtcacggccgggaggagcgacggggacggggtcagcgggcacgtcgacgacgtcccagacgcggcgtccgactgctccgggaacgccgggatcgtggcgctccctggctgcgccggggtcgccgaggggaagatcagcgccgggtcgagcggcgccgggtccggcaatgccgccgccgtggagcacggcgcgaggcgggacgccgcggccacgtagaggcagaggaggaggagacggcggcgaagcggaggcatcgtctctctctcgtctcgcgtctcgcgcgcgcgcgcgtgcgtgcgtgcgtcgtgcgcggcgggcgcacgcgcgtggtggtttttctggttggatggattgagagagtgagagtgggagtgggcgagtgaagtgaaagcgtggagagtgaatgagtgatcggctatatgcctatatggacgaaatgatgagagaaagctttgtgctttgctggtctagagccaaagaacgcatgattagattggttcttgtataatgttcttccagagagcaaaaccagccgcagccttttgcaaagggagctcctttcatctgtggatcatttttatcgttttacagagagagctatcttctttctttctaccttgtcaaactttgtggggctgtgcattttcgagtgttgtttcagggaagctgcggaaggcgggttaaagtgacctcgctactcaattcagcttaaaaccagcagctttgttgtaatcctgtgtttgctttcagttcatttgctatccacttcaatgttcaaattaaccgtctgatcgagtgctactctagctagtatggcgtatagcacattgccactcgatgtttgctcatgcgtgaaggctgaaggcatcacatacgccctccttgtgtcacggtcatggctagtgttttgtttatgtgagacagagcagcatctcgcagcctacgtatagcctttgcagctgaggtaatactactactcgtatgctgccatgaatcattctggagagagcacagagtatcatgtgttactgctggcgtaatagtttacgactcgtggtaaggtaggtggatattcgttttgttttcagtgcgtgtattatactactccatcccgttctaaaatacttttcgttctaaaatatttaaccacttatcttatttaattaaaaaattataaaattattatttattttatttataacttgctttatcgtcaaaaagtattttaattataacttatctgtttttacatttgcactagttttttaaataagaccagaccaaacgttagaatcaaaaaatcaaacaacatctaatttgggaattgggacggaggtggaggtagtaccagtagtagtatacgaagctacagtgcatgcaccaggctaggatagatgctagtatgctacacatgctgataggagtgccaaactaagggcttattcgtttcaaatgaattgcaaagaaatattataggaatagaaatgagttttaaactatcattcattttataggaatgcactataggaaaactataggaaagttttctattcctccatttttgaaggaaaagcataggaaaaaataatccacttcaacctaatatttgcgtttcttgggttggtttgctcaataacataggaaaaatttctgagtttttcaatccataggtttacacatatatttctatagtattcctacgtttttcctattcatacgttttgaaaatcctgtgaaccgaatgagctctaagcaaatactccctccgtctcattttaaaggcagccatttttttccacgtccaactttgatcgtccgtcttgtttaatttttttttaaaaaaattaaaaacataagtcacgagtaaagtattattcatattttatcatctcataacaacaaatatactaattataaaaaaatttaaataagacgggcaatcaaagttgggtgcggaaactcataattgcacttaaaatggaacggagggtgtaggttattacaacgacatcacatctcacttgctgataatggtaccagtatttagttactacctccgtcccaaaataagtgcagccgtggatatccgtgcccaacatttgaccgtccgtcttatttgaaaattttgaaaatatttagtcacacataaagtactatttatgttttatcatctaatagcaataaaaatactaatcataaaaaaatttcaaataagacgaacggtcaaacgttgaacgtgaatagtgcaaaactgcatttattttgggacggagggagtaataactacgtcgtctgttcatctgtttttagccaaacacacgtagtatccacctagtaaatgtttacagattacaaagtcacagtatgacggaatgttttggaacaggagtcgctggcagagtgaacgagaaatgcgaaacggagagaacgtaatactagtaattcagacaacagaacgcatcgtccaaggagataaaacggatggtggcacacgccgtccgagcgcacgggatcgtcactcactgcacgcctacagcacacttacgacgtacggctattgctggcctgcacgccctgcagccaggagccattaacaaaagcgaaacactgtcgcctaccgcattccaccgcacggcagggaccgcaacacagcagcgccacgcggcggaagcgacgacgacgacacgccaagagcgcgactgcgattctgcgaaagccgagaggcgcctagccttgtgaggcggcgacagcctcgctttcaccgtctcacgcaccgggcggcggacgacggacgcgcggttgattgcctctcatccgcggcgcgtgagcggctgagcgcgtggaagcgaggcgcgcgcgacgtatttcttgctcgccttgaaggcgccacgaccagcggcgtgtggcgtcgcgcgtgcgcgggtggttgtggtttcactggctcggttttaatcccgtgcgtggcgcctgcggcggctgtcggtcacgggcgccaccagcgtccagcgagcgtgtcaagcgagacgtactactactactactactgaacctgaacggatggaatgttttgttggctctcgatcgtccttgttctctcgctcgctcccggagattccttcgagtttacacgcatgctgatgcacgcgctggttttttgggctgaggctgttcgtttcataacacgcctccgagcacgcgcacgcgcatgttggaatcatcaccgcgtaccatataaaatcctggagggatcagagctggagttgcatgctactggatgtacattgatctcactggcaatggagaggtgtgatgcctagtagagtagtaggccggcccacaagagctggggtcataagcccagcttgagttacggacaaaagttcacttttactcccttaagtagtggctggatccaattcatacccttcaaccgcaaaatcgggtataatcactttgccaagcccgactatttataaaccatgaaaaataaaacccttggttgttttgagagtggttttcgctaacatagtttctacatggcagccaactcataaaaaagaatttaaaaactaaagtgggatccacatgtaatcccctctctctccttccctctctgctcgtacctctctccccattgtcttctcagcacaaacagggtggctgctgggtggtagcaggcgatggcagcgaaggaattggggtgtgcacacggcggcgatggcatcccctaagcctaatccgtgcgacaatcgtcttcatcctttaaagccaagtgatcgtggtagctcatcgacgacgtctccaacatcgctatccttgctaagaagaagaccaagtggaagcggtattgcttccacgagcgggagaggccctttccgtcctcttcgccctctcctagttggctcaccgccctacggtggtcgtccccagctattcatggttggatatgatcgcgcatggtcccaccaacgaacatggtcaagaaagacaaaggggtggtcgatcacaatgacggcggtgaggcggagtcagagtcgggcatagtggtgcccccgcacaagtgcagcaacttctcattagctgtgatgttgacggcgcggcaggtgtgcccggtggtggagggccacgatgctgctggatctgcctccctcaccgagctcgggcctccagagttggtgcgcagaggtgacgacgatgaaccttcgaaattcccatggaatcaatccagcagcaaagggtgggggggcagcaaggacaacgtcaatctcccttcctcctttctcctccatctcctcgagccttatagagctcccgcttcgccgtcgagctcctcatcgcctgtagcggcaccactacaaaaaaatatatcctgcattcaaccctcagtgcgccccgagttgttcgccattgccgcgttgtcactaaccggtcgccaccgccgtcgccaccaccaacttccgaccgcagtgctgcacacctgcctcaccgtcggcctaactcgtacccggctcgccactcacgaggagaaagagggccgtggtggtggtggtgaccggtgagcgacaacgcagcgatgggccatgtttagggccagaccatagcctctctcggcccacttcattctacttgggccgaacttctcccacgagaaaggccatcgcccatcgctactgaactacgagtaccatcggattccgactttgcaggctacgacttcgacgaaccatgtacccaacatgccacaaaaccacaatatccaggcgagttttcttcgcttggccctcctgtcgaatcgagcagtcatacgtcgtgccgtcgtatcgtcgactcgtcgtcgtccaactccaaccttgcgcggcaaccgggtttccggtttccttctcctgcttacaaatcgtcgggcccgggcacctcgtgactactccctccgttccaataaaaaaaagacaaacactggtttcgtgtccaacgtttgaccatccgttttatttgaaaaaattatgaaaaaaattaaaaagataagtcacgcataaaatattaatcatgttttatcatctaacaacaacgcaagtacgaattaaaaaaaatttcatataagacgaacagtcaaagttggatacgaaaacccatacgaaaacccatagcttgtggacggagagagtacgtgagaacggagggaaaaaaaaaagaaacagcctgatatgcggccgtcaatcgcggcgcactccatcgtatctcatcatctcctctcccccaccgcgcgcgcgcgcagcccgcgtggttagatcccgtttctaccagcgcatatgatgtgcaaggcactccaagccagaaaaaaatataaatcgcgtggctcgcgagtacatgtatatacatatactgccgtagtgccatggatgggtgtacggaaaatcacaataatttctctctcttcttctaccttgtcatggccatcgccgtcaggccggacaatcaggtagaaacgccagcacgcacgccggcgatgaaagctcttttctttttctttcgccgggcgcttaaaacaaatctcttgtacatggacaacgactcaacatttcataagtttaccgcagtctcaacgatcgtacaattctagagcaaatgatggcgccgttgatcactcgggtcgctctcacaattaaacagaaaagttggcatcttgttcggttcgggcaagtgtggacaggccgctagttggagtaggtgtacgtggggtatgtgccgcggcgatggcgtcatgaggtcgtaggatgccgcgaggttagctcaacgacgaggcgctagtgcgcgcgcgtgcttggatgcttgcgggatttctttgacctcgggaggaagaggaggccaggtcggcaccggattgcgccttttgagtccatatttttcaggcctctgtttctttcagaagggtccatgtcaatcaaaggtcccattgctggttcgctaatgatggatggatcgatcggagatttcgcttttatcgttccgttgttaatttgaagagcatcttctagttgcggaatatgtcaggtttgcaagattttccacacccaaaagttcactttctgatgggttaaaaattaaaacaagaaaaggaagaacagagatgtcactagtaacagtgttcacaagtactttttctttcagtgaactgatgatatttacaagtacttgtgggtatgacgaccaaagaatgaaacaatctgtcaagctccctgtcgatttttttatctccacgctgttatttgtttcttatttttctcaatctccatcaccactagcttatcaaaactctcgtaataaacacagtttgagagagagagagagagaaataaaaaaagaagaaaaaaaacgacgtttttttttctttcttcttttttatcgtggctcgatcatggagatggacacgtcgttgacggactgcgtcttggtggtctccgtcttcatcgccagcgagaactccgacgccgagaccttcttcatctcccgcgccgcgaacagcggcggctgcgcgggctccggcagctgcatctggtcgctgatgagcatgagcaccacgttggacatggtcggccggagctcggggctctcctgcacgcacagcagcccgacgtggaagcaccgccacgcctcctccttcgagtagtcgccggcgagcgacgcgtccatgaactccgccgccttgtcctcgttccacagcttccatgcctgcacacgttcatatgaacacaaacaagttaaaaaaaaaagactctgcttttttttttaccagaaagagtttgatgcaaaaagtttctgaattttttttttacatcttggatcagggtttgctggttattctgaaggtacattgcgccattgcgttggccgctgaggatctcgagcacaagaacgccgaggctgaacacgtcagacttcaccgagaagacgccctccatcgcgtactccggcgccatgtacccactgcaaaatccatcggttcatttcaatacaagttgaggtaagatttgtgcttgatgagccatgagaaatcaggtgatcgatgcacatagtgcaaatacgttgacgtactatgtgcctacgacgtgtccggtgttgacctcgttgctctcctcctcgaagatcttggccatgccgaagtcggagatcttagggttcatcttgttgtcgaggagcacattgctcgccttgaggtctctgtggatgaccttgagacatgaatcctcgtggaggtagagcaaaccacgggcgatcccaaggatgatgctctgccgagtcttccagtccaattgagccctctttctggaatctgacgagacaaaaccgaattagatttacctcatggttactttagttttagactttcagtgttccaagatgaaatgaaacagagcttcagtacaggtcagatcggttaatctgaacagtttataattccaatcgggtttaactacacgcacgaagcacatggacctagtttgcttcccattgacctactttgcatcgatttggtaacttcgttagacttaaacgactcgaaaaaacaataaattatgcagagtgcagaaccacgagtccagctttgacgcaatcatgtgcgtatcccatgtgtatcagtttctcaccagccactaacaaattcaaacaatcacaaaaaatacctataatcctgcaagaatttataatgacaaaacaaaacaaaacaaaaaaacagtaacaaagagagaggaagcagacgaaccgaagaggaaggcatcgaggcttctgttagggaggtactcgtagatgagcatcttctcctccttctccacgcagcagccaagcagcctgaccaggttcctgtgctgcagcttggcgatcagctccacctcgttcctgaactccgccgcgccctgccgcgacctcgccgacagccgcttcaccgcgatctccgcgccaccgcccagaacaccctgatcatcacatccaagaacccaaacttcagtcgatgcaaattggcatatatcaggagtagtgctatttccaggacaaaatctagaaaaatttgctggtgttcataccctgtagacagggccgaagccgccttcgccgagcttgttctccttggagaattggttggtggcgtcgtacatggaggagaggtccatgagaggcaggtccgagttggacagtggcctcaggctctctatctgcgccctcctgacggctgcaaaggaaccaagaaaaccaaatgtaacaattcacaaatttgcagcgtttgcggattgatcatggctgaataatcgatcgatcgatcgatcttaccgttgcgcttcctccatctccagcagtacacgcagtagaagagggtgcagatgatgaccaccaccagaatcgacaccattatcggcatcccattgtggctcgagtgccctggtgcaacaaaccaagaacgcgtaccctgacgccagttcagtcaccttcttccaactcaagaacacgaacatacacacactgcaatatcttcagcaagaaagaaaactgcgcgtacgtacctcctgaatcagtcgcgggtgttgtatccatcagccggcgatgtcgaaaacggtacaacgacgatccagcctcgccttcttctccccggctcttcatcaaaaccagttctctgatgagagaaagccttgggaaattttgcactgcttctctgcaggaatatatacctctcgtcactattgggttgttggagagaggttgcaggctagctagctagcttagccttaatctgaagattggctcgttagtggcttagtgcttactgttgtgctggcaccaatgtgtacagactacagagcatataagtacagctcaggtgagaggagaataaaatggatatgctgctgcctgctgcaggtatggggatggagagggagggggcgttgatggctgcaggatgaactggtttttcaaatgttgctgcaaatatttcatgcttgtccttttaggactgcaaattgtgctgcttgaccattgtgtggaacatgaacacctacgggtacagcgacccctctctctgttattctggttgttttctgatattggacggcagtggatgctgatcatccaaatttttgtccactgcttttgttcagttgttcttatcatcatcgcttgatttgctgatcaatcctgactgactcattctctcgcaaattaatccagctgtactataatctaatcctgccactacaacttgtgatgtgaacccaaacagtaggagtaagtaatcaacgctaacttttcacatgtgctgattcaggattaggtgactgtcaagggggcggtgtgcaagacaaccaccaaaaaggaattagtatctttttcctgccatgtttgagacgtgagcgtgtgaactaattaaagggcactgaaaccagggtaaggcttgtacagctataatgaaatgaaacggggaagtattaaagggttggaagtgtgtttgatttgattcccttttgacaaacgaggacacacgccatgaaaattatttctcggtgtggtgtgggtgcggtgcgtgtgcgtgtgggagcatgacaagctgggccacctcatcggcgtaggagcttgttgccttgtgcgtcaaatggtcaaaacgatttggcattttgtactggttggtagggcggatccggtggtggagatgcacgtttcgcctttttattttgcaaagaggagctaattaaggctatgtttgattcagctattataatctaaattattaggagtaagctgaaacaaatagatagcttattatgatagattgttataatctataagtcagattactataatctggtaagccactctaaaggtgcttttgctttttttaattattgggtggctaacagctaacaaacagataataatcagaaacaaacagctagcagcttattctatatcggcttattataatccagcttatagtaatctagttctataatctatattagaataatcttaagctgaaagaaacagggcctaagactgagttcttttattcactttcctaacttatctcccattttccacgtacatatttatcaaactattaaacggtacaaattttataaaactttttatacaaaagttattttaaaaaaatcatattaatcatttttaagttattttagctaatgcttaattaattatacattaataaaccatcatgttttccgtgcaaggagatggagttccaaactctacctctcaaacacatcctaaggatagtgatgatgcgagcgatgcctacatctctaacatgtgggtctaatgtattgacatcaatggagggagggtccgcgtgccagtcagccagtgtatgtattaatagcatgacggcagtgtctagttattagaatattaaggagctaatgacctctcaattatcatggttagttggtaattttatatggcttacagtttaagcgagcattttaatacgcatcctgcaacggattgagcgagacaggggagtagggggattaagcccccccatgatctaatcaaacgatattcatgggggtgatacatataatagggtggaagataagatggaataagaaatgtcttgcggtggagcatttaggtgggtaagttaagttgacgatcaagacccgataactctccatcagtccaaatcgcagactcttgttgtcatgcgaagaaaagaattctagcgtgacaatgcaatcagggagtagcctccaaatgagaccagtcatggcctagaatttgaatggatgaatgggccaaaattttagtcaccaaacaagttcacctgacgtccctcaattgtatgccgagtctgaccgcaattcaagaaatatgtacctctaaactatgtaaaactgttcaaaacatgtcccaaggcaatatagatgtttggtttcgctgacatggcttcctagtcagcaaaaaataaaaaaaataaatatgtgagacccacctgtaagtaagaaggaaaaatgtgaggtccacgtgtcagcatcatcttcttcatttttcttatcttctcttttgccgccgatggcagatggggagaggcggccaccgtcgactccacgctgcttggccacgtcaacggtggcggcgaccaacccctgcaccctaggccccggcgtgctgctcagcctcgcgctccgaaccacccgacccagccatggatgagagggagatggcggcgaggagagcaccaagcctagctcgtcgtgccatgggtggcgtgcggcattgcgggggatggggttcaaggacgacgacgatgtggacgatgcggtcggcgaagtcgtggacgatggcgatggattcgcacggccgccgctcggaccccaggctgagtgccttcttcaccttcgagaacccgagatggcataccagaaccgccatgcggaatgtgttggtgaaactgccgctggcaatggagccgtcgtcgacctccgcgcgagcgtcgtcgtcaccgccgtccccacgccctcgggagtggcggcgaataaggggacaggcgccgccgacgagcagatctagccgccctcgccctcgacagcagcagaggcggagatgaaggcggtgggcgagagcagcggcctcttctttccccctctcccaccagcctcatctcgccccctctctggctggcaccagttgctgccgccgccgcctctcatccttttgccgttgacgggtgaagaagataagagaagacaaaacaaaaaaaaggaaaagagagaggaggaaaaaaagagatgttaactaggatgtgcgcccccacatacttttttatttttatttttgattactagaatgtcacgttagtgaaaccgggcatctatattgccttgggaatttttttagacggttttacatagtttagggtatacatttctggtattgcagttaggaccttaaatagactcggcgtacaattgagggacgtcaggtgaacttattccatgagacgtacaagccttagtagcattatagttcttgccagagtcatttgggcttggaagttgtattcacctagtaggctattacgtccttcaactataagctttcaacgagttttttttccttaactttgaaaaccagatcaaattagatgaataccccgccgttttgctataggaaattaagttacataatatatacagataggatacaatatgattattaaaaccaaaacaaattgatacttataaattttaagcctataaataattaagattgtatggtgctttgagagaaaaaagaagaaacaatttcaaccatacatctataatctaatggctagaaataattagtgtgatatgacttaatgagaaaagagagaaatagcttaacggggggatgaactatataagtataagtataaatgatacctcctcggcttaattgccgtcgagagtgggaggtgctaatggacgggtggttgctgtgagcgatcacccgtccctcccctaagacggctcccctcccccttccacatccccttcttctctttctactacgccataatttttttaaaaaaaattaaaaaaaaagttagaaaattttatgtatagaaatactatataaaaaatatttgaattcaaattaaaatttaaatcaggtatataaacttttgacttataaactttgggtgtataaactttatatgtatagaaatactatattaaaaaatatttgaatttaaatttaaatttaaatttgaattagatatataaacttttgacttataaactgtgggtctctaaactttaggtgtataagctttagatgtatagaaatagtatatataaaatatatttgaattcaaattcaaatttgaatcggatatataaatttttgacttataaactttggatctctaaattttagatgtgtaaacttaaggtgtacaaactttaggtgcataaatttactaaaatagaaaagtgatacggtgctaaaaaaaaagaaaatcatctggggagagggactgatcgctcctagcgaccgatcgctccttatgactttcggtcgagagtcgtagtctcgtagagtcgagaggatggagcgagacggccgaggaggtccggtgattggcccagtgccgactttacggcccaataattacatagcccaagtggactattttgggggttggagatttgtccgccgacccctccaccgtactccatacacggtgccctcgcttattcccgaagaacaactaccacgaaaccacgcactgtgcggcgacgccattgcaagattgtgaaaactgaaaaccacatttcttctggcgtctctccttgatctggaaactgatgattcagacatcttggacgcataaggtgagtgactgagtgcagaatatttttgtcctggcattgtttggctttatgcttaccccgtcaggagaacggcctatgtgcaaatcatgttgagagattagcccaagaattttgcgtcagagctgtgtaattcttgaatcttgatttcataagcacttcgcagaaattgagattagtcccaagaaattaagatggatcggaagttctttctttggtaaggaaaaaaaaaaagaacgaacatcttccgatctgttctccgttgttacttgttttgatttggttttcgatggagaggatgaagatagtcggctaggagggccggtgattggcgcagttctgactaaacgggccaataactgcatagcccaactgtcacatcgggggtcggagatttattccccgaaacccccagcaggttggagattcatcttccgaacccgctccgccgttacggtgcccctcctactacctcacaagtcacaactccgatgaaccacgcgtacgtgttcctccttggtccccgacgttatttgcgagatcatcgtgaaaccttcaattcttccggcgtttctccttgatctggaaactggacggttcattcaatcatcgtgaaaccctcatttcttccggcatttctcctttttttaatacgcaaggagcgcattttttccattaagagaaataaaagttatttacaaggataaaaggaaaacaagcaggggaccgatacagaacgctatggaaaactataaaaatatctcgcgttaaatttgactaccacgacctcgtaaaggccaaacagcggggaccccgtgattagctgacttccaaagcatggcctcctccgccattgctttcgccacttcggtccaagacctttgttgttgattgaagattcggttgttccgttccttccaaattgtccaagccaccaatgtcacgacagtgttgaagcctcgacgataccgcgccccaattttcattcggctatcacagagccaattgtggaaggatggctcgttgacaggtaagcagttcggactccttatcgcctgaagcgttcaccaccataattgtctcgattcagggcatgctactaagatgtgatcaatgctttcgtcctgttgatcgcaaagaacacaacgatccgggtgtggcaaccctcgactgcgcagacggtcagcggtccagcatctgttcattgtaaccaaccacaagaagaagcggcatcgaggcggagcgagtgacttccaaattggggtggaaaggaaggtgactataggcggattttgagctgtattggcccgaactctctcatttccagatgattgaaccaggagtagtaggatcaagatccaccatttggacaagcgaccaaagctgtagatattctagaataggttggatcccaagtgctcctcggatgtctttgatccattggcgacctgttagtgcctcagccaccgtccgacgccggcgcacgcgtggtggaattttatcatagatgttcggagcaatggaccgaatgcaaccctcttgcaaccagctatcttcccagaagagaatagtttgtccgtctcttaattgacagacggtagaggatgcaacgaagttcctttctttttgcgaccccggaatagctagcccctgccaaggtttgcttgaggaggtccgttgcaaccatgtccacctggaacgaagagctatacccataagctccagattcggtacacccaaaccgccgtagtttttaggggcgcaaactttggaccaagcaaccctgcaacaccctccattagcttgcgctttacctgcccaaaggaacccgcgacggatcttgtcgatgcccttgaccacccacttgggtgcatcaatcacaaccagcagatagatcgggatagcgctgagaacagcgttaaccatagtagcacgaccaattgaagacatttggttggacttccaagtgccggcatttctccttgatcgggaaactggacgtacgattgattcatacatcttggaagacatctgtactaggtgagtgctgcagatttgtcctggaattgtttgtctgtataattctggatttcataagcactttgcagaaattgagattagtccctacaaattaagatggatcagaagttctttctttggcaggcaaaaaggaacgaacatcttccgatccgttctccagcagtgcaacttgacacctgactaaccactgttacatgttttgatctgactaaaacttacatgatggaacgatccatatcatgaagagagaaaagggggttgtatttagtcgcagtacacaagaacatgaccacaaggtttagcaaaatgttaaacctccctgtacgtgtgtcacgctaattaactcccctaaaaaaaggtacattgatagcgctaatgatcagtggcgagagaaaaaaaacaaaagttttgtgcctgcgtacgtatgcatatgcctcccttgattatttatcttcgaacgaggtggttcgttattgattaataatttctatcgtagtttcttcttctacagtagtagttcagttcatgagttgtcccatcagcggcgacgacgacgacaagatggcgtcgagcgcctccttcacctgggatatctccggcgccttccctccctgcgccggccagaactcgtccgtcgcaagaacctgcagttcatcgtcagaaacacagttaattagaacctccaaattctaattctaaccgcgtaatcgcgtgcacattgcgagagatgtgtgcataccttgacttgaagctggaggaacttgacgtagctgatggccttctcgagcatggtgacgaggtcgaccttggtgccgttgggcacgagctcctgcaggatccgcagccgctcgctgatcctctcgcgccgattctgccgccggcaagaacaattcgagttcagttcggtacatggattggtcggagtagcagtaggattttggcgcggaattcagtaaaagtttaattaccttggccgcgaggctttgcgggtccttggttggggtggtcggcgccgacttggccttgcccgccttcctgccggcgccgcactgcttcttgctagggctcatggcctgcgacgactccgcgtgggcccgcttctgcgagccgcggggcgccggcgccggcgcggcgcgttcgggggagacgccgccgcccgacgtgctcgggaacagcagcccgaactgccgcccacccgcgccgccgccgccgccggtggctctctccgtcaggctgaagcagccggtggccgcgtcgaaggcgacggccgtcgtc

SEQ ID NO: 9864 - DNA, 36880 bp, Oryza sativa
aaatgtggtgagattttagtcttcatggtaacgcctccaataagaacattatatttattgcaaaatccaagatcaagagatttctccccaaatctcaaatatcattcttcacggaaatgtttttagaaatagaacgccgttcaagttgacgtcattgccgaaactaactaacaaatgtcaatagtagcaaatgactagatcaatgaaacaaccaataaagaccaatcaccgattacatatccatcaagctaccatatacaatctttatttttagtgtgtgtgttttggctgggtgcatcctaattatgcagaggtcgaaagtgcgctcagtgctttttatcatcttgacgtaattggctgagttcaataaaaactttatttatctaaaacaaatatggaggtcggatattagggaaagctatacctccaccatcactaatcaccactctacatgctactttcttgtagtcgcatggttgtgtaccaatgctcttcatgtggaggcatcaccgccgatgccccaaatagatgacgtggtcaaatgaatgatcagaaccgtattgatggatcggaaagacactaccaaggagactcattttaaagacaagatctggaccgacctatactgatttttcgtcatctcggttcaccatagtgaaaaaaatgactactggatttgtgggtttctgaacctcaggccccaggccatggtttggataccaggggtctagatccatctctagacactattgatgataaggctatctaggatttattttttcaccaccgctatgaggcaggtgccgctggtggcgaggaacctgcctccggtaacatcagtcaaaagtagagtgcgacgaggtgcctcgaggcgtttttggttgttgtcttggttctccatgatgtgctaggttgctagcgagatgagtagctctcatctttgatcctatagctagataaatcttagaaaagggcaaaccaaatctcccctaagaaacatttcttctttgaaaacataaatgaattatattgcctcgcaattgaagtgaactaaaggacatgcatgaatgtgttttattccagaggcatggaaaattttgtaaagaagtatctaacagcaaatctaatgcaaaaatctaagttatacgaaacagttgtcgatcttatcacgtgatcaagtgccggataatgtaactggtgatgctgtcgtgactacacgtgtgggtgactagttggcatcgttgtcgagcgcatatgcagctagcctcaaatcagtaatattcctcacggcggaaaatagtaatattctatattttccatggagatatacaagctttgtgccccatctctctctctatatatatacatatgtgctaactttgagaagattcctagctcgcaaaagaaacagattcatactctagcagatatgcctagcgttgaatgggattccctgctgcaccttcgatctaaagagtaaagaggtgcttcaattcattcgcttatcctggctgcctagctatgtctcttgcattcttggctacagattttcaaagctatccttttcttcttcatcgtcatcttcttcctcctcctatcggagaatcaattttatcgagattaaaagtgaattatccggtctttcgcattatagattaatcttttttataataaaccagctggtgtagtgtacacggtttacgatcgaacacaagacctcacaattaaaactatacacccttatcactgtactattaagtgtatctttaaatgagtcatatgagattagcctagttaaatggtgatattgacccttgatgagagtgtgcgcattttttttctcttctggctataattcattggttgtatagatgttgttggtagggtcggggggagataggcgcatggagcacatgtgtgggtgacttttggtagttgcgaacgagaaaggtggtcaatgagtatctgagagcagatcgaagacggccgctttgttccttctggaggccatcatattctctgtgccttcttttgtcctcagccaaaagttttgcccgccaggatacccttgcctgtagttgtagcataatagctgaaggtgaaggatatatggattgtactaaacgcaaaacagttttaaatcacacgagccgagctttcgtggtgtttgcgatacttagaaataataagaggtggagtaatatgaacggttgatcaagagagggtaaaagttactgtaaataacagtggagtaattaacttataaaataacatattttattttgattggatcaaacaattggctgcatttatcggcattgttttgtagaaaaagaactgttagtctttcgaggcattttgactccaatatattttgtatcattcgttgagaaaatgtaaatccacccatacaatttgtctccaaataaatttttatcattttctaatatttgcatgtatttgtgaaaggacatgtagcctaatggttacaagagcctcaatagcacatgaggtcctgggttcgactccccatgggagcgaatttttcaggatttaacggcgctgtgttttcagtggtaggcgacgtacccatcgatagcgaagcgcctgtggtgacttgtcaattctccaggatttgccggcccaatcttcgaagatgctcatagtggtgagttctccaggatttgccggcccagtcttcgaagatgctcttcgaagctcatagtggtgagttctccaggatttgcaggcccagtcttcgaagatgctcatagtggtgagtgcgcgtgcgttgtgagtcttcgaagatgctcataagggtagggtttgcgtgtgtgtttataggggtgagtgcgcgtgtgttacgagggtctgcgttataatgtgtaattctaaaaaaaatatttgcatgtatttttgtgcggtatcacaaatttaaattaagttgatatgtgtgttcctatataaagtagcgaacgcggcaactaaattagcccctaatttttagcatgcgtacatgcatgcatgattaagttggaaacaatcggcgtgcggagtatccaggctgctgccacggcggtgtcggcggcctagctggtctccgggcaggttggtaccacgcgccgtgacggctcccacgtacgtcaaggtcaactcctcgtccacccccagcgtccagctggcaccgcgaccgggtgatctctcacgagtcatgagaggctgagagcggcctacctacgctctcggtggtatttgccgatcgaccggatatattggccgcctctcggattgcggagagagccagagacgtgttgaactgattaggagtaatcaaagggtggcattttttaagctacagtttataaccgagaaaaacaaacggatataagagaatctggctattccagtatataactaaaatctttttatattatgaggcatgagtagataacccgtatttaagtacttaatgataagcctatttggtagggctcttatagctaaatcacaatcaaacagctccacataaaagtattataaaataaattagaaatgtagagttttgatttagtatgctccatgactcaaatttagacccaacttcataaattaaatttagaagctgaaaccctgccaaacaggcgctgtatgttgagtgcattgtttatttttggaatgattaaaaagaatacacatcagtaaaaaacttgataattatatattgaatgcattgtttattctccaaactgtagtggttgggatttaaagaagatcctacgttaactatcaatttctaattcttatttcaaatttcaagttaattaagttaacaaaatacaaaactgacagtcaagttagacatcaatgtaattctgaatttattattggatatattttaggccatgtttagattccatcccaaaactttacatcctgtcatatcgaatgtttgaacacctataagaagtattaaatataagctaaaaaataactaattgcacagattgcgattaatttacaagacgaatcttttaagcctaattgctccatgatttgacaatgtggtgctacagatttgctaatgacagattaaggtggtgtttgaatctcctgtttcacgcaaaacgaggtgttaataacgtgtgattaattgagttttagttattacgaaattgaaaaatggattaatctgatattttagaataactttcatgtagaaagttttcgcacaaaacgcaccgtttattagtttgaaaagcgtgccactttaatccaaaatttaatccaaacttttcaggactaacgaacggggcctaattaggcttaataaattcgtctcgtggtttacggacagattttgttattagttttttattagtgcccgaacaccccatgcgacacactatataatatccgatgtgacacctaaacaccccctcaggataactaaaaaagagtcttatcaatttgaatatcatgtttcatttaacacaaatagattatcataaattttaaaattaactttaaaatttaaaattgacaaaattagttctagagcatcggaagttgtcgattttggttttatagcatcaaaagttcaaggctcattttgatagcactgaagttacctccgttatttctgtttagcattccatccaaactccagttagttttcttttcttattattatttttcaacaaaaaattagatcaaacaccaatggtggccctcttccacttccttctcatctcgaaacagcagtcatacaggagctcaggccggtcagccatggtgcgaacacagtatgctggctccacgagctcgtcatgtaatacgtgagccctcacgagctcatccgcaaaccgctgtgttcatccgcgcttgctaggtgtgatctatccacgttctagctttgcccggacagcgccatcgtcgatcgatctcgtctaccgcgccgccatggccatgctagagcttgttcaaatcttgcgtgctcaaccaggtccatttcctccgcggccgtgccgcttccgagttcgtccgcgtgcactgccctcggtctcccctagatgcgtcatcctcaagctcatccaatccatgaacgcccgaagtgtcattgtccagctcgtcgccggcattgtcgggtccgcacggaagcaaagccctccagattattgtcggcgcccttgagctctctccgacatgctgccctcgatcaagctcatccatcggccctcaaattcgccccgaagcaccaccctcgcgctcgttgcgggctcgcctgagtgccgacccgctcctccttgccctggatccgttgtctaccgacccaagagccgccgcctctagcatgccagaaccagctgccaccatccaaggctccaactcgctcagcgctatactgtcatggtcgagctcgcctgatgccttgaagagtggtcaaccataggagggagagcgtcaaccataggagggagagcgcaggaggaagaagatagaggtaggatggggtgagccgacggaactgctgacggaatgctaaaaatagtaacggatgtagttttcagtgctattaaagtgaaccataaacttttaatgctatagaatcaaaatcgaaaactttcgatgccatagaaccaattttgcctttaaaatttggttgtggccgtcaacgaagcacttaattagtttaaaaacatgttgaacaaagaaatgccacaaggtgtttacgaccactttctgattgatcaaattcacgttatcagcccagttcataccatcacattttaacgagaaaacaaactgactacttccgacttttttgtttccatcggttcgtcgtaatgttttcgacaactacttcgacttccagtagtaaagtcagctttcctttgtttctatcttttttgtttccataataaaatgcattaacaaattcctacaacacattaaacatgcactgcaacacaaacagaactattttggttcaacttcgacgatggcgcttatgagcagtaaaaattgaatgaaggtatgttacaacgacacttcacttctggcctacgaacaatgcagcctgaactgctttcatttcaggttgctcctaacaaatgatcagttaagcataagtgtgccacactaaaatcaatcgtatggtgtgcctaataactgttgagagacctatatgatgattcctaatgatgcatggggaattagatcctagcactgcattgttgctctagaaaaaaacattgctatcccttgctaagtgacgccattgtaggaacttctggagatatgctaaggattggactgctccgttaccattttctgccccactgcaaactcaatacacacgtcctcggcaattcttagcaccacaatggcaggggcatccatcaccaggtagcaatttttgtccatagtcataggccaattcttctcccatcaagatctggacaacagtgaaacaacaattagcaaggtacgtataacgatgtaggatgaggtggtcaaaaaattcttacatcctggtttgcaaacaaaccaatgtgcgcaagctgacagtctttgctctccaccgaaactaaacgcgtactgagatttggggaacagctgcaatgaaggggcaaaagcattggttccagaacaaatttatcccgtagtaagatgttcccaagtactccttccatcccaaaatatattaacttctaagttaatatattttgggacagacataaaatagtccagttacctatgattaataaaacgggatacgttgccatatcttgtggcatcaatcacgtatgcagtagtccctgtagtctgaactctttccctgtcaatctgagaagtgatttcaaacaagtagctgctaccactttttgcctccctgagatccaataattttcttatcagtttctgagcataataataatactccaaatgttcagactatagaacaagaacagcgtgaaaccagaatgtgtgcaagatgaaaatatagtttaggcagagattgggcatttaggcaagactgggcatcataatgaccaagaaaattcaatgaagcttacatggaatgcaccggagaaattccaatagatttctagcctaaataaaagaaataacaagagaatcatcaaacctttctacatgtcttatggccccatcatccttcatcttcaaaacctctccaatgtactcacatacaaatgtgccctgtggaataggttctgcggctctaacagcccaaccctgcagcatttgacaaaacaaaaatatcacttgtaagcaggttttatcttgacgtcaaaggtaaggtgcaacgctcaggaaaccaaaaaaacaagtggagaatatttcaccttattctcagttctgaagacttccaactttaccagcagtcctctctgcagtactttattctgacaggaggcatcacaagtgcatgatgaattgcactcatatataggatatccttcctgcaaatttaacaacacatagacatcaaattatacaataaaatgatgagaaatgaatgcctagatgatggatatctttgaaatgagctcaagcaaaaggtgtacaaatactcagtcagacattatctgcagacctgaagaacaactcaatatcaatgagcccaaatcccacgcacatcccttttgacattggcagatagctattggaattagttatgtcaccataaaagatgaacgagataatgccaccatggatgtaaaggtcaaatcacgacaaaataaagaggtttgttttttagatgaaaccgttgtatgcgataatgtcaccatggatgtggagcctgtaaattatggttaaagaaccaatctactattgtttctgcagctctccagaagtaagtttaagggtgaatagcaacagaaggcttttgatacagctatgggactcagagattgcattagtaattaaaacaggttagagtatgctatacacgaacaccatagtggataaggacatccttaataagaacatataagtggacatgatattgagctcagggagatggcaacacacaatgataggtatttatttaatcgcagtttaagctaaatttcaaaataagatggcaaacttcttgagaaaaatgtagtgtgcttgcatcataaagaaaaaaaaggttgcattaccagctagtcacagatatcaaggtatcaatgatcagatcaatggggctgcgcttgcttgtgctttggattaatccaaaggtgattttaaattttagatttcgatttaggattaacttttaagggttatttcatctctttcattgcccagctctatgttcatgactgttaagaagacaactaaaaaatctacctaaaattattcttaaaagccaagcttcaaaattcgaaatcgctttggatatcacaaccaagaacagccagcacaactccattcacaaatactggccacttttgactactttattggttcacgatacggaggacatgtcatttttttccaaagcacagcttcacattttgctcttatttaatatctcccatcctcatcccatttgtggagaaaagtggacaagagattatttattaggatagtttggtcattttggagaaaacaaatgtaagacttcccttgcgttggtcaaaacccacattcttgaacagaaattgatggtggtactagtgcacatttctgttcatatttccaatgttcctaaagccatacatgctagagtacttgtcaaaaaaacatgtgtaggtaaaaatatacgccagtaacaattattacctgcaaaataactttgctattttcatcatatgcaaatctaccacgcataggtacaccatggagatccactaggttctcatagatactatcaaagaggctcacatgatcacattcctcaggactgcaatgggcatgagaacaagcacacccaaccatagtgttctgcaggtaagcaacttattagaagactaagttgcaggagacaaaaaagttgcaatatataaaaaccaaagaaaaatagtcttggttcctttcgttcaattaatatgcaagtttctgttcatcataaaagcaaaatccagaaaatacctctgaatcaacaagagatgaatccatcaaacgctttgtgacgtagtggaaaccttgccagggcagagaattttcactttgcaaaatttctccaggtttcatatatggaaattcttttgcatctacatcaatggcacagacaactggaactttctccctgccaaagctaacatcttcacaaacaataaccatctcattcttaagattccaaccaaagtgctctgaatcaagaacatagtggtattcatccatgccccatatctcatcaccaattggaggactcatcacaaaatcaacttgggtaggctgtaaagggagcaaggaattagaactagacctggacttgcaacctttagggcaaaagaattcttcttgatgccaatcaatttggatgccaacatcactacaaagctttgcagctttcacaaatatgttatcaggcaagattccatatttagctttcaatgcagcacgaaggcttgtcttacagcaaacagaacgggcaatagacagaatatcaaggttgcttgggtggggtcttgtcttttgaatctttgaaaataaagtcaatgccacgtctgagcattggaaatccagtaacctaccaagggtggtggtctcagattccacaatgtgtgatgtatccatagatagatccaagctttgagccttaaaatgtttctcaactccagaactagtcctcttcttcaatgagccggatggtcttaaacttttcttgaaggctgaataatagtgccgaccacggttaaactgatacttttcacgtcctgaagggatatcactgactgtacctgagtttgtatgagcaacttgatggtggtggccaagatctggcaaaagatcaaacatcatcccacataatctgcaggtgaacttctgtaaaccatcatccttaccaaggttatggttatcataaaggagctcatcacttgccctttctgttcttttgatagattgacccctaggtcgtcgagggacatgatccagaaggctgaaatctcgagaatgatctgaaacaatgtgctgccataaaagatctgtgttcaaaaagttgctgttgcacgatatacaacgtaagagtgtcgaatattggagatactgagcgccatgtttttcctgcacgtgcctttcgagaactcttctgttggtaaatgagtccatgcatacagcacaagaatagcctctgaaaagccaccgcacttcttttttgtgaacctctgtccagtgtaatccaagtccttgatcatcagagaactcctgagaacatattttgcacttcagaccaggtgaaggatgtgtcccatcttcacgtaacaccatcactgatccatcttggttctcagaatgcatttgattagagctatctgtaccaaagccccaaacatgtgaaagcttttctctctcactagagatcagttttaacaaaaattctccaacatcaggattttttgacacttcagctaatatctggggcatatggtcactaccaagacccgggcgttggtgagaaagattgtttctcaagaaccaataaagaaactcacatgcctgatgtaagcacagtttttctttccttgacgtgcaacacttcaaaagattgataaagacatctttagagatgagtcgactttttccatttctggcacgtttaaggaacttcggtatgtgcctctcacagtaaagtgtgtgtcgtacggcataatcctggcattcagcaatattgtcatgagagcgaattccaatgcaaatagaagcatctaagttagagttttccatggaagttgacatggggtagcagagatcagcgttctctgacacgttaactttatcactagttgtctcaacagccatggttggtgtcactttcatgtgcacagcaacctggaaattatttgcctgctctgagcctacactacaagttgcatttgaggaagacatcttctccacgcttttctgtgactcttcccacttacggccctcagacgaacttaacaaactatctgagctcattgcatctggatttgtttggaagcggtgctttttacaaaagataaaaccatgctgggctcgatgcttgcactttctaccaagattagtcatccccccacacagtggagtttcaacagtaagtgacttatcttccctagacgaatggtcagcaaaatgcatactttgatgcacacaacagtaaatatcaccatcgtttgcccacctaccacattgccttccttttgcttctatatatgcagaacactgccgagaactcttgaatgaatccaattcatgtctgacattgtgtaaagcactatttggttctccagtgtcctggacaccagaagtactggggaaggcagcagttttattctgatctcttgactctaatggtcctacagcttcatgaatgatggagatactggggaggttacttttgtttgggtcttcacttaatgtgttgaggttagcatcatcctcttgtgaaaaatgagcttctcctctgcggacttcgagtttggaatgttttatacgagcttgttgatccatacctggatcatcataacaattgtgttgttcaaagttgccagcattgccaactggatgagatgaaaagaactgtttcatgacttcctgtttccaagttttccactcggggactaattcaggctgcattggtgcattccacaattcatgaaccttgtcccaaagaatagcttgcctaagttcctgtgtggaaagggtctttagcaaggttggccaagctttaaatagtgtgagaaacagtagcacatcaagtgtaacaagggaataatcaaatagtaaagcacgtgtagtgcagatcatttccattattccatatattatttcatcagtagcagacagacacatagttagcttcaagaaagtcaaactacataacaaggtcaaatttctacaataaactgaacaacttatctctcctatttggcactggtgatccacttgctttaacaaagagtgccacaatgtccaagagacaatgctttggaacaacttcccaagtgactacaactgggtcactagcttagtaatcaaacagaccaatatccatatgatttcaagacagtggtttgaaatcttcaagttcgatgtgcacaaaaatacactttcatcttagacaagaaagacacatacccaaattaggaatctatttcatgccatctgcatactattccgtccgctaaataaagaacagggtaaaaaaggataaccccattttgtagcaaaccaaacaaatgatcccatggaaacacaaattcagctaggatcacaaaaactataaattaacacatttcaggtgaacataagccacacaagcggactgtatgatgagacaagaaagtgagctagccggtgcaaatcatgagaaaatattatgacctactgtggtcaacatttatacagcccatgcaaggattgcaaaagattattaatgtgacactcaataattaagtcaacattatctatttttacattaaaaaaaataccacaacatttcagttcatgctgaaaaagagaatggacatggcagccactttatttgagatgtgctagcttgaacttagtctcacgactaaaaactatacatgatagaaaaggaccagatcatccaaaaacatattaactactcactccgctaaccagcagaaacaactcatacaaactaaatcaaggttcttataaaaaaatggtgaaacctagacaataacagaaatccatattacctcggtaagaatttcaacggtctcggcatcatgagcattattgcacttttggctccacaagtgaaaagaattttgcagccaatgacaacttgtgtagtctggaagaatcatctgaaattaaacagctaaggtaaactattgccaagaaacaactggaagaggctattgcagaatcatacatttatcttatttctgtaatatcgctagatggcgtaaatttgatgaagcggatgatctaatgaacataatactgcgcagaaatatttgtataacatttgacctcattctcatcaataagatatacaacctcgagccataaaaccaatttcccttttttcacaatatcatgtcaaccataaacaaaattgaaatttgccaggataattatcatccagtgtatcctttgggattgagcaacctcccaaccaactgcttataacaatgatttagcttttcatattaatgctgcaaaataattcctattaggcgttgtgtcaaaatgtacgtctcaattttctggcatagttatgtacactagtatcatggtagtaacagttcatgatatgtcctacaaatagataaaataaaaaaaggtacacaaattaactttgttctatccagaatgtgcatcagtgataaaagggataaatagcagccagaaaggatatcattcataaaacagtgagcgaccaagaaatagagcatcgtaagaagaacaaaacagatataaaacttgctacaagaaaattgaaaggaggttccatgatatatctttaaggaatagagtgcttagatttacattttgaagtttgacaagcatcttcccaagatcagtataatctctacagcaagatgcttcccgagcaaactccttccaagttgtggccatccgagcattctcaactacagcctattaaacatcagaaagactgtcaagacgaagtcatcggtgctacaggaataccaatgattcatagaagaaatagcagacctctgtatgaagctcgtcactaaaatttagcatggaaatagcaagtttctgcatgatgaatcgtcgaggaatactcagatccttcactagctttcgccatttgcgatgagttccattaaccagtggcagaggatattcctcaattggacggacaagtagcatgtctacccaagaataagttcttgtacgggggaagaaaacaatgatatagctcttcctgccatgtgttggttttgcctttagagtagataaaggacagtccactctaaagcattgaattccagtttgccattttcctctccactattttcaaacaaaagggaaaaatgatagttcagagaaggatcactgaacagttgtgagaaatcagcacgcaaaggagtagaaaaggtaggaactggtgaatggctgatataagggtccatagccaatcttctgaacagctcactgatcagaaaatccccttttttctagaaataaatgatattcaagtttttatgcttatatgcaactcatatacagttatttaaattgcagaaaactggttgttgacctcagaacagtgatataaatgaatggaatgaagtaataaatagaggaaagttgaagtatttttctttcagtaataaaaatcaaagacaacaatacatcagagaacttagtccaagtcatacataaaatgcatatatgtttatgggacagagagagatcaagctacgaaaattatgtaataccaagaaatgcctcgacttggaagacaaactacctagtaggaacgacccttgaaataagaaaattacagctagatcgaatctcaagcattggacagcctttttctctaggagcaataactacaactaaacaaccctcgagtgatatcctatctcttcaaactagcacagttatacccaggtctgctaattcagctaaaatcgtgtataaaacaaatgcttgtgtattttccagaaaattttttaagtttcagaagattacaggacttggacactcaggtgttatatttagacattaaacaattgatattgacggcaactaaaactaggactgtatccttttctaatacaaagttgagtacaaacctagcgtgtatgttactccctccgtttcaggttataagacgttttgactttggtcaaagtcaaattgtttcaagtttgactaaatttatggacaaatatagtaatatttataatactaaattagtgtcatcaaatcaataattaaatatattttcataataaatttgtcttgggctgaaaatgctactacttttttctataaacttggtcaaacttaaagcagtttgatttgaccaaagtcaaaacgtcttataacctgaaacggagggagtatgtaacatcaccaagttaacaatgacccttggatcaatcaaatcatccaatccaattattaaacatctcctaatataattgatgatattgggacaaacggtgcttgggtttggacaccataacttagctttgaactaattatgttcttaacaaggttgtcaagttgtaaagccaggtcgagtcaggtggtctttcaaccgacttgctgactagttccaataagttgaagagcagtcttttagactactgccacattccttcctacttgggttgttctactgtggttcgctgctgctgatgcccttaatctatgagcatggcaataaaacagagataacagaggagcccaggaaaaagagggagcatataaggaaaagatagaaaaataaacgcacgggagaggtacagttgttgcttgtactactactagctgctgagcacgagagcaaaatagagagggaagagaacaggaaatgaaaaaaataaattaatggatgagaggagaggaccctgagtcatcacctctcgagcttatcctctgcctagcggctggcggctggctatatatgggggaggaaacctaacagctccgccatctcccttgaacttcgtaataacggtcacagatgggtcattgttgctgccttgcttcactacatcttttgcagcaaccaaatcaagacttgggctcgtggccctcaagtcattcttcctggtaaactacttgattggccatgactgagacacaacttaataacataacagtggctcttgaaaatttttaaaaaaatagatttcacaaattgaaagtgtagcaaaaattctatgttatgcctattgctactcctgagggtccaggcaatccaatctagttctttaaaaaatctagaaactttacggcacccacacattgtgttcttattaaattcacaagaaaatctatgactagatgtagcaaaaaatttatctccacggcgtatgtaaaggtctcaacaatccaatatgttaaatattcagccagattcatatagttaaaaataagcaaatcgtacctttacccaaagtgcaacagtctgatcttctgcaccaacatttcctgtattgggatgaccacttctataatgagtattgccattacaactgttgttaagaacaagctgatccatgttgttcttaggtgagacagatgtctcattctcttcctgtggagaagatattttacgtactggatcaatgctgcaagctatttctgacagatcttgaagtgtgcactgcaattctttctggactgcatgacattctaatgtatcagttccagctttattacttaccatatcagatccaacttccttgttccctttgacttgttcttcagtaatgtccttgtcttgagaaggctgagcatctccattggactggcatggcctaagtacagtcactatattggcaggtggatgcgtctcttcccgagaatgaggtgcatcctgattactaacactctgttgattgacgtcaacagacgtgctttgaggggcatcattttcagtgcttagactcaattgaaatctaacatcattgaagtatgcatcagaaccattcatctcttttgggggctcggcatgcatcttctgaggtaaatctgacaagttagcatgagacttttcagaagaaccatccaggttctcatatatgcttgttcgagaacaattgttaacttcaacaggcttgcagctaactgtctcacttgcaggatgagcatcagaaccttgccacccatgatcatcatgtgacaaggcatgtgtcatattgtaggtaataggtgttgttttctccaaatcattctgtaattggcaatctacttgcataacaggagggtccatcagcatttctttggtatgttatgatctgccaatccactatgaaataaggcaggactagcgtgagcactgaaagaacaatctcctgctggtttgaagtccataaacactagtgacttattcaacacctagaagaaaaaaaaaaggtgttgtttatagtatgtacattgtacaacagaagtgtgggacaacaaacaaaacaaactggaatagatcaaaccagacctgtaatttaaacaaaatgtcaaagacggtgcagtaattaaaagaaatattgcattccactgcaaaattcccgaatccccttgatgccatcactccacatgtcagtgaaacaagggttggctgatggcatataagagaccaagagattttccaatggaaaataaggaatttccccttatcattaaagataatatgggtaatatgaatatgtggattgcccactgtactatatatgcatcgatacatttatttggttttgtttctcatcctaatttcttaggatccataaactattaagagtttgccctgaacaaaacttgctctaccggacagtagaaggtaaagtggatagacaccataataacaaatagcactgcaattgtttacagtacgtaataaaaaaaacatattacagtaaaggtattcaggaatcaggaatacatgcaatcaaatgataatgcactaatagttagactagtacaaagatatggcacattcctctggaaagtttaacaatgagaaccatagcaccacaatatgaacttaacagaggaaacaatgcttgggtttgaactatatggcatgaaatcccagtcccctaattttcacaaaaacagatgaagcaaaatcacatcggaaatatgaggagttggttaaacgtgtaaaatcggtgcgaatacgtgggcattgttgcagggcgggtcggcagcattaactctacccaactcatcaaaaccctaacggcttgtttcaatgtgcaggcaggttctcgcggcagaggaaaaaaatacactgggaattcaagcgcccgtacgaccctcaccacagcaaccaccgcttcctcgggcgtttggtcgatgaaactaagatccctaaacgtattagtgcgcccagcgacccaaaccccccaaaacagcgcggaacgtaaccgatcctgcgagagagagagagagagagagagagagagagggagaggaggagaagcgagagatttactcattcaccctccgcggcgaggcgcccgcgtaagcagcgggggaggcggcggcgggtgcagcagtccacggacgccgttggcgggcgcaggccgaccggagcgctcgcgcaccgagggggggtcgacggtgggtggggcccagcagcgtacggcgtcgagcggggaagtcgggcggcggcggcggcggcgagaggaggtggaggtggcggtgggcggtgggcggtggcgacggaggaagaagggtttgcggcgtggcctggctcggcctgcgacgtgaggggagggagatggggggaggaggaggtgggcaggcaggcagcgtgcgcgattccccgcagtaaatgggaaatgggagagagaaaaaaaatatattgggggaattagaaattttcaccgggttcaccggcccgggccgcgaatcccacgcatatgctcctgcgagcgcaccgtgtgtcgccatgtgggccgctcggctgtttgggccggacgagacgagacggcggcggcgcggcccaacttaaacggtcgcgggcggcaagtatcccgtgatccggcctcgtttcacgcgcgggcgcccgtgcgtggcccagcttcccgcggccgcctccaccgggagtagaatgtgtgtgtccgctggtgcgcacgcgtagcggaagacggaagctaagcgctgttgctttggaacagagaggattccttcgtcaggtaaggaccaacctggtttttcagccaagatgtttgagctgatcccgttcgttcctgtctgctgttaatcagctaaagtacgatcaaagttgctcgagtgtgagatctttacctccttttgcatacaggagtggatggaattcagattaggtgcagttatacgtgtaactgcaagttaacgacggtatataattatagccgtatgttttatggttaatggttcagattcaacgctaccgtaaacctgtgatcagtgctcccatgctatagtatttcgctattattactccctctatttcacaatgtaagtcattttagcattttctaaattcatatcgatattaacaaatgtagacatatatatgaacgtgtgaaatgctagaatgacttacattgtgaaacggaggaagtacatcgctatggctagaacagtgtacaatctagactgtccgatttacattcaatggtacccgctactaccgctcagttgcaatcactacagatgatccagattcgaaattataacatgccaaccgagctttacccagtttaacggtcgtgaccaatagtatatgtgttttctattcgttgccgatgtacggtggatgacgagaaaacaaatgaagcgacgcggctgtcacggcatcgcgacaaccgaccgtgtcacgatcccagctgcgcatgcgaaactatcgcgcgccgatactactgctactgctgccggtacagcacggccacagatcatatactactactacatctctctcgccttacttaacactgtctgtctccagcaacatgtcaatagcttaatcacacccccattaaaattaaaaaaacgcactaatcgaagaattgaccagccaccacgaactctatcgtgactggagaaacgagacgttctcgaggtggttcaggtgaacccatccaataggaaaagataagctatagctcgccggcctgccggtgatgagcaagtcttgcctaccctgaaacgttctcctcctcctcctccctacaaaaatccacaatttgcgttgcggatgatgccttttgtttgtttgttaattgcaacatggcaaccttcgtttctgccgttccatcgctgtcttgccaaccaatcgtccactctggcctactgctgtgccccttcttctctccggctaacaaccgagaaacagcagagacaaaagcctcttctcctctttttaagaggaataacagatgtagagacagagatgagaaagaaaagggcaataacatatcgatgaaaagatcttgcaatcatggcaaaggtatttgttttaagtataagagctgtgctgcaaaatgaagcagcatgtcggtcaagggtttacaatctcggagagcacaaatctacaggaagccgatttttttttttaaaaaaaagagggggtactccaaaacgaaaaaaaatatatttcattttggcacttttttttacctaattaaaatattttttctaaattaacaaaaaaatgaaaaataaaaatcaagttttctgatgaaatagtttcgttgtttcgtgctaggggggggtccaaaattctcaatttcttgtaccgagattgcaaaccctgtagggattaagccacattatggacgtacttagaacaaattaatcactgatgggaatgatagtagtatgataccgagtgggttcgcattctttccttgtctgtctctctgcctgtggttcatccgttccctacttttcgttagacggaacaaaccaaccagcgatcgatcgatcgatcgagctcgaaatgcggtggtggatatatgttgccagcagatgcgacgtccaatttcaacgacaagcgttttcgcgagctcggcggtgacggcttcagctcaccaacccaacccagcaaaaccgcgaaaccaaattaacctgcaaccccaagagagaaaaacacacgtcgctcaaactgaataagaccgttatttttgttgacacatcggtcgatcgttcggttcgttggtgcccatcggattattatgcctgtcaatgtgttatgcatatgccatatcgtttaaacacattatgcaattctgtagtatcatttattgaaaattgttatgcgtacgataaaattgatacgattttattacaatcctatcttgcgtgcgtacaattggaccacgaaaatacgttgattgtaaaagattttatcgtgtgcatagcagtgctcgttatttatttgccagtagctttgaatttttttgttctatactttgcgcttaaacatagctttaagagaaaatgaccatgttacccttgtggcttagcggcggtcatttgcactaatatacaatcattaaggatgctgattagccacgaatggattaagaaacgcttaataatggaactactagtacattttcacggcccgccccagtcgagtgacagtcacgaggcacgcgacacgtaaataaatacggagctcttaattacgcttcgtcctcctcccctcccctcccccctctctctctctcctcgcggctgcaaatcgagaggaagaggaagacgagaggagaggagagcgcgtggcgtcgagaggaaaagccggagccattgagccgcaggcctcctcctcgcgcgcgagcgcggccggcatctccggctcggatcgagcttgaaggtacgcgttgttccatccgtggtccctccctttcccgcgccatttcttgatgggacacgctgtagattggagatccatccggggattggtttctttccctccaatttgacccgccatgtttcttcgggatttctttctttcgatgcgtttgtgcttcgctgatagtagtagcggtttgtttccaggagaaattggggggcttgagctgaaagatcttggtacaattctcccgcaaaatgcctggaattatcgtggatggagttgtcacagaggaggcacaaaacgaggtgaactcctcgcagaacaaggacaattcgtccgccccaagatcgccggtggcttcgaaaagcatgcacagcgaggcgctggagatgcatgtggagggttccggcgccggggagccatcgattgagcagctctacaacaatgtgtgcgagatggagagctcaagcgagggtggatccccctcgcgggagagcttcggctccgacggggaggaatcgaggatcgactcggagcttcgccaccttgttgctggggagatggaggccatgaaggtaattgaggaggaggaaggggaagggagtggtaatgccgctaatgcggtaaccgcagctgagaatgggactcccgtcaaggcgatgtcttcgaattcatcgaagaagtcgtcgaaaaaggctgcgaaatcacagcttgaatctgagtcttctgttggtcctaatggcaaggcatccaccgaggaaggtgaggccgaggtcagcaaacccggaagccgagttggccgtcgacggaaagctagtcctaatccacacaatgggactgaagatgctgggcttaataatccagaccttggtccatttcttcttaagcatgcgagagatttgattgcctccgataatcctcgtcgggcactgaaatatgctcttcgtgccaccaagtcattcgagaaatgtgctggtggaaaaccgagcttgaacttggtaatgagtttgcatgttgtggcagcaatctactgcaacttgggaaagtatgacgaggctgtacctgtactacagcgctcccttgagatccctgtaattgaagaaggtcaggagcatgctcttgcgaagttctctgggtgcatgcaattgggggacacctatgggatgctaggccagactgcgctatcactgcaatggtatgccgcagggcttgaaattcagaagcagacattgggggagcaggatccaagagttggagagacttgtcggtacttggctgaagctcatgtgcaggcattacaacttgatgaagcacaaagattgtgccagaaggctcttgatatccacagggagaatggtgagccagcctcattagaagaaacagctgataggaggctgatgggtcttatctgtgacacaaagggtgatcatgaagctgccttagagcatctggtgatggctagcatggccatggtggccaatggccaggaaactgaggtagcatcagtagattgcagcattggtgacatttatctctccttgggccggtatgatgaggccgtgttttcttatcagaaagctcttactgtattcaagactagcaaaggggagaatcatgcaacggtggcctctgtttttgtgcggcttgcggatctatacaacaagacagggaagctgagggagtcaaaatcatactgtgaaaatgcccttaaaatttatcagaaacctattccaggaacttcattggaagaaattgctaccggtttaactgatgtttcagccatttatgaaaccatgaatgagcatgagcaagcactcaagttactccagaaggccttaaaaatgtacaacaattctgccggtcaacagagcacaattgctggaattgaggctcagatgggcgtcttgcactatattttggggaactatggagaagcttatgactcattcaagagtgcgattgcaaagctccgcacttgtggtgagaaaaagacggccttctttggtgttgccctgaaccagatggggttggcatgtgttcaaagatactcgataaatgaagctgcagaactgtttgaggaagctagagctgttctggagcaagaatatggaccttatcatccagatactttaggagtgtacagcaatcttgctggaacttatgatgccatgggaaggtaagctccgtattgattcttgatcagttttttattttttacggttaatagactcttacatcggtagcaaagctgtgaatatggacatcttcctcatctcgcagtatatcttggacttcggcaaattaactgctagcttttcatctgacttttgttctgttagacatctaattatcaccagccatctagataatattttttttccaattaaaatttacaaaagcaaagggtccctggtacagtttatcttaatatcctcgatgatttatcacaatgtgaacatggaaatcaatatggtttgttctcaactatggcactgataactgctccatgtgaccattcacacagtatattggtgctctttatgccctggagacagtagcggtgtgtagactcttatgagtgccaattcttttatgtttgtcgttcgcaatttgcatcttccagcttggacatgattggtctctttgtgcagccttttgcagcttcaattgaattgagctgatattggttgttataaagtgggatcaatttaattgaagtaggaccatattaagacaatctttaattgcatgtagccagctgctctgtaaaagaagagttgcaaatactttatcctcttgctttatcctgcccatttgctttcaattgtccgtgtggaaacttcatgctactttgtatgtcatgtggattgtcagctttataatattctttataattatgatgcaagttttgacctaccaatacagctggcttcttgataagaactaacaccctagtttaattggctagatcagaattctgaagaggcatagcaatctttctgagatacttcttaaaaactactaatgagtatctaaagggaaaaaaaatgtatttcacatcagcttgtttgctcaatgcgaaaaggtttttgatttgtttcttagaataacatgttggtgtacctgctttcctatgttatccaggctggatgaggccattgagatcttggaacatgtagttgggatgcgcgaagagaagctgggcacagctaacccagacgtcgatgacgaaaagcggaggcttgcagagctactcaaggaggctggtcgggggagaagcaggaaggcaaaatccctggagaatctgctcgagaccaacccatatactgtcacgaagagaggtacagttgcagcatgaggcacacactgctttgcgaggagaagcttgatgcaagcatgacgctaaggtgtatcaaattgggctgtttttcttttttcagatttggtgagaggggtaattgaaaataggatttgttttgagaatctagaaatgtcaaatgttctgattaattgttgtaaagttgcaaagtatgattcgctaccacttgttccctgctcatggctcttcaccgtgcttgggaagtaaagcgctgcttccatgctatacgcagctgagcttttataactttatattgtagacagtgtgagactgaacagcttggttggttgatattgcagcagatatcatgcataataaattgtacaggcatattacggttcaattttgattgtaagatttctgtttgcaaaagctaccagctacgaaagtgtgagccatcaattggatgatttgatatgtgaagctgaagttggataagaggcttagacgcatatgagttggaaaaaacagtagcagtagtacccaaaagatctgtgcaaaaagttataccgctggaacatcatgagcagaaaaaaacttagtaaatacgaactgctgcttgatttcagcgaaaataagtttgaggagattcgctgagctaccagcatgatatgtttctaccgaaaatacaagcttctgaaacattaacaatgcagcctacccatcgtaatcattagttatcacttagtgctaatacttgatacgagaaacttgaagccgcttttgctcccgaaagagaattgtctagtgaccatacttctggaactcccactcgctgttgtctgcatagataaaatagaaaagtaaggcacggtgaacgagcagaggtaacaaccacaccaattaagtggcattttccagggcaaccaacctagagggcacacttgacgggtcttgagccaacggctgatgcagtggaagtggaatgcatggttgcaaactcctgacacaacaaagatagattgttcatcagtacatggatagttgacttcacagctcgatttaattcactgcgaaaatgcaatatccactaaaagcaacacaaaaagacgagaagaatccagttacacggaaagaaaacaaagttccataatactcccccaggagagaaacttcagtattataaatatattgaacatagcatttgactgtgcaagtcagtattgtttaattcaaaacaatacttgaacatataatccagagggcacacagaaggtgcaagtgtacatatccctaaacaacaacatgctgtaaacataagatcagtcaaagtagattaaactgtgggcagaagaagaacatattaacatgccgggtagccaaggaagatccacacacaagaatctcatacaaatatataaagcaattgtagctaaaagcctttgatgaaaatatacaccactaacttcaactagttccagatgcaagaattcacttccatcaattgacacagctaacatgaacactcacccaccctccccaacccacattccagtgattctctttgacaaatcataggaactaggaaacccagacatgaactgtattatcatatttgagtttcatgtgtgcatagttcaaggtataattataattgaacagtagatggttaatccagaagaaggtactcctagccagtagccattcaattatcctatcataactacatacttctttatgaaagataaattcaacatattctacaagggccatgtcacgtccaaagctaactgcgacatattatataattatagacttagataaaaaaccaagagacaaaccaatatagcaaaccatgcataattatagtacaaatttccaactatgaatataaccagtacatataaaagaatagaaaagataatcacattgcactcatttgatacatgtccagtcaaaactactccagatcacaagaacttgcaattatcagaatcactaataataacatggtattgcaaatcacatgatcagcaacaaatgatattatacacgatattaaaaatcatgctctggtaccaataaatgacatagaggcggcagataatgcaggatccattaaactacaactcaattcaccaatactccagagcatgaaaactagaagcattcctcaattccagaacgaaggattcaaaatagcgtatagcaaaacagatgttaggattttatgaaattcgagagaaaaacattcctagcagcatataaccagtcttgggaaagcacgatccccagattctgataaatcattatcaaatgagcaaaccaatgacaaacaacacaaggcgacgtgtactgagagcacagtaacaggttgacacatggattaatttgactcaatcgaactatgaaatcaaagtcaaaactaaattcagaataaacagggcaagaccggcttcagctaactgaaaccatgcaattcatggctgaatcagcacttacatctactgctgcatcggcacagaattagaattaacgggagattaagaagaagcaatgttaccccaagcgacggtgcactcctcgctggtggcgctcgcctggttcgcctggcactcgatgcctacacaacacacgcacgcgcacccgcgtcatcacaagccataccaacaagctaagaagaaaccctagaatctaaaggaacagcagatcggagcgggggcgagcggaaggccagcggcgcgcgtgctcacagaggtccatgatgtggttgcggcagatggcgcagttgtccacgacgatgtctgcacgagaagaagaagaagaagaaaaccgcgacggaatcgcatcagatcgcacacgagaaagccaacaagcgagacgcgggcgccatcggcggacgcggacgcggacgcttaccccaggcccagagggagacagcgttccacttcttgatctcgaagcgcttgcccttcttggccccggaggaggaggcgccggcgatggaggggggcacggccacggcgacgtcgcccttgtccatggcgaaccctagggtgggaggggagcgcgaggaggaggagtagattgggacgagacgagaagcgaccgcgaggagagagacgagaggtaaaatagaaaagaggaggcggcggcgcagagtctaataaaggcctcagtccaagcccttgtaggtacagtattaacgggccatcaaaagcccaaagtattaacgggccatgcttgggttcttgctgaagatacagtttttctcttaattctttttggtgcatgtgtcatgtgtgagagagtaaatttattttaaatatcacaccaaggcctatttggggaggattatttgaatcacctagtgagtactcccttcgtttcaggttataagacgttttgatttagtcaaagttaaactgctttaagttgaccaagtttgtagaaaaaagtagtaacattttcaacacaagacaaatttattatcaaaatatatttaattattgttttgctcaaactaatttagtgttataaatattactatatttatctataagcttagtcaaacttaaacaatttgtctttaaccaaagtcaaaacgtcttataacgtgaaacggagggagtagtagctagttgatgagaatatggaaaatttgtgtttcttatattctaacttctattcactcagtttcaaattacttatctcgttctagatttttcataagtcaaccatttgaatatttgaccatcaatttctacaaactcatttagcttagcattattagatttatattatattttcagattgaccatgagaaatacttttatgaattataattcacgtgttgttgaactacacggatttttataaactaatggtcaaagatatgcatatttgacttaggacaaacctaaaacacgtaatttaaaacaggggagtaatttattttttgagtgatattttgatcatactttgttaaaaatattacaaaaatataattatattgttacccgtggtagttcacaattgccaaatatcctgaggcagacgagaacgataataatcgctgattcacgtgtgaccatgtgaggttggaccaacggcgtgacgtcaaagttcagacgatagcatgacgaggtgcaaaatcaagatccaactgtacgctgacagcagagctgacttgctaaatatcactaggcattcccacacacaggtgacaaagaagacaacagcaattccagtaaaatgactatgctcttttcccacgacttgttcgacattatatcgggattactagcgtctccaaaatttattgatactgggggctttccagtatccattacagacgatattgtataactctacgctctttagtacacagtttttaagcttccaagtaacttggcccgagtatcaagactgctctgttgcttgtgctggtatatgagtttatctatcttgaaattgtaaaatctatcagatatggtccccatgagaccaatgatctgagtgaggaccgtctatagctcgcaggagaacatcggtttggtgtctggactgagtactgaagaatgaagatccgttttgagacttcttggctttctctggttcttggttgaacttggtggtgagctttttaaagcagcatgtcgctgcctgattcgcttcggttagctccggttgaggctcttgaacaccaaatagccgaaaccgccaattgtcagggcaatgagtgggcagatggacatgtccatttccaggatcccgtttctgcggactgcatttccttggcgggtcaaggccaaatgctcatgaagcaagctggtcagattgtcaagctgatgtatcacttggcgctgacctcttgatatggcattaatctgcgaaggaaacagaaagtccaccaaaataaatgtcaagattcatacagaaagatgagtcatatctagaaaaataggtagtagtcagcaatcatgtatgaagtgttctttgttttgaaatatgattttaacaggaaaaaaacaaattcatcagaacacagagttttttttttggaatatgattttgacataagtaacataaattaaatacatcgggaatataaaatcttcgagacattatacagtacaatatcttaaaaaacatgccactgaaaaaaaagctttcacagcctttctgtcagcaaataaaaatggttcaaatcacatcacaacatttttgtgaagccaaaaaatttggagcatagaagtatgtatagttagcaatctaggcccgatgcaacatgccaagatcaactgttacaactccactgttttttatggatacattatttcactgcataaactacagaagctgattttcttcctatatgattggaagataaacttaagttccatacacttccctgtttatctattttcatgtgagtctaactgactactaccatgattctattctctatctattgtttctcctctcaaacaatagtaccagtagctgatggcccactaaattttcacttcagtctaaattcacttatttgaatactgactaaattaatacagtgacttgtacaaagtttccaattctacatctaaatttcaaacaaaatctgaaaagtgtctcgaaaataatagcaaaaaaatggacccatcataaccaatctattggtgagatttcaagtttgatgaccgaatctggttctggcatcagaaattcttttgaaaaaaaatactgttggcctttctgcagatgaccaagccatagttttagtcaatgattaaggtgaaatggtttgggagaatgcaactaaacacatggctgtaacacagactagcgaagattatattatcagatgatgcaattttaccttaagtatgacttaatttcaacaaacccacaaatccaagtggaaaagtggggggacaacacctcatgtataagattataataacagtaaggcaaatacctcatccacaatgggggactccttcaaaagttggttcgatgatgacgaatgaggtatcagggtaccattgcccaaatgagaaacaaagagatttgtaggtgcagaaccattgcaagtttcatttggaagagctaaattttgctgactggtcgatgatttctttattgcaaatttacagttgagttcttcaactcgagaggtgaactcgtccatcctctcattcaacgttgaaatctgttcggatagctgagtgatagcaccctacaagcagcagcaaacaaggaggaattttgagtcagtgttatctatgtcaagtttttcacaagaaaaaaatgttttaattagtatggtagctataactaatacaagtattctagaatgaccacctgattaattgcaggaggttcaggggctcgcccacttccaaaccttctgttggtttctgtcaatttactcaatttcacaatatttttatctccatgagttgaatatgaatgagatagaccactgcacagaatccacaaggtaacatcagcgagcttgattcagtttccatggtttcaacaaagtatagcatttcacaaaaaataaattttgagcagagatgacatgaagaaaccttttcaggtgtttgtttctcttatcagcagaaacccgagaaagggcctcttttggacttgaaaccagctcatcatcaatgctgagctttgtcttgagatcttctggtaatgcctgcatgtaaacttatttgaaaccaccccaaaactaagaaatacaactagtgctctagtaataaggtgagaagtgtgtatatatataattatcaaatacataccataacatcgtttatcagtttctccagctgaatttgttcaatatatgtgcgtggaatataagagccatccagacctaacttctccgctacaaatttgacatgatttctatctcttccttgcacctaagaaaaagcaacataatattttatgcatcttgttaacaagtggatagatacaaataataataactagagtatcagtcaagatgtgcacagagaaagatcatgttgaaagagaactgcaatcaaatagcaagagtgttcttacctgtatataatttcggttaagttgctccaaccaatcaattttaacagttgccttgccatcagaaaacacacgactctttctcttcagtatagctgctatagtatatcccaatgccatcaaacctccaagaagacgaacactgacttcaaacgtaatccttggtgatatgataaaaggattatcggtcacccactccttcaaattatcaataacacaagttagtgaacacaaatttcaaaattattgcaaatacgatatgataataaggtatagcaaaggagtatatatctaagctaagtagctaactgctgtggtagagaacaccataagtcagcagacaaaattgccaaaaacacggcagttacaaagctgctagtgaatgcaaatacaattaagactcagctgatctttcccttactatgctcgttatgcaattaattttttttgttttatgagctacaggtgcaactgttgtgaaaatattctagtaggaataagatgcatatttctggaacctatgagcatggcactagggaacaactaacaaagtggatataaaataatgggccagagaggtaattcttgtaacaaaacaaccaactatatccatcacacatatgcacttatgtagccattgcaataaattgcatacctcaaacatcagattatatttcccttccctattcctcattctcaaataagattggcatgattctggatcttcgcctggaggaagcaaatatatatcataagtttcttcaatgctttctgtatgatcttcaccaagagcaactttgatgtcagtaggtgttatagttcgtggagactgcaagagtacatttccaaaagttaggccatctagataaaccacaagacaagtatttattagtattaaaattatgctattggtgaagagatcaatgatcagccatcttgccaaaacatggacactaaaaggaacataaataaggagtgcttacctttagaatgtacataggattttggaaccctgagaatgggttgaacttgttgattatttttatatgtgctgtctgcaagtctggctcaatgaaagccttatacatcggataaacctgaaaaatgccatcgttcatcttgttaaacaacacagatggatgaaaaagatactatacatacaaaatataaattgcgaaatgaatgtttggtttgtattaagatcttttgtggaaacaaaagataggggaaaggcatatatagggtcaagttcaaaaaggtgaagcaaccgtttcagatatctgatgaattatttcctcaggctcctggccagctctctgtatgtccctcaggaccctcttcaccaggtcaaaatgaacaccaccagtgacagaaacacgtaggtccaatacagatcgtaacttttcactcaatgcatagatgccttcaatgataacaatcctagagctagggacatcaactgttctgtttgccataagaaaagataacataaagacatatgaccatatatttacaatactaaaaagtgacaaactgggaattattatttaaggacaaactacctgtatccagtccggcagctcatcttgaaatcatatattggaacctgaactgatcttccctccttcagaccatgaatattttccaacagtgtgtcgtagtctgttaggcgtggatctgttcaaatgtcacaaagatcagacatcactaactcagttaagtagttagttagcaccactgccgctcccaattgaatgcagctccaagcaatcaaactcactaatacttcgattatatcataaggcacgtacaacaatcatactattatcagggcatacatatgcagatgcaagaagtaactataagataatgcattcagatgtatgcaaagtattgttctgtgcttattaaggaaatctttcaaatgtaaaggaagttctgtccaaattacgggatgataagatagtatgcgaagtgcttggaacttaggggttaccatcaaaattgccatcaactatgcgacttgcatcattgtagttatccattgatatcacagcaacaccgggcatgaaattgagcaccttctcagtaaacacagtcttcccggccccagagggtccagcaacgccaacaaaaatcatcccttcattgtgctgcaccagaagctggcaggcacggatcataacaaagaagcctttctcaaatgacaatggatcaggaaagcggacgatttcgtagcgatttgtgtccttccttttcaccaactggacctggtcccgcagaaggccattacgcctccttggcgaatcagccatggaatcacttcggtccattcaaaggctgaattcaagaaaacacagtgacttacaatcattaaccttaactatcaagaatataacaacattctaaactgaagtccagtcaccaccatagtagaacacagtaaaaacgtgtacgaatgcaacaccatctgtcgaggtagtagtagaatttcttaacgatcctacttgttcccactaaattcaatcatgggaggaaaaccagacaacaaacagggtatggatcctgcatctacaagggattggctcttccgtgtaccacatggatcgcactacacaactgaaacccatggaaccgacctaacgtggcgcggaggcggcggagtgatgactacgagaaaaaccgaacacattcagttcgattccaaccttacatgaacgccgccccggcccgcgtgctcctacaaacctgctcccctcgccgtcaccggccgtgcgcgcgagcacgccgcgcacacaggggagaaggctgcgactgatttccggaagcagtggtcgaggccgtcacactccaccgcgccccgcgaggaagcgaggcttcctccgccgccgcgcgagagagagagagcgagagcagaggcgcccccgccaatgctaaaaccgcacacgaatcatccactagcaactcaactctcaaacagattaacaaaaccacctcccaaccaaccaaacccccccgcgcgagtaatctatatgcaacagggcgcggcagaattgtacggaatcgcagcagattaatcagggggaggaatcgcgaaaaaggaaaaaaaaaacccagtagtcagccataccgagatccccggaggaggaagcgtctggagactgcgccgccgccgccgcgcgcggaggagtgggggctgcttcggcggcgcttcgccgcggcgcgttctggggagaaggcggcgcgcgtgggggtgaggggacgggagggttgagccgaggaggagtagtagtagcctagtaggaagaaacggagaagagggctctctctggagatggagagggcggcgtcgccgtcgatccaaaaagcgctggagatcagtggaaactaggagatgaatcaaggttaaaacggtggggccatcaccatcggcctccctctcccggttttatataggactactactgctactcctacaagctttgatcatgtacgccaaatgcagggggtggcagctgtagtattttgcacgtatttctatgcgtattttgaacgcagagtttggctaaaaaggtagtcctcggggagtttggctgaaaacgtactccagtttaaccgtgacatgtgttaggtataatatagaggtatcttttctcgtattttgtatttgcacgaatcgtgtaaagttttatcgcattggtagaatatgactgtgtatattggacacggggtttggttaaaaagcatgtaacacgacatatctaggcgtaacaaaatgtctctttgcgtatttttcatgtacgaattatgtaaaaatattgtcacaaaaatagatcggactaacaattttatattgtgtatatatactaaaagtagaatttggtttaagagtagctaacatgtcatacagtgggcgtaatagaaagcctcttttgcatgcttttgtatgtatgaattgtatatagtcttgtcacataggtgaattagacttaacattttctgtgatacatgagatcatgttcatgcatattaaggtaataaactatcatgtagactccgtaagatatattggccaaaaatgacgagtcatgtaccataaattatagtcaaattaatatgttgtctcaacgtttgggtttttgctaagaaaagtgaagagcgtacgaagaacggatataaatcataagagtcatcgcctgctcactagacatgcattacgtcattgtggattttaaggaaaaggtaattaggcatgtgcacatttgttgaacaaataaagataatcttctaatacacaaaagctataaaaagaagtacatctaaattgaaagatatgataattaaatacatgagaccttaaaaaagcatcaatcaaagaacagcccgaatagacgatgcgcaaaggttttgcgtgttcggggaaaaaagaaagaacaccccaccaaagagaagacaataggttccaaagtctacctcaactcttctctcatctgatgtaacatggttatctacacatttttccccttagcagtcctttatgcatcttttgttttcaattaaaagtaattcatgaatcacatgtttaacattgatattgtgtttatcatttttatactacaacaataacacattcacatcatacattctagaatgttataaaaaaatctgagccaaaacaaaacaacatccaatattttagtcaaattgtcaagagttataaaacaagttaaatgtcaaactggaaaaaggaaaagagaaaaaagatatcttgggctctcaattttagt

SEQ ID NO: 9865 - DNA, 22956 bp, Oryza sativa
  unsure (1)..(22956): unsure at all n locations
cattatcctcacagccccggcgcactcgcccgcagcgggccagccaccgctccgcgcgccggccgccggcctccctcactgaagaagaagagaggagaggagaggagagaaaagaggcgacgtcggggcgggcgcccgtgaaggtggagaagagggagagggcctcccaggggcggccgtggcaagagtgcgcggagaggatggcagtgtaggacgagtaggcaagggagggagagagggtcgacagggagagtgcgccgctcgccggcggcggggcccgaggtcgagcacccggcgcgttcgaacatctccgccgccgagctcgccatcgtgtcgaccgccacctctcctcctctcccgccgccatcgcggaccgcctctctctccctctcccgctgccgtcgtccccgctccgccgctggccacctctctctccccctatgtcgccgcgcccgctcgagagaacccggagagaagataagagaaaaaggaaaaaaaaaaaagagaaatgtgggacccacaccattgtctcacttacatgtaggccccacatattaatattaattatttttgctgactaggatgccacgtcagcgaaaccacccatgtatactgcctagggactttgagtgaatggttttttgtggttaatggatccaaaaaaatcttattgttaagttgagggacctccggtgaacttattccttttcgtcaactgttttcatgatttcgatctctcgcttgatttccacccgtctcctacctgctgccgtagattgtatcgcggagataacgttctgtttgtattgaacctttcctttttcaagcgagttattagaaacttcattaaaaacttttaactgtatccgcatgtccttcgcagattgcatctgaaacaaatccatatcagggtccttttttactctatacaggcacaccaaggtccttgtaacttcattttagcagtggtttttactatttcgcttgtctttgtaacattgcaatctgcaaaagcaacctcctgttaagccggatgatcgtcataatgagtattatgcagaggaggaataactgggaactaatttgggtcaagtgggcgtgtgtgcgtgtcttctgagttgtacgcgttcaacaagattaatttggagacaagatatgagaggtgattaaatccatttcactagtgtgcaatgagcaccctcttctctttataaattctgtaacggttgattttaacaataaaataaacttctacggttctacatctgctttcactgcaaacatctagtcatacaaaggaatattttgagccgcaatattaaaaaaatagggataaatataacaaaacacaaaattctgacatgaatataaatgtaaaataaatgattgcaaaatattaaaaaaacacatgaatgaatgtttaattgaaccgtagaaaaacacatgaatctaaaaatttcccacaagattagagctcttactaagttttcttcaaaaaatatataaaatgaaccattccatataaattctatagtatctgaaaagtttcaatcagtgaatcaaataggcacataaaaaaaagtcctatatgattttaatgctatgaaattcatgcatagaatcctttaattagcccttatacatcagtacttacaaccttgtcatcatgatgtacttcctccgtcccaaaaaaaaaacttaacctattaagggatgtaagttttttttggatggagagagtaactcgcaactctcttgccttgtggagtactccctccgtcccataatataagggattttgaatttttgcttgcaacgtttgatcactcgtcttattcaaaaaattttgaaattattatttattttatttgtgacttactttattatccacagtactttaagcacaacttttcgttttttatatttgcaaaaaaaatttgaataagacgagtggtcaaacgttgcaagtaaaaattcaaaatcccttatattgtgggacggagggagtagtacctaagaccaaatacaaacatattactcataatacaaggttagtataaccgttcgcaactctctcgtcttgcagtatatatgctccctctagtcatatagtagtaatactttagactatgttcggttagtcccgagagaaagattaaaagggatttatttcacacctattatggtgtggaattactccccctcaaacccctccaatccgctttaaccccctccaaaccaaacaaggccttatgttttgaaaataaaataatcaaactttataacttttgtttctaaaatacgaagaccatacgtaaaattagttttgtataaattagttttaagaagtacttcaacatccataaaatcatatatctattgttatttttatttatactatagtagaaaataaaggctattgattttttatatttatactgtagtagaaaataaaaagttacagttgttcttttaaggccgtttcgttatcaaccggagggagtagcacacatccaagcccaccgaaaaacgccccacgcagaaaccgggccctataaggttattgcaggcttgcagttatgacaattgacaagaacgatcactaaatcctgggctacaagagccttcggtgtgcgctgaaaaggtcagattaacactgaagcttcgcccaggttaatcgtgctcgaagttgcacaatgacgaggtgaaaggggccaaaacttcttttcccggttcgctggttttttaagtgccggcgggcgatgggaggtggacgactgtgctgtgtgcagagtagtatagagaaaattgattagcgtacaaaattgacccattgcatagttgtacaaaatcataaaagagaacagggtcgatgttgcaggaaagatctgaaatgtaaatgaacagagatagaggaaattagtgacgaatgagacgaagacacatcatccatctttattcatagaatccacagcaacaagagagatacaaacacacacagaccaatgtatgatacaaatgaataagaaataaacacaacatgcctcactcggaaacgcacccaacccaaccactgctactagtactactctatagccggaaacgactcgaaacgagccgtgtccaaatcggagatcatcaacgaaccaattccatccatcaccacctcgcgcgcctgcctagtgcatgatcccacccgcgacgaggatggacagcacggcagagcacgccacggccagcgccgccgacgccgcgccccccgcggccgcgcccgtgaccggcgccggcgccggtggcacgcccccgtccacctgcgccgacgccaccgacgcgaacatcacggccaccgccgcggccacggcgaccaacacggcgcctctagatgccatcgcaggaatgaccgagcacggcaagcgacgcagaagcacctggcagggagagagagagagatagagagagcggtgaaacggtagcggcatgggtagtggggtatatatcgaggtggcgcgcgatgacgcgatcggaggctgccgccccgggcgcgcggggcgcttggcgccgtaggcgcgacgcgtggtgggcctctccgcgacacgttgggctcgagggtggcgcaggtggcgcgacgcgaggcggtctcggcgcgggcacgcgactccccaccccaccactcgtcgggtctgacgactgacgcccacaacccaaccgaccggaggccctctgattggcgaggccccaaccgcaacgagtcccctgcacgactcgacgaccccggctaaaaccgacaccataccattcatcagccgccatgctacgccaagcacaaacacgtattaatcccggctaaaatttacagcaatactagtcgacgaacgatacgtttgtagtactatataccacttgtaatttgcgatgactagcagtagaatggtaatttaacgtcgagtacgaggcgtgtctcccacgcttttttgctcgggggtcaagggtcgttgtcgtacatgtacacgtacgttcgtgcgccacgcagtgacacacaccacaccatgacgcacacaaaaaaaaattaaaagctgtgcacatgatgtgtagggagacgtacaagcccggctacgggcgatgcacagggccacctgccgtatcgatcgatcgatcgatcgcacggtgtctacctccaaagtcgtcgcgcgcggatgcgtacgctgacgctttactgccacgattcctctcgttggctcgtagcgcgtgcgtccgcaacgaacgttccaacgagcagccgagccgactagtaaaaaacgtagcgtagtgtgtgttggggtcaatcacggtacatgcgcccctgtcccgcagaagatgtcacgtatttttttcgcgatagagacaggaggcgatcgaccggacgtgtgaggttgtgaccgtgaaatgtgcctagcacctgcatccatttcatcggtccttccttcgcaagagctgtacgctacattggctacaaagagaagataaaaaaaaaagtgttggtacacctaaaagtccattcagtttcgtgctgagttttctgaactgggtctgaataatgcaagagccgcaaaaaagaaaaaaaaactcgaagtgtctgaactgaacgtgcggcggaagccggtcggcgccgtcgtcgaatcgatcgatcggtcgcacggcggaagttgccagggcgaaagggagggctcagctgcaggtagagagcacgtccgtctcagtagtcggctcgcgattctcagcttgtggccgtggatgcgctccatcgattcgatcttgtaacacgatggcatgtctcgatcgacaatactggaacgatctttaggggatttttatcactcgggtatatatgcatatcatcgccaagccggccggtagatcaggagttagtaattggacttaagacattctgaatctgttctgtccctcgttttgccgtgatcgccagcgtcgatggatgggtcgttgatttttgcgtacacttgtcggtagcacaagacttcagccgaggtaaacagttaagatcgtctacagaattacagataacttgtcgccattgcaagttagcttgaaaagtagttgattcgtacaaatacacaccaaaccagcaagacgacagtgcgaataaccaggacaatacacgagtttctggtactgcccttgttacacgaaaaatattatttctggtagtgtacttataatgtttcactatatatagatctaatgttgcaatgaattaaaatattattttttaacaaatcacccatatattttggaaaccctctattaagataatttggtttattttttgttccacaaaaaatgtttcacctagtgtactcacaatatttctctatgtataaatctaatattgcagtaaactaaaatattctattgcaacaaaaaaaaaactcacatattttggaaactccctattaagagaattcgtttcattttttgttccaccaaaaaatgtttcacctagtgtacttataatgtttcactatatatggatcaaatgttgcagtgaactgaaacattctttagctatttgctgaaacattgttttatataaggtgaaacaatacccgatttaagcaagtgaaacattttcgatctacttagtgaaacaattccgatatacctggtggaatatcgtgcaatatttaaaaataattcaataataagctaatttttttcatcggaatatatccatgtgtagtcttattttgaagatttaattgcaacaaatttaatggtgtaatcggatcatgatttggataagtaatttaagagaaaaatcaatttaaaatagttttacacgtaaatcggataatgacgttagcaccgattttaacctcctcccatcatgcgcccgagccggagtcacgtcctactcctacttcagtgtgattgtgtgaacaatagtgatagggaggcaaatctgacgggcaagttattattatctaacagaagttaggttttctgtcataaaatttcttccggctatactactcattctaaatactttagcatatattaagttttttttaaaaaaaaactataatactaatgatagtatattgttaggagggtacaaggacacatacaaaggtttctatttgctatctctcagttaccagcaaaacaaaatcgttgacgtggaaaagagaggagaggagatagatgtagttgttttccatgacatcggccaaacaacaactttggcgagcaaaaacaacgaaaaatcaagtgttctacatcgtggtatttaacaagaggcggccttggatcccatgggtgattggatttttggcaaggaatggattggtgtcgcataaaatcgacatcgatgcaagctaccatttaggagttgcacatatttggggaaagagggaggagtaaatccactatttatttatttatttatttattggggggagagggatttgaatggaaggtgatagatgagtgataagtattttgagagacactttaaatgagaaaatgggcatttggtcacgttccaaaaatggtttcgatggaatgccatcccgaaaacacgtttcgctaaaatgccaatatggagcgcgtgatcacagccactttgttattttctccatttttgtcattttcaattccattttcgttggaatatggcttgatgagaccaaattgccccctgctcaccgagaccagcggtcctttcctctaggtcatccacccaggcctcgtcgccggcggcggcggcgaccacgccgtcctcaatgcgcaggagcaggtcttgctccatgtcgtccaacctcttgacatcgtccatgtcctcgacgagcaggagtaggtgctccggcaccgcgttttcaagagtctggacctccttgacgccgcgttcctctccagcctctacggagacgcgaccgggagcgtgtcggtcctcgtccccaccacggccagcctcatggaggcgctggggagcgcgtccagcaggcgcatgcgtactctgccttatctcggacatcatcggcctacgcgagccgccgctcgtgccggattccttgctgggctagaggcgactgggtggatcaccgtgcgcgcgccggcatacgtcacgtgctgggcagggccgcgctacacggaggcgttggtggcctccccggacgccgccgcgctcgacaccgttgtgttcacctccaccgccgaggtggaagtcctgctcagggggctagacgctgcgtggttcttgacgctctcgcctcgatgaggagctccgccgcgagcaagtcgccgctcatgtcgatcccctttcagccggtgagcggcaatttggtctcatcaagctgcattccagcaaaaaaaatggaattgaaaatgaccaaaaaggagaaaatggcaaagtggttgtggtcaggcgttccatgttggcattttagcgaaacgcgttttcggaatggcattccaacgaaaccgttttttgaacgtggccaaatgtccatttttctcattttaaatactagaaaaataactatttttaagaggaaggtactccatccgtttcacaatgtaagtcattctagcatttcccacattcatattaatgttaatgaatctagacatatatatctatttagattcattaatattaatatgaatatgaaaaatattagaatgacttacattttggaaaggagcaagtagtacataactaatacaagattagtagattacacctcaatttgctagtttgctcacgagaggtcctgtcttcccgactgaactgtgaactcccagcacttcgaaattaacaatagacttgatttcaaatctgaacaaacgatgattagtgaccgggaggcagctgttggccgctgtcccggtgtcccctacattcattcacgcgcggccgtgcggcaccatgaatgcatgagaccatatgggcggagagtcgggttgatcgagctccgccccagggatcctcgcggatgattgatgattcttccaccgccgccgaagggtcacaggactcacaggtgctgtcgactgtcgtgctgatccgacggcttccagtaggattacccatacagaggaccacatgaatatgaattcgtgcaaacgaatccctaattcgaatcgctatcaatcgtacgcaaatagaacccctaggatcgggtaattcggtacaagcgggagcggtcctaacttatgcatttaaatctccgatatttatgcaaatcagtctcttccataccgattcgtcgcccttcttagacagaccctaacgtttcggtcggcagcatctcgccgccacgcatggatcgagctgcttcaacctgactgtggcggtgtgccccgccgatcgaccaataaccgcaaccattacctttctgtgttaaaataatctacaactaaattagatataacttgatactacgaaccataccgatattcgtaataattgattatgtctaagttgttactccatttatttttagacaaaataagagcatctccaacagaaatttgaccaacacagagaaaaaatgagctccaacagattcttcattcggatgaccaaattgctcctccgacagaccaaatgtagccagcctcctccactggccaaaggtaggtcccaccaccactcctagtctgatccttcctctctttctgtctacccaccagcaaggcagcaacttgagcgcatcggccggggccgaaccggaggacacgccggccacgagcgtgccgccggcgtctgggccaccatccgccgcgactatcgtcgtctgggccaccgttcgccgcggcagtcattgtcattgtcgctgcgccacggtcacgtagagccgtcgccaccgcaaaaggcgaaaccacgacacgcacagtgaggaaaacgaatcgcaagtcccaatcaattcctgccatgccggtggcggtggtgatggcgaggaggatgaacccttgttcacggacctccagaagctcccgccggacgtcgcctgcgacgtggaggctgttgttggcgcggccaaggggttccacgcaggcgccacatgggccaggggcctcctagagcggtgcggcgccatctgcatcaccgcccctgccgccgccaagcatcgccgcgagccctcttgcctcgagcagcagcagccgctgtgccatcacctgcgcatccaccggcgggagggtggggaaagggaatgacgtgaagagaaatgaagaatggtagagattgacatgtgggacccactattaaaattggagaaggtaatagagagatcgttggagtgaaatgcaaatttgactctccaactctttggcaaactggccaaataggtatttagaaagttgtatttagagatgttgttggatatgctcttattaattcttatctaccctaggcctcaactcctcctggctgagccgcctcacattcgatgcctgcagcttggcacgaggcaaggcccccgacccaccaaggatgtgttcggaggagggggttaggaacccctcctctctggcacgcaaaacgaagttcgttttatcgcatgattaattaagtatttattattatttttttaaaaaaattaatatgattttttaaaataacttagatatagaaaatttttgcataaattataccgtttaacggtttgaaaagcgtgcgcgtggaaaacgagatagttgcgttgggaaaatggggggaagaacacaacccaaggaggcatggactacagggctagccgtgttgattggaaaattagggcttccataggatggcctattcagtcaaagaaaaagccaatgtttgaattttcaaacacaatttttatattgatttgagatattttcaacatagtttctttttcagcattggcttttaagtcaccgagaacacatatataaaattttacctataaatacatttttattctctaataagccgttttggcttgttacgaaaaaagccaaacgatgagaccctgggccgttggtttgtgccccggagccctgatcacgcgaaagtggtggatggccggatcgaaaagttttgggggatttttatcccgttactctgcacttctgcagatcatcagaagcgcccggagagctgggtcctgtgctctgaattatccaaggggcaaaaaaaaaaaggcaaaacgaatgaaaagaaaatgattcagatactcaaggggacaggatttttgttccacgttagattaaaatcgcaaaatcattggcgagaacgtgttgctggacccatcaagatggaacattgttgattggcgagctggcacgcatgctaggtagatagctagttcatgggtcccatgacaccgttgatgcgccatgggcttgaactggcttttgtgtattttgcaaggcttgcacagcgccaaaccaagcttcctcctatcatagcatcaagttgaacaaagttgttcctcgcaaaaaaaaaagttgaacaaagttgttaaagatctttttgccagcttcaagccttcaaacatggggtttgctacagtgtaaatatcacttttaaatcctaaagactaaagaggatcacatgaagtggaccgatgaattttcaaacacnnnnnnnnnnnnnnnnnnnnaccagccttttaacacttcatttctctaatctaataaaaatctccgcaacacctcctgataacgaacgaactcgctatcgcttttagtttgagtaggggccggaaaacacaaaggaaacggtgaatagtgcactgcaaatcacgcccaaattgcccaagttattggtcgccgaagactcggccaagtgaatgactcgtggaaaaaatctcgttctagaacaacacatgcgcgcgttagctgcaaagcctgcaacttaatcaaccgtgaccagttcaaagttcagagatgagaggtaaaccaaaccaaagcacacacacaacgtggacgcctctggctgcacgaaacgggagagatcaccgcgcgaagccgcccgttcaccatgcacacatgcaggcacgtacgcgagcctccacatggcggccactcgcatccccgaattagccccccactaatcccgctataaattgtccccgtccccgcggctcatctccctcctcaggcaaagcgcagcagcagcagcagcagcagtagccatctcttcttcctctcgcctccgtttccgccgtcgcctgctcggttccagctgagaccgtgcgcgcgcgcgagggagcaacctcgagaggaaggggatggagatgaagaagatcgcctgcgccgtcctcgtcgtcgccgcctcggccgccaccgtggcgttcgccgccgaggccccggctcctgcgcccaccagcgccgctcccgcggccgtcgcgccggccatcggcgcggcgctcggcgccaccgtggtctcgttcttcgcctactacctgcagtgagcccagccggaggaggaagagaggaagaggaggagatggatgcatggccatggctactaaaccgatccaaacacgcgcgataatgtgggtgctttgatttgtgccaactttgatgcctcgtcttctttcttctctttttataatgggttgtatttttgatgcaccggtttgatttcggtgctttgatttctcatatttcgtccaccctatttgaagggaatggatattgtactattattcaccatttgtttggattaaattaagatattggaattactggctacgcattttcgtttgatttcaccatcattcggttacacacgttctgacgttcatcttctaggagacgcgcatcaatcatgactggcatgttaatttggcaatggcattgccgtattggcattcgtattattgcctgtatctgaataaaatcgagttcatttcgtacttcagtaattggattactgaaaggtatatataactgctaaatttcttttcagtttttccataacgcagtagattaattattgccataacactcagaaacaaacaattaagcaggaccaaatggaacagcctggaagggaatgattttcagaaggccagtgacatcaaattgcgctgtaatcatgccaatataaatcattctagttccttcgaacagaatgtaattttagtccgctttgcagttggcaaaagacttacaaattccgttaaaacatacataagggatatgtggtggcttaatatcacccgagacaactaaattccacaagtatgttcctcctctttttttttttttttgtcgaactgacagatcaaaataggccccagttcattagatcaagaaaatcacaaaaatcttactaagcattattgctagctctcctgaaacaatgcctaagtaaataaaactctgaacaaaagttgtaaagggggcacacgatctgcacaagtacagaactgagcggccaaaaataagcattggcaattcagattcaactactccagcagcggaaaggaaataaaacacaggatactctgttgccaaagacaaggagaaacatctcactacaacattgacatcagaccatcagtccactttgccattggcttatttgcacgcaccagaaagaatgaaactaatcggaaaaaaaaaaggttccgacaaagtctctgcgatgctgtatcccttagtggccaaaaaaaaaacttgctttcgagtcatgttacttagtgagagtgtagagcatgtgattcagaatgaccaccacaattgattcataagtcatatcaatgataacaatagacaaagaagcatgctgccatgcgcaggattcagaaacaaatacaccatatatgttctttctcgttaaccatgacaaatgtatcagcttgacaggaatgtcgcaaactcgcaactcatcaaggaaacagaagattaatctagaggatacaattcatcttgaaataatgcagagtacagattacagaagagcagacaactaaagcaaagagccacacttcatcataggcaggtgccaaggtcacccatcccccagcatgtagctggtaccttggccttgcaaggtcaagaacattataaccaataacataaggattttcccacccttgtgcaagaggaaaatgataatggtggcataggcttgatctcagcccaaggaggatacctaaactaaagatgatgtactacatggaatgctaacagtctgacataaccaaagatgaaacgagacctgaaagtttaggaactgggaagctgaaggtgatcaatgtgtatcctcctttcagccaaaatgccaatttatagtaatagaaaggcaccaataatggcaatggttatctacttgttcagaaagagctattttaactaggccaactgttaagagcttaccaattagcagataatattgccggtgaatctttgtcacatccaaaaggaaagtgacactttgtcacatccaaaaggaaagtgacaggctattccactgcaccctacagaattctatttatcagaggaaggctaacctagctgatagaggatgtctgacgcatattctgtatacagcattaccagtttgccacttagaccaaacctacaagttaagcacagtgcagcgtactgtatatatttattaataatgataaactccatgccttcatcagttttgctctacagaaatgatcagtatatatgatgccttcccatcaatagaactactactccagattatttctagtttatcatggaaatcttgtcagaaaattatcaaacttctcaggtatcaggatacctgtaaaaatctcatccaggactgtagtctgcgatatcttactttcccctagcaggatttgcaaggcctatatggccataccatttgttgaatatattgctacaaaagcatatttttatttaagggataagaatcaaacttttagattgtataaattatgcaaagctaaacctcattgtattcataaggcaagtctggacagtgggaaagttccaattatacagctcacggtttattaaaagcaacaaccttttaaaataaaaaccaaccttttaggtcatgtcaacattgctaaagactaccttcaagttagtgctgcagatagggagaacttattaaaaacttattgataattcaagttctacctacaacagtacttacaaggtctcataaagaaagtatctgcatacatttccatcactaatcaagacatcactaatcatcttgcaaagaaacaaaatcagctcagtgagggggtgattggattatatttaatcccaatactgtttgctatttggaaataggagagagattcagtatgcaagctacaaaaatagatatgacaatgtgaccaataagatgtaaaataggagaacctatctaatctttatagaaaaacagttgtccaaatagaaaacaaacaaattaatttactatcatttggacattgaataacaaaccattttaaatttacacaaatagaaacgtgtcaatacatagagcaatgctgagaatttcagtagacgaaatcacatcaattcaaagccatttattgataaattcttgtgacttttgaaaatatattgatctcttgtgaaactcaatgtaaacttcaacagctcacaaatcaacctaaaaagactcaaattactgataaaaatgagctgtgaactgaaaacataaacagacaaagagctttccaaatgcattctcacctcactaggtaccaatagctgtctagtgcaagatgataacttgacaaaacatgatggtttcaaaacacagttcagccataaacgagtcagcaggcaaatggtatctagtaaaatgtttttacaagctcactgctcaccacaggcacagcaaccatgctaagttgctaacaagtaacacagagctggtttgtcaaaaatccacaggaaataagaagatgccagaagcacttcgatacaacataaagtcactgcacttagcaacatttaaaaccttttgcggtttagctctgcaaggtattttgtaacattgctttgacttccattaacatagtggtcataggaagagtaatctctacatttgcaggtaaaagtcgagacagtaacattacgatttccttgatagtgtaagcatacacaaaaaaaaattactctagcaatgatcgacatccaaaagcacccaaatttcatagttcagactctcatgcctaccaccagtgcacttttattatccgaacaatgaaactaaccatccttcctagagagtttcaccgcatcaagatcgtagctactgacccgacagacaccccgagagcgcacgagatggcgaccacccgcgttcggagcagcatgaggttcacattcttcgtggcctggaggcacagcgtgagcacctgcagccgcccgttggcctccatcttctggaagaaggcgatgggcttgatggcgcggcgcagcaccagggcggccgtgaaggggaacgcgaacgccaccaccccctgcacggccgcggccgaccccacgccgacgggcgccgcgcccgatgcgatccacgcgcccgcggcgaggtgcgccccgccgaggagcgcgagggagccgctgatccgctgcacggcggcgcggagcgcgtcgagctccctccgcgtctcgtccgcgagcggcgaggtgtcgcgctccaccgtgggcccctcgatctcctggtgcttcatcgactccggggacaccggagcggggccgccgccgccatcgggttgcgagggagcggagaagtggcggtgcgggtggaggaagaggaggggatgcggcttagggagaagcctggccgtctcggcggcggggctcaggaggcggcgggagaggtgggagatcgccatgggagagcaactctgctgcggagtgtgcggcggcgcaagagaagtcgtctcctcctccggtcaagccgaaggcgtaatcctataatccgctttccacataatgtcacggtctccaatctttccgttttccaggaccggaagcgggttaacataggatcctgcggctggacacgtggcggagcaagggaaaaacgctagggagacgggggacggagcacatgccggccacaccgttcagcggctgccgcctggttcggatttgccttcctttccaaaccagagagcggtttacagaaaaccgcctttctcttcttccgtcttcttccctttccatttctcccttttcctacctcgcctcgccgcccgcaccgagcaaactcaaaccctcgccgcaagaaagaaaaacaaatcgagagaaaaaaccctcgctgctcgccgccccaagcgaagccagccatggtggtgtacacgcaggagcacgtgtaccggcacccgtgggaccgcgtcacggcggcggcgtggcggaagttcaccgacccggcgtcgcgcacggcgctctcccacgtcgccgacgtccacaccctccaccgccgcgtcgacccggaggcggggcggctgcaggctgcgcgctccatcacggtgcgctccccgccgctccccttcatcctccgccgcctcctccccgccgcggcgtcgtccccgtccggcgcggcgctctgccactgcgtcgagacctcgctcgtcgacgcgccgcgccgcgccatggacgtcgtcgtccgcaacgtctccctccgcggcctcatcgaggtcgaggagcggtccacctaccggccgcacccggagcggcccgaggagtggacgcagttcaggcaggagaccacgatccggtgccgaccgctctcggccctcgccgccgtcgcggagaaggtcgagacccgctgcgccgagagattcctgcagaacagcgccaaggggagggaggtcgtcgagcggatctgccggtatctcgaggccgaggccgccggtgctgcatcctccgccatctgagttggcctggtttgcgcctcctcacttggccttccttgatctgatcggatcgaaggattcgctcgatctgtgctgcgtgcgcgcggcgggacctcgcctcttggccaggtcccttgcagttttccatttttttttatgaaatgatgagctgaatcctgaatggaataaagcttctggacatatacttaatttcttcttgaccgtggaaccatgttaaccccaatttgtgcctgttcttgttaagcatattcagatatgctatgacatttctagttgttattgtgctgatttgacgaattcgttaactctgatctctgatgttttcatggatttacgaatgtgttaattcttgaggggacaatttgattcacatataggatactgaagttcgtatgttctatcatttttgtttgctgataagaaaaccaactgggtgctgtgggaatgtgttaactggtagatactggattagctttcttcttggacaattcttgcaagcgtaggttgattggtactttgtgactgttgttgtctaattggctcctctatttgactattcctcctctattatgatgttgattccaggaaaattataatcttgtgcattggtcacattttctgttgtttaatctattgatggataagtagctgcattgactcatttttgctctaccacttgagactgattgagttaagaaatgaggtgagctaataaccgtacctctaacgtgtttggtgataacaataattgtactgttgtttcagccttctttgttgatgtcctgagcaagttactgtatctaggttgataagctgtactgcctgagttagttctatcttattggcttctgagaaagtttcttctttacctggatgtttgagttttataagtgattggctggggaattaacatttagtttattagttattataacattttcagagggaacacattggaaatatatagatcaatacaagttcggattcacagtttgaaacccatgtcatgtgttaggattgctgccatcttgtgctcataggtatctacatcttatcctacggatccagctttcttcagagttttgttccattttgcttgatttgagacatgcttgaaatgtttatttcaacatcttcccgacatagttttgtatggaataatgaggcgatgggccactgctagttcagaattactagctttcatttgttcctcttcagcatttttctttactctggtacaggcataagccctctcacaagacaccattcttcctcttggcttcattgttactgtgttgttgctcatcagttatcaccatatttgactgtattatgtgttgtttgaactgtgatatgagatctaaactgttttccagtattgtttttcttctgtattccagtgttgtttggtagttccatgattgtttgtcattaaatctatgaagaattaattattttgttgtttataaacaaaaagaatccagtgaaaattgctggtgtttgttttgtttgaaagttttaatgtatatagttttcagcacaacctgtttcaatactcctgaagtcctgagaaccgaaacatattctgcagaaatgctgatgaaaaacagtgaagtttatgaatgctgatatttttgtactcccccaatggcatcagctactagcctacgagcagcctctgctgcaaattcttgtagacctcagtgcatcggcctctgttgcaaaataacacctacgagaattggtgctgcagctgcatgtatatctgtgttggactgttggttgggtccagctctctaagcgtcacaattctgaatttcggatggttgtgttgcacaggagttgctgcgtttactgaattgctcttacgccctagaacttcaaggtgaaaagttttggcgtgtcacatcggatatacggatacacatttgaagtattaaacttggccttgaaactctagatgtgaaaagttttgttacacacatttgaagtattagacgtagtctaataacaaaataaattacaaaatccgtctgtaaaccgcgagacgaatttattaagcctaattaatccgttattaccaaatgtttactatagcacgacattatcgaatcatggcgcaattaggcttaaaagatccgtctcgcaatttgcacgcaatttatgtaattagtttttttatctatatttaatactccatacatatgtccaaacattcaatatgacagggtaaaaagtttttgtgtgggaactaacatggcctcagtcgtgttctctgcaaaatgaacagttacttgtgttctctccaatctgaacaccaatccaagcaaagctcgtctcaactcgagccttcacaaaatcagaaacaagctgcaaagttcgaaatataagaataaaatggaaaaagggaaatcaccatctaaacgggcttcttctagttaaatgggccgtttttattctggtacagttaggcccagtacgcgagcggagccctaactccgcgccgctataaaagcgtgaccccgtcgcgtgcgactagggtttatctcctctcgccgcagcctccctcggagccagacaaaggagagaagcgcgaaggcggcggcggcggcggcgcaaggcgaagatgtcggagaagaagcgcggcgccggcacccgcaaggacgaggtggtgacccgcgagtacaccatcaacctccacaagcgtctccacggatggtatcgcctcactctctcgctccctccctccctctcctccatttccctgagctttgttgcgcttgcagtagatccacgagctagatgttggtttcacgaggtgttagggatctagcgctttgctggtgcggagggttgctgcctgcgagcactttgtgggctcgtgaatggctgatacaccttgtttggatggatatccttagaccagctacagcacagcaggaatcatatgaccgaggggggtttgattcatgtggatccttctcttgtatttgatcccacattcctatttatgtagatctgcgttcgagaccgtagcttcgctttgtagctatttattgccatttgattgggtgtttaatcgggtatagtcaggtgtctgcctttatatattgttgtggctgcacacagttacatgcccggctcatggactctgctcatcgttacatttgttgcttctccttgtgctaccaagtgttccatttgggcaggatatttcgtaagagcgcactggttaaatccgtatttttttttctcacgtatcttcataattggatggcattgtactgtgatttgtttgtgttgaagtattgtttgctctaatgatttgatccattatgccccggacatagtcaggtatctgtctaaatatggtggttgatacagttacatgcccggtaaatagatgttgctcatcgttacacgtgctgcctttatatgctatcatgtgttccatttgggcaaaacattggaaacaagattacattatgaaaacactgttatgtatagttattggcagtgtgtattatagcagttcatctgttaatctgttatgtttgccctgtcattggttctgctaatcaattctggtcattcatcttatgtggttcatactttttagcactgcataactaattgttgttgcacatattttctttataaagcagccaacttcacagttcatattacatttgaccttttagataaatgcagattcttgtttagaagttttgcaatcttgaaaagtcttgatttgttgaaataaacgttataatgaaataattctttctgataaacagcaccttcaagaagaaggcgccgaatgccatcaaggagatcaggaagtttgcacagaaggccatgggcacaacggatatacgcatcgacgtgaagcttaacaaggccatctggaccaatggtatccggagtgtcccaaggcgagtccgtgttagaatctctcgcaagagaaacgatgaggaggacgccaaggaggagctctactctctggtcacagttgctgagatccctgcagagggtctcaagggtttgggaaccaaggttgttgaggatgaggagtaaacttttcattgttatctgtcagttagcgcttagtgcatatttccatgattccagtcactatgctgagagcaaatttggaagtcttgctttagcgttttgttatctactgttgatgattcaagactgcattttcttaagcgcttggaattttgacatgtttgtcaaccttttgggatatatactccatgctatcgtgctgtgaacaaggatcactcttaagcttaaaaaaatgtctgttagatgctggtattgattttttgcttgaatttgctcacatccttttctgctaccatcggcttcattggttcacatcatttgttgagaggatagtttgttgtgaaggtcgtaacggttcagctattgtaatgcgtccgccatccagtgatctgatttgctgagttctattcgtgcgtatgctatttttcttgacggtaagggttcagctatgctaatgcgtccgccatccagagatctgatttgctgagtttctatgcgtacgtgtgctatttttcttgacggtgagtgaaccgtcgagacgggccaccaagttccttgtcgcgcctataatgttagggcgcctcacttttaacggagaatatatgaaggaacttcatgaaaaactcatctaagcaaaagtaggaacatgttattgtaatttcattctcaaagcttagcttcttttgaaataaattatatagctccaagggcagttctcaatggtacaagctgttgtgcccggctaaaaaatacaagttgttgtcaaaaaaatcaaagtgcatcctaagacatgatccccgtcggcaggaagaaaattctggacggatatgtggtgtaccagattttgcggcaggaagaaaattctggacggatatgtggtgtaccagattttgctatgctcattagcagcaacttacctgcgacaataggaggaactatgagatctcagagttacacttcagatagtgagatcaaacaccgagtaataaattatgggtagggcataaaatgaataacagatcagagctttccaaatttgaataaataaagggtaacatggaagtatatgttgtgatagcactgttcaaaatgaaacattggagaaagcagatttgacccttattgcaactctgttaagacattttttttcccaaaacagaccagaagaacttggtgtaaattagcaataatgcatggtaatgatagaccgcatactacatttcacagacaatggcacttggaaggcaaaccaacagattccataaaatgaaatttaagtatggtagacattcacagcatgtaacaaaaaaaaatctcacggccctttgtgtatatataacatggaattcaatcaccttctacgtatgtggaatgctaaaataatgacgttaaaatttctgacaaatttaagatgtgattcagactaaagtagagaacagcaattgcctagctagctcccaaggctgttacatgaaaataaaagggatttcctaaaactatatctatcagtcccaaatcatgccagtgatcaaagtatcttgaaactaatggtcataaactaatgcaatcatgctgtcttcaaagaatactactgtaggagtaaaactgataattatcctgcagttttgcaagtattgctattaccctagaaatatcagacaataaaggaatgaacttcatcagatatacaaatcttagggtaatgcatttgaatatttacattgtgagtcaactggatgaattgttagagcaaaaacacatggaagtatttatcagcaaattactgtacgctgtggagagcattgttgtcgttttcttaatatttggaacagtgttaagtgttaattatagcatatcaacgtaggcaaaacaactaggtgtgttactaagcatgggtctgcatcttattagacgcctagacggttagctcatctggtacgaatgtagtagaagggctcagtcatcacagtaaatcattgatcctaccaaa

SEQ ID NO: 9866 - DNA, 28756 bp, Oryza sativa
  unsure (1)..(28756): unsure at all n locations
tagttgccaccactatctacaagcatcgactagaaaacatccagagtcatgcacggcgatcaaatgattctgatgtatcaacaccatgcctgctgacagaaagattgcctttcctgtcacgttaggaagcaatcaagcttatgcggttgcatgtagcgtctgatgaagcccagaatgttcaggttcaagagcagagctgctgcttcatatctcccaggtaccggcatattgctgcagcaaacacctgaaatggttgcgaggtcagttagctgaatccctttatttgcatccgaggcaagctttttgcaaaaactaattccagtttggagccggactaaagcattaaagtagcactgcaatattctcttgcactgatcgagtaggaagcatggaactactcaaatgttttacaaggatcatctacttaccattatctgatcctcttgaacccacagctggaatctgcatcacttgaaccccaaaggagcctgggccagcaacagcaaggcacagctaccagcagcgaacacatctagtatgaatcttgcattaaacagcttctagcttgattggtgcttttgtaaaaactgataaaacaaaaggtgcttcctctccaggatggatggttgtgggcacaattgtgtatccttttggataaggctccaacactaattcacatgatatctcccttgagttaacataatctgttccacccactgattcatgcatgtagatattgtaagcagcacggcagccccgtgtcttgagtatcctcattccaatgtaaaacatagaagagtcatggctagattgatagttccggaaaccatttgtctttctagaaaaaccaacaccctggcaaagcatggaatttgtttatatcaacatcatagtgaaatctccaagtacattaacattcaggatggaatatacctgcgtaagggtaataaatacatgtacaggatacagtgcatcccgtcctgttactctaagccggtactgaggattttgatgccatgagtcataatcttggcaaccacctgcactataaccacgccattggccatggacagagtaacgcatctcgggtggataaacacgacagacatatattgaccgaaagtggatctgaaaatcttgccaagacatccagaataccccattctttgactgcaaaaacaaatatgggtagggtcaaaactgcacacggaaataaagttgggaaaatatattttgtttttgtaggtacaatgccttaagctgaaatcaacaaactggaggggtgacaatcaacacatcggtttttttctcattctattttaaattaaactgtagtgtgctcactcaagagcacagtcaacgagataagcaacagaccaacaattttatcatgctaaaaggaaccagtatttggtgggttcatctattaaatttgacgcagttgtgtatctttctaatcacaattagtggaataccagctgttcaagtacacggtcacagagaagagcaagtacctgtggaacatgcttaagtttgtgcttcattcgctcagtccactcttgtgatgagtctgaccacggaccattccattcaacttcatttgcccacggatttctaatttgcacgagcttatggccatcaacttctcttacctgtaacatacaatataaatttgtctagcgcaaaaagaatgggaactaagtgattgccaaaagatacagacaagtcagagcaaacctgcaaaattgagtaagcatgtccctgaacaatgccacttgatgaaatatgagcatccgagccagaaggacttccagcaccaagaagaaagccctcttgtttaaaatgcaacaactgagaccacaatcttccactagcaagatcaatctgcgcttgggggctccgcatgtcaatctcttcaccagctcctcctgtgagatccactagagcatcttgcacaagcccaccctccaatgcctcataagagccatgaagctttgcataagctttttcaagaatggatacccacagctcattttgctttctactagtagcaaatgccggtttccccggagactcacaggggatccaatcatcaaccaccactgccacccattcaccctagtaatttacagaacattgaaatataagctcagatcaaactggtcaaagatagttcttcacaggacaatctcaagtcttttttgtgttggtgggaaatactccctccttcccaaaatgatcatcatatatgtttgtgcaccaagaccaaggataatttaaatcacatcaatcaagacaccatacacacattctcccacaatgcatgcatcgatcaaaacaccatgccaattacacctagcatgcacacattctcccatgctgcattaattgtattctgataaaatccgcgtctatgcggttatatgatgatcaatttgagaaattttgaattccattacatgatgatcaatttgggaaggagggagtaatccacaaggtctggtgaatatgagctatttatactattatttcacttttatcaacttacctttgagtttcatcgtaaaatttacaagcatatactgcatatgtaagttgtgcattagtgacttgttcactcatggttttcaatgttgtttatgcagggcataatgcacatgtgtaattgtatatattgtgtcattccatttgggaatttccctaaaactcgagcaagataatggtatgcattatgttcttcatggtggtatgccccttactagggtctcgcaatgttagcatttcagaagacgttggcattcttatatgcaccctatggaatatgaatagcaaatctaaagtcatgaatcccatttttcttaattaaagcatataggttgtaagcctatgtataaatatatattagacagctctaacaactgtttatgtatttatgtagtatcaacttgtccaaattaattatttcgaactagcggaatttatccaaactaaaatctgcaagtcaaggtttcactgagcctctaacagcactattaggtagcacacatatccaccatagctctagtaacttgtggctgttgtattatttctgattagaacttctttcccacaatgcagaagaaaatggcttgttgatatatgttgaacacaaagtaacaaagagaatcaacttgcagctcacaaatctgttagtttgcttaaccaattcaactttgatatttaactctgtatgagactaaaatgttaaatctcaccaagatggtgtgctctaccaatatactttaccaaaggaacaacccaagaaaatggaatggaggacagatgggtcagatcattgaatacctggatacagaatctgacagtgtaaatcccttcttcattatactcaggagtgattataacttcagatatacgggccatctctgtcaaaactgcaacagcgctcaagaaccaacagtcgcccaaccgaccctgaaaagaacaatcggacaaattggattgtgtgtcatgtataggaagatggaaatgtataaagttgaaattctagtataggggaagaccccacatcagcacaaagcaaaatctgcgtacctgacacacatctgacgaattcacagaaccagaaaataagcacggttgtgaactgatagatacctccttcgcaatatcagaaggcctcatccactcagagacaacctaaactcagaaacacagatgacagatcaatgtcaaagaccaagccaattcttagtgcacaagtcagaaactcagccagttcttagtgtacaagtggtagacaaatgcatgcaatagtacctgcaattttagagatgggttcatcggatctacaaacagagatcgatcatccggagggaactcttgatcagtaaaatttctctctcccttcgcaataagagcctctctaacagccctttcgacagaaagcatgcgctgattgacttcctctcgtgtctcaaatcttggtttccttggtcttctagcaaaggagtcaatgtcaatagctacagaatcacgcgcatgacgtttcctaccactggagtactgtccatcccattcaacgtcctcttgatcatatagttcaaaatttgcttcttcactttcccagtcatccacctgttgaaacaatattagatgtatgaatatcacatgcataacttcataatcccttccatttcatggctctcaagaaaggtagaaatgagtaattgttcaggccttgttcgtttaatccctcccaaaagaggatttggaggggatttgttccacacctattgtgttgtggaatcattccccctcaatccctcactattggggattaaacgaacaaggccttaggagtttcatgttcccttctaattaatgaaataaaagcaagataaacagtaggaatagattggtcgaaacaagaacttgcccttgcagaataacttccatgccaagcatcctcagcagcaagatcaaaaaggccatattcagcagaacagatggctgtatgcaacatagcaacctcatcttcagtcagacatcttccccatagaaaagcatccatgatctgcatctttgagtctgatccctcgctgtctgacctaccaaaggcatctaagtccgtgggtggcctagcaccaacccaaatatctgtcccaggttcccagatgccattatttctaggcaatggcaacgcattctgatatccatcgtagactccgtctatgaaagaagttgcttcacctagatcagcatctatagtcacagtgacaagatgccacctgaaaattaacattggttacagtcaggcattaccaggaaaaaaaaaagttgatgaaatgttccacccaaaaagacatgcgacaagtccatgtaagactagtatttcgatgtgaatctgaacataaacaggttggctctcttgattctttttttttcatgcaaaagaaacagcagttgtcacgagctggtacctgccatcagcaatacttgatgcaccaatattccactcttttgcaacggttgtcatcctttcacccttagtcaccaatcgaagaccaacttggccagcttccattccctgttctgaccctgccaccaagatttcccagcacacttttttctggaattctgttccaaaaagacagactggacctgacaccggctgcaccattactgcaatggagaagctaacttttttactttcacaaagacacaaatcaatctctccacaatgacgcccagtactccttggttcatcatcaagtatgcaaacagtgtctggaatgccagtctgcacagttcgtaacaagtaaaagatccaaagagcatcagtaaaaaagtaattacaagaactgcatgtataacatatggtactaaatttataaacagaagaaatgattccaggctattacacgtaactaactgtcatgcaaaaattgatgctttgtcagataaccaactccaaaatggatggcaaaaacagataataaatatccaaagatgaatatgttcagttcatgcactcaaaaggtacaccatgagaactatatcatcattaaggtgtgctttagaagttgataaaatctaatgattacaggaacagtaacagaacctgctctgctcgccgagccaattgtgcctttcttatgtgacgagctattgacgagaccctgtcccttgcaaaagaatcttccagagcagaatcaccacccacagctctgacagctgctgccatggctgcagcatccctgcttccagcattaggaatagaagatagcagtgatatttcaagctccttccattttcgttcctctctctccaacaatgccttcctcctttcccttcccttcccttcttcctcgcgcctttgcatcaagacctcctcttccatttctttttcccttatgtagctgaataagcgaataagagaatttagatggcgggcacagaggtttacagggttgcagatagaaacattgcatacataaaagttttaacaataacctttcttgaataagttcaaaatgtcttcgatcttcaggcatccatttcttgatttctttggcacttaagtcagaaagacctatgctgtccagaaaaagtctaagacgaacttcatcctgaaacaacagacatttccaacattgttacagattttaagaacaaaaaagattaggtgggagtagtcccaaatgcatacctgtatttgctcagctttggcagtcaagccaagcagaagaagtaaataaccaccaaacttgtcccacatgtaaacccattcagtatcaattgcttcttccaaagccaaaatacgtgcatgggcacacatattcctccgataatctacatctacaggggatccaatcattaaacaattcttcactccacaaaagaacgatcctgccgtaatttcttcatttcttaaacgatctctcagcttcatgacatcagccctaggaagcacaaaattcccagccctgtccaacgtaatagcaggatctccaaccaaaagagcagcagaacttgcggatctctgaggcgccgagtaagtcccagaaatagcatttctcgtctgattgcacacaaagcatactattaacaatacagaaataataaaaatcagagtcataataatctcattgataagtactggtcctggatattggagtagataacaccagcagcacttatgtaagtgtcaaggctgacaaggagtgggaacatacatgattgaacttgatgcactagattaagaaaacatagttctgatctcagcgctagatgctaagtggtaggcttactgaggcaggtttaacagaaaagtatgcaagcaagaacagcatttacctatgttacgcagggatatgttgaatatctgaataatacaaatatacagcaaacttactttgttagcagaacgtgacattgcttgtacaactgtatccttactgagaaagtgaacagcgtcctccagcatctgacaaaaatttcacaattaatttaagaaggatcaagaaaaaagaggaaataaaggagtgtattattgccattggtattggcacttcaggatttgccaaccaatgtgccactgatgtgagcggctacatgtggtggagttgcaactggcaagtgctgaagtgcatatttttgggtgacaaatcctagattttcctaagagagagctcatttcaataatctgctgattttggataaacagaaatactaaccttgagagtcaggcatggtcgagaaacagcaaaactgaaggcaattacaagagtgatagcagaaatagcagccccaataaatggtggattcaatattagactggcaatgacaccccaaacttcagtagccaatgcaatcccatacaagataaggaaggcataactgtaaatacagcaatgttagggtgtgtgctcagatgacaatagtacttctaaaaatagcatagaagaaagaagttatgagttatgaccaatcctggtcaaaggaaagatatataagcatgtagaattagaaaggccatatcctgatatccgtacctaacatttttagcagagtctgcatgggcatcataaacataaacaggtaataccctcggtgaatacacgacaattggtggtgatagaaggacctgagaagagtacagtaaattcaatattacaagcataactcttgagataactcacaagtagcaaaactagcatgagatgttcaacagaaattatcttaaacatgtagctaacttaagttaagaaaaaagatatgaaacttacagtcaatgctcttcctgtgagaagaaatagaaacgagaaataacctatagatgccccaacgaaaggtttctctgcaaaaaatcatcagctgatttaagctatgtgcataatatgggaaactattatgtaactcggagaaagaaaaatagcaataacaggttgaaaagcatataagaagatgtagtcaccctgaaataagcccatcaggaaagcagccaaggcaaggagaaaagcaagggagcaaacaagtaacatttgtgtccttgttaaatagaaattgttagatgtccagtagtgaatgacaccaatagcaaatacaaggaacaagatgacaaggaggcatgcaactccaacctgcatagcaatgacagatcaattatgctgtctcttatcacaaatgaaatgaatattatgataaatttattttgaaaaccaagccacaaactttacttacagtccaaggtctaattgtaacaattactgcagatattgcaccaagcaataacagcactcccatgccaacaaataggtaaactccacgggaaatcttccaatcatcatccttcctgaaattatttgcaatttcatctcagaggagcagaagtatgcaaggacgtacaaataataaacatggtttccaattttccataccatttatacatcccagtaaacaacgagaacacagcaggaatgcaaagtaatggaagtaaagctgccaggaaatcagccttcagaggaactccatcctgtcgtgaatttaccactccccagtaggacacaccacaaaaggatacaaggacagctgcagaaagtcaccagtcaagtgccagttatccaaaagtgtgatgtgctctatttaatatgcaatgagaacggaaaagaagagtagaacatacttgcaaaaaggccaacacatatagctgatgaaggtgaaaatcgataagtagcaaaccaagcgacaataggtatcaccccagtggcaagtacagcaatcgttgatgataatgcccatccaagatacatcgatgttgcatagggagaatagaaactctttttatcagcatcccatcccttgtagcccaatgcatctagaggttttgctgatactattgcaccaaggccaattactgatgcagtgaaaacagttatgctgatggcaaacagagcgcgctgacaagaagataacaacgatcagtaacatgaaaatcattaacaatgctggaaggtctgaatgcgttctacactatttataataacattagagaggtcaagaggtatgtgctgtaaaacagagcctgaattcttttcagtaggatagcctacaaaacaagattttatctaatgctgataggaatcacaacaatacagtgaaaattgattcagtaaacatattcaggcattcatccagaagttgttaacagtatattgacataaggccatatagtaagatgatactggttacagtacttcccttacaactacgcaaatagcttatacagacatttattggatatccaaatatataaacaaaagggtgtcctgctgctgaattaacaaaaacaacaaacctctttctttcctggagcttggcggatattttcacggctatcaagctcccctcccggaatccagaaacggtaaccgttacgcatccatatgggaatagcaaatgagagacaagccaccataagtgggaccgtgagtgacaaacccaaaataactgatgacttgctgcagaatggcagaggtagtatttcagacaaaagtgtaagtacttccccaatgaaatgaatcaatgattataaaaatctagtggctagagagtcatacatatgtataaacaaggcatatgcaagatgctgtgaatatgtcaattgtcaaaacaggaacaatagaataatcaagaagcacattttagcaagctaggacaccttatccagataaaaggagtaatccacttaaagctaaaactttgcatactaggaactcgaggcagcagctatgactggaatcttagaggcagcagtgaccaggaactctagatggtggtgttgaccaagacctggaggtgacaaagatggggagctcaaggcggtggtggcgactaggatgtggaggtgacggcgacagggagcttgaggcggtactgcgttagcgattgggacctagaggccgtggcaaccaggagctcaaggtggatccagcgatgatcaggaccttgagtaggctaatggaatggaaggggatcaagtaagagttttcaggctgagcgctggcagtgggtatgatggcaaaggtgggtaaattactcaaacaaatcccacaaaagccatggaggagcaaggaaatgagatctccttgtcttcatgaatgggcttccttttgtgagcaactcctgggatgagctagccgtgtgagaagtttgctagcttttttctgttcaaaagctggctaaaagctgtcccaaaggaggtctaagacaagactaccatatagcagcgcaaagcacgtcagagtataattttatgtacatcaactcaaaatgagctgtgcatagagaacttaacaagtaattgtaccatgatcagataacaagtggtgaggttatcttcatgaaaatagataggtctcttttgtttgcaacaaacaaaagaatgactcgatgacatttattcgtactaatgctaataataacacacatgatcaattctaccaatataaaaagattccaagcacaaggtggcgtagcaaatgaaccaggcagagacacagtattatagtaacagacttatacaataaaatgtacttgtgtagaatatacgaaacaagtggacatggctattatgctgtgcatgtatcatttgatacccatgtgaaacttctagtcaaaccagcaagacaccaaagcagggaaggaaaacaaatgagtactccaggatttacacaaggcaaaatgcagtagtaactaagtgaagttttaaatattaaataacaaacatgtatacctcaagaaagacagaagtagaccaacacaagtactcagcaaccatgcgatgaagccatactgtagatgggaaaagaaaggaaaagtcactatagctgaaaatccacgaagattttgaaaaaaaaaatcaactacatggtcaaagtaagataaagcacacattgtaatcagatttgatattttgtagacgagttaaggaggacagaacatatctaaatgtctagtgaagaagcaaaaggacttgtcctgccatgattaaaaaataagtgcttggtattaatacgacaaatatatttcttttgttcaacatcaccttccgaggtttggatgtcatcgtcatctcttctgcacacagggaccaaatgaatgccataatggagcagacaactggtgatagaagcagtatcgagaaaccaaactcaaactgccaaattcgaaaaaggacactcttgattaacaacacaatcaacatttcaaagtttttatactgtctttgcaacaaacttacctgttcatgagttgcatttataaccttgatgggcttcggtcgatggacagccacagtaactgtttctatgatgaatattagggtaaaaacaacaaaagcacgtattggtgaacctgctacttgatgaaacatcagccttgaaagatttagccaattttctagcccacttctcctaagttcctctgatagcgagatctggtttgcaatagttgtatctaacctatctgaatcagtaccagtgacatctacatcatcttgatgctctctgtctgcatctaagctgcttctctgcagcaaagctaaaattcgtgggtccataaccttgtctttcatcatataggaaaaatttggatcaaggcctttatcctgaagaagattagccaattctacatctcctagtccaccattcctttttagcatagatgtgattcttggatcattcagtctgtcctgaaaaattgcagccaagttcaaatccaatagctgctgattacccgaggcagtagctgatccactagactcgcagccttgactttccaaaccactactagagcaaacaacgagtgaagcagttgggtccccatgcctgtccgctgaaactacagcagtttcagggtcttgtacagctacagcagaaaggcacgaattactgcgatgggctaaactggcacgtccactatctatgttcttgtcagagctctgtccttcttgacaactattcgatcgatcaaaaggaacattgttccaattgacacaatcgctttgtgagttgcttctgtacatagaatcagtagcattgccatgaggaccagcttcaacactgccactactacgcttcacactagatccacagccatctgatgagtttgaagaactagtttgccccttccttcgaaaaccttctcggagttttatcactgtgcttcttaatgcatctatccttgcaactgaggggtttgaaatagaaagccagcaagagacagctgcagctaaaagcacagatgctacaaaagcataactgatgcaatgtccaaggtacctaatgtaacacattaattagtaaacacaaagtactagatcataaatatgttcaactataaaagcataaagatgaatacaaaccagtagtgcaccccaaagcatataaggaaaacccttgatgttccagctacaaatagcgctatcatccgacttttaagaagctcaaacctaaatgaacacaggcccaaattccagtctgtagaaaagaaaataagatgtcaaagaaatagatacatcatgcacaattagagatacaaggccaaatcattaccgagaatcactactgcaactgaagttaaagcacccagccagcgtgcttcttttgatgtcagaccatataagatggaatagacaacaagaaccatcaatgagcaaaggtaaagaagccctagatgcaagaccctgcattttaaggcattgatatgttaccaaaactactagaaattattgcttaccccagtaacagcataatagaacaagcacgttacttggggaacatatatgcctatgtagtatttaagagaggaaaaggtagtgaagtcacctgctggattttgtcatgtataactcactaggatctggtgggtcaggcgagcatgaaacaggggccacttcaacacaatcagaatatgcaaatttgtacaaccttcggacatactcatcaacatcgaatccacttcctgtacatgtaatgtatgaaaagttatgtttctcaaattttttatttacaggtgataagaaattcagcaaataaagataacggataagaattttaccattgaacagtattttacttataaaaagcatatttatggccaatgaaattgcagataccccaaagaagaagccagatggggaattgagctcagaagcactagcaccggttgtaacataaacagcacaaaactcataagcgcacagtagaccgactgccaggagtagaagataagcaacagcctctgcaacaaccaacatttgttaacatcagtaagatattaataaagaacaatgagatgatagagcggcccaattttgcagaaacagcacatacaaaataccacatgaatcaaagagttagaaattgcagttttataaagtgagaaaagttcaaatttgtagtagcatactagtatttttaatcctccgtgaagctttaaaagttttcctttgagtatgccaaaatgttccatttataccatttcctagttacaattgtctagaaacaaattggacccccaaaataagcagagaagtcctagacaatcatcgcctattagaatatcaaatttaatgaacccatgacttagaagtcatgaataaacagccacttatcagaatatttggtttaatgaaaccatgaccctaagtacaagcacattgagtagtcatcacaaaatgtcctagaaaataaaagcatgtaaacagtagaaaacttactggagctttgccattgcgttctccaccacaacattatagagtagaatgacagaagcaaagcaacaccgaccattataacagctagcccaattatgttcctttccaaaagagcaataaggatgcctccccatactaacaaaactgttattggagaaacgacgacaagccatgcaaaaagagtgaaaaagctgcacagtgtgcttagttgaggtccttgcacatatgctggccatttccttgcatatatccaactgagtaacaaaacaagaacgaaaatgttagtagcttaatgagataatccagctctcagaacatcaggaacaaatcaacataaacaaatatgcatagaagatataagaatagaaaaacatcaacgtttttcagggcactacttgtgattgtagttagacacaattacatgatcgtattccataatctacatatgaatggcaggcttaaaatatataaggtgtggtgttggattagcagcataataaagacacaataaataatttcagttgttagagtgataatgataccaaatctacattgttgtatgcactctgctggctgaaatttatggaaacataacgtatgattaataatgcaacctcgcagactacagatgcaaatgctagatgccaacagaagcacgcctaatctcgagcatacctatatagcctccacggcctccagttcacagcccataggatccaaaagctgagagggccaaggacagcgaagaggaaaccgcagatgctgcaaacaagaacaaccccgcggtgttcctcctcttccatcctccccctctgcaatcaccttctggaagctgatatcatgtatacaggctcaaacaaacctgctaaaaggtagaacatacaaggtccaatgatcaaaagaccaaatatacataaatgacactaagtatgcaggcaaccagattagtagtaattactaagttaattaagacaaactacgttgagttcaacgcatatggtaatattttctcaaaatattggcctaaatcagtccactacaatttacatgtaacagatcaatatatattctatatacaacaaacacccccaaagtcccaatgtggacatggctttggggttttccttaccaaacctaagcaccgaggatgagaaacttaagcttaatgcattttaatgaagccaccagcctgggtgcggctaacaactaaaaacttcactacctaaaaagggttattctgtgcatcacccaggtgctatagccctctaaatatggtatagataaaaaagaaatcccatgtatttgttctttatgcatacaacactacagattaagcccttcaaatggataaccaataaactaaacaagttgattgaaaagcaccagcctgccagctggagttaaaccattcagccagggtgctaaatctacagcaaatttggtggtaacccgataaaggttcactagttaaaatttattgaggtacctcgagttcaataattgaaccaaatattttcagggccacagaaaatataccacaatcagatttttagcacgaatcgctaaaaattaaagaataaggaacattaatatcacctgccccaacatttacactacacgttaacggatattaaataactgcattctgaggcttcaattatctaggagaccattttgccacgtaaaacatactaaatccgaccgttcctagaccgttttatgcccagccttatcccaaacatgaagtaagttccaaaggttgagattaaaccatccagaatgcatgctactgggtcaggacagatccaaccttcattgcccgtcataaccatcaaatctctatgcccagaatatcgcgagctgtacaaacacactaaatttcaccaagccgtttgctgcatgccctcccaaaaggccaccaaatctgtcaccgcgcgccaatacaatcctcctaagcaagcggcctaatataggctagaggacgagcagccatcgcgacctataagccaaatcccactaaaacctcaaccatcttccgcccccgcagcactccaaacacgccagaaagaacatctcctcagaaatccgcacctcccagcagccagtccaaccgtcggaggcagcagcctccgcgcgcacaggaagcgcacccccacaattccaccaaccccccgcaatgcggcggccccggagcccgcaattcccgcgaggagcgcccccgacagcacgccagccccgccagatccggggcgccccgccgcggaagcccccgaatttccgcgcgaaaaccctagccccgcggccgcagaagcagaaacagcagcagcaacggggcggcggttacctcagcttaggcgccgcggccccccggcggcggcgggcggggcgggcctcctcgccggcgaccgaaaccctagggtacggcctctccccacttttttctctctcctcctcctccctctctccctcccctctctctctctctctctctcccctcacgggatggcttcgattcgattcttctccgtgcgcttgctcgcgagcgagacctgtgtcgtgagcgagcggagagggggggagagagagagcaagcgcagcgcggcggggtgggggagacaaagagtgacgtttgtcaacttgggtgggctgcgtgctgactggtgtttggttggtgcggtgcggtgcggtgcgtgtgcgtgtgcgcgagcgtccgcctgcgcgactgaccgctctcgcttcggcctcggcgcgagcgagacttgggctctgctccgaccgagcgcgcgcgtccgcgtctccgcgaccgagggggagagtccactccactccacacaaccgcgagctagacgcggagccagcaaagccagccagaccagcgaggcgcgccgtttcccgtgcgataacgtgcggcttttcagcgtgtttgctagtgcgaaaggccgtattttgctgcgatttccgcgcgcgtactcgcagtgtctttctggactcactgtatcttgtgactttttaaccgggagtgtagtactttgtatggatggcagtttgtatcctaatgaaagaagatacgtaaagagagtggacatgatgaaagtcatatacgaagtacttgacgtgagatgtaacaaaatacgatagtttcctagcgtaagaaattttggaagactttgaaggattggaccgagaggaataaacggtgtactctctctgttccataaaaaaactaacttaatactatatgtgacatattctactacgaatctagacatacatctgtacagattcattgtattataatgtgtcgcatctagttctagattcgttttttgtgggactgacggagtatcttttcactatctttgttaatataagattatatacaaaacgtggggccatctagcaatatatggcgggaatgacaagaaacatagtggatatgctacatgatcaggagtgagagtaattctatgtgttcaccatgttgctccgtaaataggttattaagaaagtggtaggacagataaaaggtaactagctaagcgtgatagtttttttcaccgtacattatgttttggatcatacgctagagtttaatacttattttcttgtgcataactaaaagacataacggtaactctaactaggggctttctccatccaggatgatattattagtcatttaagctcaattggcagtctatggtaaaatttatcgctgaagcgattccattgaggtttatcacaagtttgtccctatgtattccgggtgttattgtttactatatcaacttttctgtacacgaagtgcatgcatggctcgcgttcgactcagttacttcagtgcttcgtctattgcacctgtcttgggacatagtggttatgttcacgcacatgtatactcataaagagaatttaagcgggagtatacatgtcccaagttgtgttaagggtttcaattgagagtagaaccaataaaccatagtttctgactcaatgtacaaggctaatgatgaggagatccatattaacaactccatggtcgtagtcatgaattccatgtatgaggtcgacaattaaggcttcatggccgctgactcattgggagaggccaacgaaaaagtgcccgtggttgccgactccatgatacatgcattaatccagctgagagcaatttggtgttggcttagatgacacgctcgacagtatttaataggagtcgtagaataggaaataggaatctcaataatttattgcttgtgaggacatatctaaaacgaccaatgatatcaatccaaagggagtataaaattaaggtggcgatatgtatatacgacggtctagggtaaaattaacgagtgatccgtgactatacatactataatagttgccatggacaacattttcaaaattcaccaaaatcatccattaggacctgttggtagaggtcatgatgacatatcattataatctaatctacactctggttgatcttcagttgctttcatatcaaaaagtataaaatggattcgactttgtacgaaagttcaaaagaaaagcaccatgttaacatacgcaatcaagaagcttagggacgtccttcctctatatatccattccgtttaagaaaaatatgcttcattcatccttcatttatccaaaaatatatgtattacattaacatagtcttaagacttcaattctgaccaccaatttccatgataataaaataatagtactgccgtgaaagtgcaacaactaatgaaatcataacgtcatggagtatctttcagacaaacatacacacgtcgttaaatgaatccaatctaaaacataaaaaaggtatcgacctaggaatgtttttcacaactgacaggaaattattaacattttaccatacacagtaagtaatacagtaagtaaaatctcaaacaagttcatcagataggttttccctgaattcctgatacctaggcaaatagcccaagagaaagaagaacgcccggctagcatgggccgggccgtagcattggttgattgcagccatcttctcgtggcagttacgagcaaaccttgttgcctgcctgggttctgaatcctttgacaggccgtcgtcctactgtccgaccgtactccctccgttatagattttgagtttttacttgcactgtttgaacattcgtcttattgaaaaaaattaaaattattatttattttctttgtgacttactttattatccaaagtactttaagcacaacttttcattttttatatttacataatttttttgaataagacgagtggtgaaacattgtaagtaaaaacttaaaatctcttatattatgggacggagggagtaattccgtaaacacaacaccttgccgtagattgtactatactgctccagtaataatgcttaccactactcctaccatgaaaaccaactgcctggagagcctggacttctgctcaagaagtgaaatcctttacaatgttagcttcagctgttgccgactcgctgtcatttgtcaactaccgccgccttctggtcaccctggacttctactacactgattttgatagcaacaccgcacgtcccatttcgaggttgatatctttcgtacctgcagaatcagccgcgatagaagccaactcggcgatgcttctgctgccgccgccgccgaacgatgattgtagcgtggaattagactggcagagtggcaaatgtagcgagagatgtggccgtggatagataggctgtgtttagttcacactgaagtttggaagtttggttgaaattggaatgatgtgattaaaaaattatgtgtgtataaaaggttcgatgtgataaaaagttagaagtttggaaaaaaactttggaactaaacagagccatagatagctggttggtacttggtagcagtggtctggtacgtacacggacaattcttctgccgtccatgtggtgggtaggcgtacatcctttattgtgatcaccaaccgtgccatgcacgcacacctaacattccggcacaggtctgtctgaaaatgtaatcactgctaaaccagcttaattatcacagcggagaggggtcgccagcccaccacaacttgattatgttattaatcactagtgctgtccacagatgatctccactaattagctctcttatatatctcacagagattttttttaaaaaaaaacagagtcaataactgaagacatgtttccttcaaaaaaaaaggagagaactgaagaaatgaactttggtatagaacatccataagtttgtatcaagaactgaatgtataatttatccattaatcagtgtacaaagaaggggggctgaaatctaagaacttctaatggtaacatgaagaacagaaggatttcaaagaacatttacgattacagactctaccacattgacatacatgtgtgatcctcttggaagcttggagcttggatgtgtagtaggctggaacaacctgggaagccgaggcggcggcgatctccagttcatggctccggcggtggcagctcggcggcgggcgccacctcctccaccacgggcggggggggcttggcctcccgccgcctggcgacccggcgaggcggcggcgacccccagcagcaccaccggcaagccagcgtggcgcagtcgtaccgctcgtcgggcccgtcggcgtggcgcgcgcacacccggccgaggacgcaggacagcagggtgagcaccagcaccgccgcgagcacggcgaagaacgtgccgatggaccccccgccgccgtggccccgcgccgccgccccctcggcggcggcggtgacggagccctggtagtccggctgcagcggcgccgcgaacgtcgcgatcgccggaggcggaggcggcatcgacgacggcatggcagtggccgccattcttgcatccagtgggggggtgtgatcgatggaatggaccagctgagtgggatcgtcgtggagttggggaggagacgatcagaattcagacgagcatagcatgggatgggatgggagcaggaatggaatattgagaggtttcgtcgaaagcgtcagctcgctttgcaaaactactactactactccacgatggtgatgtgtcgaaggatcagaggaggataggtgcagaaaagttcagaaaaaaaaaagagggagagcaaacagcaaagtctgcatttctgaaactgcaaggatggcttttgtttggatcgagtggaggactacatggaaagggaacaaaagtgtgatggctggtagtcatactatccgtggaaaattcaggaagatgcaaggggttgcgaattaaccttgagaaatgtatacatcagggactttactggtgttgtttgattaacatgcaaggtggtttcccatgaaacatttccaactttacgtttgtctttgtgactttgtccaggcacagggtagatgcagttatttctaccatttgttccatactctcgcccttttccgtttctactttctgctgttgttaattatggatgaacgtcaactttttcttccttgagtcgatgatgtgctgcgccagtcgcaaatactgccgatcaagcccaagcaaatcctactttaaggaggcccaaaggaattggcctgaaagtttaaattgggtctaaacatggcccaaaccaacataaaaactggacgctgctgggcctcgccccacattctcgaggcccttgcactcttgcaggcatgcacagccttatttatccaggccagctgtaaatccttaaaattgagcttcagatttcgccatgaatcagagatgtttcgcgtaatcagaactagctgggtggcccgctcacttgcgcggctagcacctaaacaaaatcatatattttttaagtatgattttactttaaatttattaaatagttatccccgtatcatccccgtatttctaattatatagtttttaaaagtcacatcagctgctaccccttacttctgtcatatccttctttatttgcttgctcggtctaccactatttctattcattctccttgaaacctttaaaaattggatctgttttttgagtttattatttcgttgggtttcgtttttataatttctggaagtctcgtcaaacgctgccattatactcctctatggcccgtccactgtcttttctctttattgtcattgggattttacaaatcgaacataattatcgttcgagttcattttttttactttttataagtcccgccaaaccgtcagcgtttttgccattgtactttttatggctcgcccgctgtcttctttttttattttcattaagattttaaaatcgaacatgattatcattgtttttttactttttagaagtttcgtatctttaaaaattggaccctgtagtttttaaaatttattgtcttgttgggttttattttttataatttttagaagtcacgtcaaacgatgccactatactcctctacgacccatccgacgcctactctttattgtcattgggattcgaaaaatcgaacataagtatcgttggaattcttttttattttctagaaatcccgccaaccgttggcggctctgcaactatactcctatacatcctgcctgctgcttctcctttttattatcattgagattttaaaaatcgaatataattatcaatggggtttattttttttactttctaaaagtcccggcaaccgccttacccgtttgcttcacggcctaccgatggttggtgggacttcttgaaagtaaaatatgaattccaacgatagttttgttcaattattaaaatgctaatgacaataaagattaagcgacggatgggtcatagaggagtatattggcagcatttgacgggatttctaaagattctatttggtgtattactaacagtttttatatgtcgaatcaaccgccaccactctactcttttataggcttgttatttaatttatctcaccgtgtgttttagatggtctcttttttaataatctttatttttatcaccagttttagttatttataaattgtattctattttaaatcttttttctttttctttttctaatttcagaattttttttaaaaaatatttaataccgtatagtgttcttttaatatttttatttttcatttttgaattttagttgtttcaaaattgtattcctacttgaactctcttttaatttttctaattttggatattattttattttttattctgaattttaattaatctcagatggggttcttatatggattcttctttaaatattgcttttttttaattctgaattttagttgattttaaattgtattcctacttgaactcttcttttattttttctatttttggattttatttttatttttatttcgaatattaactaatctcgtattgggttattatatggactcttttatcaatattccttatttttaatttctaatttcagttatttttaaattatattcctacttggactctcgttttatttcctaatttcgtattttattttatttttatttcgaatttcgattaatctcgtattgggtttttatatggacacttctttcaatattgctttattttaattccgaatttcagctatttttgaattgaatttctacttggactcttcttttctttttctctgattaatgtgggaatttatagccctacagcgaacgtagtgccttagcatcattatattttctctcatataataacatatatgttttctcaatgtattattcaaatatattaaaatgacaatataattttaaatttctaaattgtatttctatatggactctgtttttatttttctccgattaatatgagaatttcgcgcaattacgcggctagcacccaaacaaaatcatatatttttttagtatgattttacttaaaatttattaaatagctatctagctatctcattgtcttaagattttgaaagaccaaaccttatcatcctcgtgtttctaattatatagttttcaaaagtcacaccagttgctaccccttatgtcatctccttttttatttgcttgctcaatctatcactatttctattcattcttcttggaacctttaaatttggattttatagtttttagagtttattgtcatgttgggtttcatttttataatttctagatgtcccgtcaaacgttgccattatactcctctacggcccgtccattgtctcttctctttgttgtcattgagattttaaaaatcgaacataattatcgtttgggttcattttttactttctagaagtcccgccaaaccatcagcggctttgccattgtactcctctacagctcgcccgctgtctcccttctttattgttattgagattttaaaatcgaacatgattatcatttgcttttttttactttttagaagtttcaaatctttaaaaattggacttgcagtttaattttttataatttttagaagtcccatcaaacgatgccactatgcccctctacagcccgtctgccgccaaatctttattgtcattgtgattctaaaaatcgaacataactatcgttggaattcatttcttattttctagaagtcccgtcaaccgtcggcggctctgcaattatactcttatacaccccgcccgctgcttctactttttattgtcattgagattttaaaaattgaatatgattatcaatggggtttttttttactttctagaagtcccggcaaccgctttccacgtttgcttcacggcctgcttgacgtccctccttttaatcgtcattaggattctattttggtgatttattaacaatttttatatctcgtatcaaccactaccactctactcctttatagctatgttacttaatttatctcgtcatgtgttttagatggtattttctttcaataatctttatttttatcacaaattttagttatttataaattgtattccaaattgaaatcttaattttctttttctaatttcagatttttttttaaaaaaaatagttaatatcgtattgtgttattataatgtttttattttttattttcaatttcagttgtttcaaaattgtatttctgtttgaactctcttttaatttttctagttttagatattattttatttttattctaaattttaattaatctcgtattgggttcttatatggattcttctttcaatattgcttatttttacttccgaatttcagctaattttatattgtattcctacttgaactcttatttttttattttcttttgccaattttggatttatttatttttattctgaattttaattaatctcgtattgggttcttatatggactattcttttaatattccttatttttaatttcgaatttcagctatttttaaattgtattcctacttggactctcatttccttttctaattttggattttaatttatttttatttcaatttttgattaatcttgtattgggttcttatatgaaaatttatttcaatattccttatttttaattccgaatttcagttatttttaaattgtatttctacttggactctcatttccttttttaattttggatttttattttattgttatttcgaattttgattaatctcgtattgggttcttatatggaaacttctttcaatattgcttatttttaattccgaatttcagctatttttaaattgtacttctacttggactcttctttttcttttttttttcttttttttccgattaatgtgggaatttctaaccctcacagcgaacgtggtgtctcctttcaaagctgttttaataatataatagatagatagatatggacgctcagctgttcagtttgcctggacaatgccttatgcttttctattttctgtttaaaacaggtttgaacaaaattaaaaagaaaaaagttgatctctcccccacgcaaccacatcatatggtccataatgtttatatcattggctaatttttagtctaacagcagctttcaaaccgcattcttttttatttgactatgttgtactactttatccaagcctcagctgatgaagaggttcagagagatatttaattatttacactctttaattattccatatcttataaacaacgagtggtaaatagttaaacatgatatcttaaaagtagtaaatagttaaatgtttaggaattaaaagagagaaaccggtttacgggccgtcataccattaccagcagaaaacgctcgttaagattcacgggaaatgcgtggctttacctgacgcgtgcgtggcttccgtgcatgccttattagctccaaagaccaaaacttcagtacaagaaacgccaatctaggctagctgttagttgcctgtttaagggagatgagcaatgagttggcttgaaagaatcaacgagatcgatccgtcaagccactcgagcttctcaagcaacctaaactaacacctccgtctcactcctccaggcacgctagccacgatgcagttaggcatgggctagctatagctaatagctaagctcgatcgatctcttcttctcctcctcctcctatccactgtccaaaagacggtgatcgatctgtctccgactgccgccgccgatgtcgtcgtcgtcgtgcgcggcgggcgccgaggccaccgggctggtggccatggactgcctggtggtgtgctgctgctgcccgtgcctggtgctgcagatcaccgtgttcctcttcgtcaggctgcccaagaaggtggttgtcaagtccaagaggatcatcctccggagatggcacgggagaagatcatcatcatcggcggcggcggcggcggccaagagaggctgcagcacggtcgacccggctgcaggcgtgaagaaacagctggaggagctatttgacgacgacgatctattccaaggcgcattcggcggcgggatcaacggaggcggcggcgacgacgaggaggggtggtggaaagagaggtgcttcgccgtcgacgacgacgacggcggcgtgtgggaggcgctgatcgagcaagaggggctcttctggttcgggagcttctggggccggacgacggagcaggtggatcgtccggatcagtttggagacgacgaacatgcccacccagccttgaggtttcctctcgttctcgagagagtttgtgactaaattagctagagtacttaatttatcaatgcaagcttaattagggacagtcgcaacataattcaggcgttgagctcggtttctggctgatgattgctcattgagttcttaatcaattacatcctgttccggccatttccatttgcatcgctcttcagtggacaactaacaaatcacaaatgtacatgtcacaatattaacttcagagtcgagaagggacaatgaataaaaaacacacggcattaagtctgtaacacagacgctgacggagccattttctctgctggcctgcatgcatgctcaccctgcacctgcagcgttcacttggtctgtatattttcagaggacttttgatctncagacgggaggtgttttacaacttcgcgcacacttaacanatcacaaatgtacatatcacgatattacccatatcatatatgacatgtatggataaacatatcacttcacagacataatacatagaatgtaaagttcaatctacacaatactccaaaatacacaaatttggctatgaacaataatgttgattgaatctatttatgttcttttttggctgtgtggattgaatctgtatgtttacggtgttcacattctaaaaaaaagagtaaaaaatcaattgtggtgaatgacatgtgtagaattaaagcattggtacaggtaccaaggataaaaatatgattttgctagtagagaaaaaaaagaacataacggtccctaaatttaaatcggtataccgcgtaggtactagttaaagtcgttgtctggtattggcgtacatgttcttatttgcgtcatttcccctagatatacgtcacgttctctaagattctcattcacatggtttcctatatatttttgttttattccaaataacacgttactagtgtaaaagttctcgtttgtatggttttctttatatttgtgttttgttcccaagaacgcgtcaaaactcctctttttaattattcgtgtcacttagatcttgccatagcttctaccatgtctccttgcgggtgcacctgtccaaaatgtagaagaaaaacatagaaggatatctcattccagtcccttatacaacaaaatttatgaactatatgtaaataactaatcaactacataaaataaatcttatttgataagattcgcttagccattaaccgttcgatctcgtcccatgttgaatcctcaaccatgtagtgcttttccctttgtttcattccagtgaaccactttcaaccctataacaagaacaaacggcgaaaagatagaagaaataagacaacctatttttccccataagatctattcaatgcccaaattaaacgcatgatttacattttttccaccaaatgctaccgagcaatgcaaccaggtattcgattcactcaaaatgcccatattttatatagttaattactcaactaccatgatttttattctatatcttaccacttttttgatccatggtccatactgttttacctctcaatacctctaagtagctcgcaggtatcataaaagctcttgttgtataaattttttattttgtataaccttttgataaaagctctcgttgtatcaatggtatcacggtttttattttgtacaaaccttttgattgatactcctccgagaagcaaacgagtacgcatgcacttggagttatagaagcccattccccaaatccagtcaccgatccgttaggttccgtgttagctagctcccagagcgtgccggcgacatatgtatcgctgccgaccgccgtgcacacag

SEQ ID NO: 9867 - DNA, 42951 bp, Oryza sativa
gatgactgtcagtatggacttcatagagggactgcctaagtcaggcaaatatgacacaatcatggtagtcgtggacaaattttccaagtttgctaaatttatccctcttgcacacccttttactgcttatacagttgcttaggcatttatccagcaggtgtatgatgtctttgggatgcctcaggttatcatttctgtcagagacaggatttttactagtgctttctagcaggagctgttcaaactagcggatgtcaaacttaacatgagctcttcttaccatccacaaaccgatggacaaactgagcgcttaaccagtgtttggaaggtttcctcagatgcacagttcactttgctccatctaaatggtccagttggctgtcccaggctcaacactggtataacacctcctaccacaatgtgctgaataaatctccatatgaggtcttgtttgccagaaagcctacacattttggccttgtggatgtgggtgcaagtacagtgccggatgtgcagctttggctccaagagagagctcatatgaatgaacttttacatcaacaattactaagggctcaacagaggatgaaaagtcaggctgataagaagcgttctgagaggcaatttgctgttggagatcgagtttatctgaaattgcaaccatttgtacagatgtctgttgcccgaagatcttgtcagaaactgagctttcggtattttggaccgtatacagtgttggaaagggttggcgctgttgcttaccgcttggatttacctgctactagtcagatacatccggtggtgcatgtttccttactcaaggcggcaatcaaaccaggcacccaggtcagttctgatctccctctcaactattctgacgaacaatctaccattcagcctgaagcggttcttcgtcgaagtctgattaaacgtggcaagagtgttgttccctgtgggctgatcaagtggattggcatgcctgaggagctggctacttgggagaacctgcgccaactccggacacgttttcctgatgctactgcttggggtcaagcaggttcttaaggggaagggaattgttagactccaggagtcttttattgcttggcttcactattctatttgggatttgggcctgatggccttgtaaggtggctggtgcgtgagtgaaggcctagttgtgagctgtgtactagctggaacctttatatactttgccgaagcgctggtcgtaggcaacgaataagaaaatacaatatcaccaacctcctctccaagtcaattctccactctgttcttactcagttcctcttttcttcctcccgaattgctcgatccgtgcccagtttggcgtttcgccaagggagatctcactgattcgtgacatgctggcgccgaagaccttgtggactatggtgaacttgtggggttcgtcggccgggaagaagggcgcaaagatgcaatccttggtgcaccgccgccgcagcagcttgcacgacgcgcacggcgacccactgcacatcgtcccaatcctctctatctaatgttcacacacgtataaaacgcttatacgaatgacagtggcggtcagtgacgggccacgtggcggcggcggcggcaacgacaacgtgggagaaggagacgcgcctctgctgtggggatcggctccgacggcggattgctacctctccgcccgctgccgcgctgctccgcccctttggcttcgagcgccgtcgctccacccgccgccacccaatccgcccctttggcttcgcgcgtcgttgctccgccctgctggctttcgccagcctgcgccgtcgccccgccggctttgggcgcatcgccattccgcccgccgtcgccccacttcgccttcctacgccatcaccccactccacccgccgccaccctgccacccccgcttgcttcgcgtgcgtcgccgctccgcccgccgtcgccccgcttcgcctgcctgcgcgccatcagcccgctccgtcgttgctcgcctgctccgccgttcccctcatcgcccaacgctgcggggccgcttcgccgccggtggtgacacaacaccattcgtgaccggccgccgccctcgccttctctcgcgtcgcagccgccgcctcctcctttctcgcctcgccccggcggcctcctccccagcagcgccgctggcttgccagagaagagaagagaagagtgagagagagaggaggaggaagggagaggagaatgaagagggagggtgctgatgtggcatcttgacaatgtggggctgttaacaaccaaatttggtaacatctatgtcaggaaagaagattggatcaaagcaaagttggaggcggagatcgagttcggaaacagagcaggaatcggctgaagtccaaatcggctacgattaggatcagctgggtctgagtcgggttgagtaagccgatacagccgattccgacaatacgaatcgtacgcgacatcgggttcaagttaatgtatttcaagatgattgccacgcacgaatagagtcctgggaaggcaattgtatctattaattagaatattttatgtaaattccttatagataaatgtcggtgacatggggccgggggtatcgtgactagaggcttgggtagccgcggtcacccacatggcctgaccccctcggggggggggggtcgggcccgagggtgacgtggccacccctccctctgtctccccgaggggtcgggccgctcccgtttcggccccgagggctagggcgcccccgtttcggccccgagggctggggcgccccgaccccctgtggttttggcgccacgtgtgtgggttaggtgagcacagcggggctcacctaaccgcatttatagcgggttggacgagcgcgccacgccgcatttaatgcggcgcagcgcacgcttatccggtccgtgaccggtcgcggtgtgtgaccggtcacagaccggtcagatcgcgggttaggtggcaacaggcggcctgtcacacgcctcgccccgtcccgtcgaaatgatgagagcttcctggctctcgtccctagccggagccggcgtgctaactcttggagttggtatgtcagtcccggtcagatccattccaggcttcagcgcaagcatggcaaggaagtcgctggccattgaatgaaggttgaaatgggcgtccaccgggaaagctggcgagcggggcaggaggcgtgtgctctgcttgtcagaggtcacttccggctgtagactagccctcattgtaaaaagcatgtttcctttcttaggcagctggaggcccatgtggtgacccctgaccagataaaaaggaggcccaggcctaggagagggagaggagggagaaaaaaacaggagaaaaagaggaagaggggttgggactctggcgaatgggggctagagcctgaactctctctcgctctccggctctctgtattccttcacgcacagatccaccagaacacaggagtagggtgttacgcttctcagcggcccaaacctgtctacgtcgcccgtgtcttgtgcacttcctctctcgctgacgttcctcagatcgagggcgaagaacctcacttagcgcccccggccgaaccggcaaaggggggcctgcgcggtctcccggtgaggagccccacgctccgtcaataaatataggcaaaagtctgccgcaaagacttgtggtatcttagagtttgatagagataatagtcgtgtccggtatgggcatatcttgtaattctcaggtataaatagaccccgagccttatgtaattaacaacacacgttcaatacaatcttggcgcatcgccacccttttgctttagttttgtttcgacgagttcttgctttcgggttgagctgcattggtttcgatcttcaacaagaggtaaaactcgttatgacggattatgtttttacgattagtgcttccatctttatgatactctaatcttatttatataattcgtcgagttatcatatatcttatataatctctagcaatatcgccacctaatctactatcggctaacatctgtacgcagagggcagctgattgggttagatcttgatgttgatctagattataagagatatctaccattctatgaaacttctagcggcttgattgtctagatatcgttattcttttcatacttaatgttgtatcagttgagtttgacctattgagtcgtgcttagaataccgatctatagcctgccttctagttgccgattagaatagcgtcagagtttcagccgatcttatctgatttacttatatttgttctatatgcttcattgacatgttaaatctgccctctatatcaagatattgttgtgtctaagtatattaggctcttgttcagtatattattcttactttaatatcctgatatagagtagtatcggagtattagccgatacatgctagatctatctgatcggctatgctataaacatatatagtcctgttattgatatatatttcgatctaagtgatttatactgtctcggcatgatgaccgatctatcccaatcacttgatttaagtatacatcgatataaggagtatatatcgtgaatatctacagccgatcgagtagatttagttcttctttacttattcatgactgtcgatcgatgcacagatgacatcggcttaaagataaatgatatgtcatcggcatctagccgatcggctatcatttatagatttaaccacggttcctttgcttatatttcttgttgattacaggatcaaatcaactggcacgctaacacatctgaaggcgagctttggatctgcactggagttaagcagatctcctaggccacgtgttttctgtcaacagaggcccacgtgggtctcacgttgactcagccgccacgtgggacaaaaccggggtcaaaaccactgaaggacccaaagtgaatggtttttataaagggggctactatataacggaatcccgttttcgaacgggatgatcccgagtaggtatcaggtgtaatacctatcaggtatcagacgattctacacatgtttcaggtgatacttgcaaagtatcatgtgatacttatcaagtatcatacgatttctaccatgtatcgcgtgatactcgcaaggtatcatgtgatacctatcaggtatcagacgatttctaccacgtattgtgtaatactcgcgaggtatcatgtgatacctgtaagatatcagacgatttctaccacgtatcgcgtgatactcacgaggtatcatgtcagatatcgatgatttctactatgtatcacgcgatacttactaggtatcggatgatacctaccaggtattaggtgattcctactagatataactggacatctcgttggggagaggagcatctcgacgcgcggccggccacctgcagtcgtcccttgtagacggcgacgacggcggcggcagcgatggacgggcgcagcggcgacggcggcagcgggcgcggcggcgacgacggcggcggtgagggacgggcgcggcggcggcggcggcgagggacggcgacggcagcggtgggggcgggcgcggcggcgatggcggcggcgatgggggacgtggacggcggcggcgggggacgggcgcgcgttgatgccttcagccgcgtcgcatggatgagaatcgcatctgtggaggaggagtatcctgctaggggacgggataaccctagcattcccgtttataaattgagggatgccatatatctggttttgtggttggggaacgttttgtaactcgatgacaggttgagggaccttcggtgtactttttccacaactcgcagggcgacagggtctagcagatcaagcgaggccgaggcccaatcgagtttgacgagccggggacgcagaatccaactcctcccggtggaagtcaggttgggctaggctggctagccaagagggcttttataggctcctgggacgcatcgccctgcttcggcagtacggcgtcaacttctccgcggatttgttcgtctctcatctcttccgcacgccgctgctcctctgcctgttcgtccatctccgaattctcttctcctttcgactctctttgattctctctctgataaaaaggtcgttttttctcggtttgttttctcatctacgtggatgttgccgatcacaatcgctcgcggaacaccgctgtgtctagcttcatgcccctgcggtgttcgtcgaattgcccggctgggcatcgatgtgtgaccagcggttcaaatgatcaaattccagtgtcgttttcaggtattgcgctttcactctagaatcacgcgtttatctcagcaatttcttccgttggactgcataaaatctggatgtgatgctcggcagtatcgcgctgttcaggttggtggcatgtcgcgacattgacttgtgcctcgcggcgggttgatttcctctgctgcttggacgcatttaactacaaattgacatgaatagtactaaattagcatggcctttttaatggttgctggactcaactgctcattagctacgtccgttatgaaactttgagtttggtataatcgaacgtggctatttgctgtttcaatggtagttgatgataagatcctcttttttttttctaatatacgagacattaggtaatgcacaggacaaaagctaattggccatataagattgatttgactacttgcttattcgtgatacaattgtgacacaagctgcatacgcttgcagctcttatgtctgagcagtgttataataattaggtgactaggatgacaaagtagccaagcttatccttgttttttttgtatgattcaacccttcaacgatgttaatcttgttgaagcagtaaatcggcagctcttaagaagtgagtgcactgggctctaaaacacttttcaactgaaagactgaaatgcagaactttttaccatatttcctcctgataccactgtggcaaccaactaccatagactactgttttttttaataaaaaaaatgacaccagtcacatgctttttcttgatgccaagccatcaagataccgaaatcaaaagaagcaggtgatctagtcatttttgatcgatgtgcatcttcatttcattggtttgttgacctttcttgataaattattttcagaagagaccttttgcaaaaaaaacaagtgtttgtcatgtatgctgtgattttgcttgaactgagcgggattaattggatggaatcactgaaagtatgttattttttaagttttatggttagatgacaaaaatactatatcactgaaacacttgctcagagagaaatctaattaattacgcgtgtgggtacctcattattgaagaaatcagttgattaaatatgccatgctgactttattctcctgttcatatgaaatagtacagatttggttgcatcatttatggtgacttcctaaaggtatgactccacaggcttagttaaactgagacaattcagttgtgttcacaagggaaattgttgcctcttattattatataaatcaaccagttgcacattactagttggttctttgctcagtttaaatggactctgaataaataagtacaactgattcatgttctgtgaggattactgatcagtcttcctgatatttcagtaaaatgtactgaaagtgtacaagcaggactataccaggtattcggtagaactaattttaactcggtggagtgtacatctccaccagaccaccaccttggttcgagttgtttaatactttgatccaatttgtgtgctttttatctgttttgttaataagaaatgtagttttcctacatgttttaattttcatctttgttccaattatttacttaaaaaatcaataattcaaattattgctgatgttgcttaccaatctccccagtattaattaaaaggtgtgtcatgtaatcacaaaatgaaagggggcttgtctatttgtattcagaggtaaagataaacgacacaggtacacaaatttaaaccacagctgatgccattatgagctgtcgttgaattgttattgcatggttgacaggtttttaagttgctctcttgatgtccagcaggtgaagcaaggtaatttctcaagtgatgccttggacataaacatgtcaagctgtcaactcttcttagttgagaggcagtacctgacatttaactcaagaagaagagaagcaatttgtattagagaactacaaaacctgctgaatttctgggctatggtacattcatgttctcgtaccaaggtttgcagtcactttacttagaacttacctctactaaaatctgcttcacttactagaagaagtcgtttcgctgactggccgaaccgtgcttgtcggggtttgagtggcactattttcttagagatagtaacagctatgcatgaactcatacaattgacgcccccatgtgccgtagtgtattgatgcctgtgcagttggccttcccgtatgtgtgtactcgaactgttaagtggatagtaaaatgcacagcttcagggtaaataggtgtaaaaaatagtgtgtgacagacttgacaatgctagtgctattgtggttacccagcatacttgctagaaaagggtgtgtttagttcacgccaaaattagaagtttggttgaaattaaaacgatgtgatggaaacgttgaaagtttatgtgtgtaggaaagttttgatgtgatggaaaagttggaagtttgaagaaaaaatttgtaactaaacaaggccttaggaaaatggataatcattcgtcatgatcatatacgtcagatttgcaatttttattgtagcttgctgacgcaggatttgccggccagagcagtgaaaggcacctccaggtccggactccagatgagagctacctcgaaagataatgcctatccagcaggcttcgcagaagggtccatgcgaaggaatttccctaatccagacactttaggtaaccggtcacatcaaactcaaaaactacatttgggctgagtttagatccaaactttttcttcaaacgtccaacttatccatcacatcaaaactttcctacacgtacaaacttccaacttttccgtcacatcattccaatttcaaccaaactttcaattttgatatgaactaaacacacccttggtctagtcatatgatgttgtatatctatgtactaatacatgacagtgattgaactagtataagaagtctacaaggcacgtatgttctctgtacttgagcatgtagatgcgcatacatctgaaagaaaacacataataagggagattgagggaggggcttctaaattctcgaaggaacattccgtcgttatttatatatcattcaaatggttgaaaaaaaataaaaaaaattcaaccaaatagattaatatgagatagatcactccacaaatatgcaagttaaaattcaacttctacatgttgaaaaaaaaatagaaaacactatggctagttaacgtgttttcacagtcaaatttgtttttttcgttacaacttgtgaaagttaaatttgaccctacatatttgtggagtgatttatcacatattaatctatcttattaatttttttttaatttttttataatcatttagatgacatgtaaataataagggatatcgccttgagaatttataatagtttcccgggagattgatcagggtgtacattgcttgctcattgggcaaaaccctgtttgaaatttgagaaagagatagagagatgatcacaagggtttgactttgaccagggatagaggaaggcgcaacgctgggagcaaatgaaaattgaccattgaccggccgatcggtatgacgagagattagcccgttccttctgcacagagacaaaaacatcactggagccacaccagcacatgttctaaccttcaggattccaattttttaatgtggaggtaatagccattcgcctgcaggtaatcacttttttttttctgtgcaagcttctgttatatgagtatgttttcgccgggtgttttatgagtatgtttgctttttttttcttttttctctctcattgtttttttagaaccaacagtaccagtgttgaaattgatcttgtttatttcgtttgggagaaacctgttagctgtgtttgagacatctgaattttgtgtactctgaaattgatatatgccttgacatttactattttatttcccattgacagattatacagtgacatgccgagcaacaaaccggcctactatttttcttctttccggatggagtcacgatcgctgttgcacggacattttgtctatgacgcggtaagagggagggaaaaaaaacagtacatattatggacgtttgcgttgcagccttgcagttgcgggttagttggatcagtaggaaggtcagagagtttctgcaagcagagaatcagatctggggaatggaatggcgcgagcaaggaagcaaccaaccgtccacttccatttataagtcgcggctcgcgagctagcaaaccccccttgctacatcaccaacccccacccttttctccatttcgtggccaactcctccgcagacctgcccttccgtatgggccttcccggccgtcgccaccgcggcgccatggccggccgcgccctcgtcgtgctgctgtggtgcgtgtccgcctccgtgttcctcccctccgcccgcgcgcagaccaccaccttcaccagcgccatcgacggcaagaaggcgaccaccttctccttccccacgttcgacaagtccctgatgcagctcggcgccaacctgaccttctccagcaacgccaccgtcagccagagcgcgctgcaagtcaccccggacagcagcaacaatcctctggactacctcgtcaaccaggccggccgcgtcttcttccccaccccgttcgtcctgtggtcctccaactcgtccaactccaccgccgatggcaagtacgtcgcctccttctccacggtgttcagggccaacctctaccgatcaaacacgaccatgaaaggagaggggctggcgtttgtcatcgcgtccaccaacgccatcaacccgccgccgggcagctacggcgagtatcttggtctcaccaacgcctccaccgacggcaacgccaccaacgggttcgcggccgtggagctggacagcgtgaagcagccctacgacatcgacgacaaccacgtcggcctcgacatcaacggcgtccgctccaacgcctccgcctccctcacccccttcggcatccagctcgcgcccagcaacaccaccactgacgacggcaactacttcgtctgggtcgactacaatggcacgtcgcggcacgtgtgggtgtacatggccaagaacgacaccagaaagccctcgaccccggtgctcgacgcgccgctggacctctccaccgtcctccgcggcaacaagggctacttcggcttctcggcgtccaccggcgagacgtacgagctcaactgcgtgctcatgtggaacatgaccgtcgagatgctccccgacgagggcgccaccaagaagaaggcggccctgcccggatggaagctcggggtggtcgtcggcgtgtcatcctgcgccgtcgccgtggtgctcgggctgttcgccgcgctgtacatccggaagaggaggaagaggatcggggacgacccgagctccgtgttcaacaccaccattgatttcaggagcatcccgggtgtgccaagggagttcgattacagggagctaaggagagggaccaacaacttcgacgagaagatgaagctcgggcagggcggctacggcgtggtctaccgcgccaccgtcgttggggagaacggccagaacatggaggtcgccgtgaagcagttctccggtgccaacaccaaggggcaggaggatttcctcgccgagctcagcatcatcaaccgcctccggcaccgtaatctcgtcaagctcgtcggtaagctctactacttttctgaacattcaaatcttagctcgatattgtttatgtttttgttcgatgcatgatagtatctttttgtgatttagtgattaagaatagctgagtaggacattgatgccgccctgatgaactgctaatttcgtgatgaaatatttcctcaagaacatcaccttaataaatgccaacccaaatcgccagattatcttttgatttgatttgatttgaaatattttcgcttttattgaaatggatgctccgataagtttagactttgtactttgtacttgttattagaccgcgtagatgttgtctactcgtgccaatttttaactgttacattctcagcaacaatttccttcgtacggttgcgtgaaaatgaaagcttccgagttccgagccgtcggaaatttcagtagccgtctgagaatagacaaaagtaagcaatttttcatacccacaatcacatgaaaacgatacaccacgacaacgattactgcctttatctcaagaaaagtagcagataaaattctaagataattacacacaacagatgtactagtagatatttttagcagctcagcacgccacatggcaacttggcacctaagttcaaaattaaacactgaccagttcccaccgattaccgagcggattggatcatggccaatacaggttggatcaaggcaaaggtttgacatcgttttgtcgcttgcattgttgttcggagaaaaatatttggtacggagtagttgtagaacggtctgtataccttgcaacactaattaagccttttttttaaggaaatcctattaatttttttaatcttgagaataaccacttgtctctgacttgaataattgggtcattgacaaaaccaacatgattcattctacgtttttcacgtttcaaaaataatacacaattctatctcttgggataagcattcaatattgataataagctagtggtgtaccaaaatacacaatcctaaaatattttggacgacctgtctgcaggttggtgccaccaaaatggcgtcttgttgctggtgtacgactacatgccgaacggtagcctggacacgcacctcttcggcgggccggagtcggaggtgctgaactggcagcagcgctacaacgtcgtcaccggcgtcgcgtcggcgctgaactacctccaccacgagtacgaccagatggtgatccaccgcgacatcaagccgtccaacgtcatgctcgactccgccttcaacgcgcggctcggcgacttcggcctcgcccgcgcgctcgagtccgacaagacgtcgtacaccgacatcatcggcgtcccggggacgctggggtacatcgcgccggagtgcttccacaccggccgcgcgacgcgggagtcggacgtgttcggcttcggcgccgtcatcctggagatcgtctgcggccgccgcatctcctgcagcaaccccgccgggtgcagccagctgctggaggccgtgtggaagctccacggcgcggcgggcggcggcggcggcggcggccgcatcctcgaggccgtcgaccagaggctcgccggcgagttcgacgaggccgaggccgagcggctcctgctgctgggcctcgcgtgcagccacccgaaccccggggagcggccgaggacgcagaccatcctgcagatcctgacgggcgccgccccgccgccgcacgttccgccgtcgaagccggcgttcatgtggcccgcgatgcccgtcgcgctcgatggcgacgacgacgacgagacgtcgcgcagcagcacggtgatgaactcgtcgtcgtcgtactacgtgtcctcgtcgggttggacccagaactaccaggtcagcaaggagcacgaggtggcggacagggacgtggcgacggtgtgaccgtagacgagtccacggcccacacgtgcggccgggacccgacccatcgcatcggatttggcacgttaccgtggagttggtgacaacgttgagaacaaagatgggacggatgaaaggtgtaaataatgtccatgaatatgctatcgagctttccatttgttttttttgctctgggagcttctttagtacagtggagtacaagactactggtgtttagatttgtttcattttcttcatactttgatgtcaagctgtaatgttctcaattggtgtaacaatggtggcttgatcacttccaaatagcggaatgtgtaagcattagtcatgataggcgattgctccttatactcgcgtgcaacatgttcctctttgcgttcgatccttcaagttagaggttagtttttacggcacgtaaaataacacgagtcattaacacatgaataactaactattaattattataaatttaggaaatggaattatttgatttttgtgaaaaaaagcacaaaatatatcgtttacagtttgaagatgagaaagctacacgttcaagtttctgaaaagaacggtgtcttagtgctggtcgacactggaccttaaacttcacattacactgtcacactgccttttctgtggcttgcaacgtgagagcaaactttagcaatacatggatcaaacctgtgggagcaaatctgacatctgtggcttgcaacgtgagagcttccatgcttatatattacttaccccagcaatacatggatcaaacctgaccattgtagaccatgcaaatgttaatggagccaattggttctctgtattttgttaggcaaatctgcaatcggagaagtcatgaacttccaaaggatgctaatgtgctttccgaagaagggcatgaaccttcggcataacccaatcggaagttgctggtcccagtctgtcttggtctctttgttcagtcatggtctctcttggactcttggagaagaagagttatgtacaatgtatgtggcaggtggcacgattggcaagtccgcaagtgggagaagtcgacaaccactggaccaattccttcccgcgaatacccccttgactgtacatcagtacatcaccaactccatctccctttacttatgcatcgccaactccactgctccatgttgcttctgcgccgtctccgccgtgccgccatggccgtgctcatgctagtgtggtgcgtgtccgttttcttgctcctcccatctgccaccgcgcaggccaccaccttcaccagcaacgtcgacggcaaggagttcaccacattctccttccccaagttcgacaagcccctgttgcagctccccgacaacctgaccttctcaggcaacgccaccatcgcccaggacgggttgcagctcaccccggacagcggcaacaggcccgagatattcctcgtcaaccaggccggccacgccttcttcaccgccccgttcgtcgtctgggaatccaagtcgtcgtcgtcgtcgtccaactccgccgccgctgccgccgatggaaagtacgtcgcctcgttctccaccgtgttcaaggttaacctgttccgctcgaacctgaacaagacggtcaagggcgaggggctcgcgttcgtcgtcgcgtcgagcaacgcccgcgggccgccggtcggtagccacggcgggttcctcggcctcaccaacgcctccaccgacggcaacgccaccaacgggttcgtggccgtggagctggacacagtgaagcagcgctacgacatcgacgacaaccacgtcggcctcgacgtcaacggcgtccgatccaccgccgcggcgccactcgccccactgggtatccagctcgcgcccaggaacaccaccgtcgacgacggcatctgctttgtctgggtcgactacaatggcacgtcgcggcggatgtcggtgtacatcgccaagaacgagagcaagccctccgccgccgtgctcaacgcgtcgctggacctctccaccatcctcctcggcaagacggcgtacttcggcttctcggcgtccaccggcgccgcgacgtaccagctcaactgcgtgcgcatgtggaacatgaccgtcgagaggctccacgacggcaccaccaccaccgccacgaagctagccggcacgtccggctggaagttggccgtcggcgtgttgtgcggcgtcgccgtggtgctcggggtggtcgccgcgctgtacatccggaagaggaggagacggagcggcggcgacccgagctcggcgttcaacgccgccattgatttcaggaagatcccaggtttgcccaaggagttcgactacatggagctgaggagagggacgaacaacttcgacgagaagatgaagctggggcagggcgggtacggcgtggtgtaccgcgccaccgtggtcggggaagatggccggagcacggacgtcgccgtgaagcagttctccggtgcaaacaccaaggggaaggaggatttcctcgccgagctcagaattatcaactgcctccgtcatcgcaatctcgtcaagatcgtcggtaagcgatcatttctcgttctggttaaccgaaaaggatacttagtttagattgaagttgtgattagagtattagattgggtacggtttgtctaataatttggagtaggaaataatattctgagatggcacacaagttggcacggcaaatagatgttttaagaagctcaccacgctatgtggcaacttgggccacttggcagctaaatttaaaattgaatcatcagtccatgacgtctttgcaagcagattgaatcataagatagatattggagtgctctggttgacaatatgataatgcaagatttgatcttttgcttgcattgtgttagaagaaatatagcgttcgttagttggaacttggaacagccatgcaaatgcacatctctctctatatatatatatagtttaattagctgccaattcaccataagaggagacattcatatcccaaaacaaacaccgtacgttcagtcttcatttttcaaatttcaaaatgatacgaaattctgtaagcaagttctaaacacattttggacgacatgcacgtctgcaggttggtgccgccaaaatggcaggctgttgctagtgtacgactacatgccgaacggcagcctggacaggcacatcttcggcgagccgggcgcggcggcgctggactggaagcagcgctacaacgtcgtcgccggcgtcgcgtcggcgctgaactacctccaccacgagtacgaccagatggtgatccaccgcgacatcaagccgtccaacatcatgctcgactccgccttcaacgcgcggctcggcgacttcggcctcgcccgcgcgctcgagtccgacaagacgtcgtacaccgacatggccggcgtcacggggacgctggggtacatcgcgccggagtgcttccacaccggccgcgcgacgcgggagtcggacgtgttcggcttcggcgccgtcgtcctggagatcgtctgcggccgccgcgtctcctgcagcgacctccccggctggctcagcctgctggagtgggtctggaagctccacggcgcggctggcggcggcggcatcctcgaggccgtcgaccagaggctcgccggcgagttcgacgaggtcgaggccgagcggctcctgctgctgggcctcgcgtgcagccacccgaaccccggggagcggccgaggacgcaggccatcctgcagatcctgacgggcgccgccccgccgccgcacgtgccgccgtcgaagccggcgttcatgtggcccgcgatgcccgtcgcgctcgatggcgacgacgacgacagcgagacgccgacgtcgcgcagcagcatgctgctgacctcgtcgtcgacggggtggaccaaaatcttccaggtgagcaaagagcatgacgtggcggagaaggacgtggccgcagagtgaacagccgggaagagtcagcggctcgcgtgcgggcgaggcctggtcaatcgagaccgtcgagctggtggaacactggacgacgtgcaggagtatgaccaaacaaaacggagtaaaaaaatgtgcgttgccatggaatggcggaggttgtttttgctctaacatttttcaacttgctgcgttaaatacaatctagtggtgtacggcggtgagtgtagtttatgcgagtagtagctgtatttgtcacgtcagaatttttttttcccatggtgcgcaagagggaggggaaaacacttgcttattgttccaagctttgcagccaccttagtactaccatactggagtattgcgagaaaggaaggtcttggagcacgttttcaaagatgctttcttattttaatggttcaaacatttcggttggggttatcgacttggattatatcaacaatactagtgtactggaaacgtggttgtgaatttatggtgctcttatcatccaaactagctgggtggtccgctcaattgcgcggctagcacctaaacaaaatcatatactttttagtatgatttaacttaaaatttattaaatagctatctcattgtcttaagactttgaaagaccaaaccttatcatcatcgtgtttctaattatatagtttttaaaagtcacaccagttgctaccccttatgtcatctcattatttatttgcttgctcgatctaccactatttctattcattcttcttggaacctttaaaaattggattttatagtttttagagtttattgtcacgttgggtttcatttttataatttctagatatcccgtcaaacgttgctattatactcctttacggcccgtccactgtctcttctctttattgttattgagattttaaaaataaaaaataattattgtttgggtttatttttactttctagaagtcctgccaaaccgttagcggctttgccattatactcatctatggctcgctcgctgccttccttctttattgtcattgagattttaaaatcgaacatgattatcattgggtttttttttactttttagaagttccgaacctttaaaaattttgtagttttattttttttataatttttagaagtcccatcatacgatgccactatgcccctctacagcccgtccaccgcctactctttattgtcattgtgattctaaaaatcgaacataactatcgttggaattcattttttattttctagaagtcccatcggcgacggctctgcaactatactcttatacaccctgtccactgcttctcctttttattatcattgagattttaaaaatcgaatatgattatcaatggggcctggtttttttttactttctagaagtctcggcaaccgccttattcgtttgcttcacggcatgcatgacgtccctccttttaatcgtcattaagattctatttgatgttttattaataatttttatatgtcgtatcaaccgccaccactctactcctttataggcatgttacttaatttatcttgtcatgtgttttagatggtattttctttcaataatctttatttttataataaattttagttatttataaattgtattcctaattgaaatcttttttttctaattttagatttcttttgctaatttttgatttatttattttgattctgaattttaattaatctcgtattgggttttatacggactcttcttttaatattccttatttttaaatccgaaattcagttatttttaaattgtattcccacttagactctcattttcttttctaattttggattttattttatttttatttctaattttgattaatctcgtattgggttcttatatggaaacttctttcaatattgcttatttgtaattccgaatttcagctatttttaaattgtatttctacttggactctcctttccttttctaattttggattttattttacttttattttgaattttgattaatctcgtattgggttcttatatggaaatttctttcaatattgcttatttttaattctgaattttaactatttttaaattgtatttctacttggactctcctttccttttctaattttggatttattgggttcctatatggacacttctttccatattgtttttggactctcctttccttttctaattttggattttattttatttttatttcgaattttgattaatgccgtattggcttcttatatggactcctctttccatattgcttatttctaatttcgaatttaagttatttttagattgtacttctatttggactctccttttcttttttttatttctctccgattaatgtgggaatttctagctgggtggcccgcgcaactgcgcggctagcttccattcaaaattatttttttacacacatttttctttaaaatttactaaatagtcatctcgttatcttacatattttgaaaatgaaccttatcatcatcattttatagtagtaattcttaaaagtaacactaatcggcaccccacactccttagcctcccctttattttcttatcatgtttatcacgacttctattcatcaccctttggaacctttaaaaacatgtctcgtcaggctttctttttcatagtttttagaagtcctatcaaacttaaccactatactcctttacggcatacccattgtactcctcttaattatcattgggattataaaaattaaacttgattatcattagtttcttttttttactttttagaagtcttatcaaccatcgcgacaatactccttcacagccaccctgtcgcccctcctcttaatcgtcattaggattctaaaaattgaatctaatcatcatttaggtgttgtttcatagtattagatgtcccatcaattgttatcatcctacccctttacggcttgcttgatatcccgttccgtatagtcattttccataatgtcccattctttatcgtcatttgccaccctttatcatagatagactttttttaatattctttattttctattttgtatatgtgctatttataaattatattattactcttattttcttttttcttattcctatttttatttttattttttattccaaattttaattaattttgtgctcctattttctacatggactttttaaattattttttattccaaattttaattgtctccctagttgaactaatatttttatttttataattactgaatttatttatttttatattgaattatacttaatctcgtgtttatgttcgagatggtcttttattttaatattatttattatttattctgaaatttagtttttttatagattttatttctacttgaactcttatttctccttttccattttcgaattgattgtattctttttcctaattttaattaatcttgtattgtattatacatggactatctttaattttaaactcttatattttctctgatcaatgtcaaaatttctagcttccacatacgaagggcctcatcttttcgtttatccttatacttatctgccaaaatttaaattttcaacctttatatatatatatatatataagttttattcacaaattacttttcgtttgcaaatatgccgcgaaacgatggctctggaaatttctgaattgtaatagctaggtggtcctcacattatgctgctagaagccatataaaattatctaacttttttacgcatgattttctttaagttttgttaatcgttgtcttaggatttgaaaaaatcgattatgttttccagccgtgtatgttgagcatcgaacagactccgtgcgtgtgctcaccacaactaacggttgatacatatatacatgcatgtggtttctagttgccaacttgagatttaagctgatcgtctgattttgataaatgcaaaccaagttggttttgcttttcccgttccagaattaatgccgattggtttttttaccataaatggttactttatcgtgactatcgccgagggcaacgatatgatgctagttagggttaacaacctgacacctataatgcctcgagttataggtgacgattgttagcttcaatgcctcgcgagcacgacctcgagtaggaaattcgctatagactgggtaatgcgagatggaaatctaaacctgctatgtcttaatgatgtaaatattttagtgtttcaataatattttgagtcaacgatttatttagggatacaaagggagtaaatgtttgtagttgtatatatacatgcaaggctataatttacatgcaatgagcaatccagatgatactgaatccaatataaatggtacccaggctacataaacatgtatgggtcaacagcttgctagtttgctccatcgcttgtttcatttgtaggtccactggtatgttatgacatgcatgagaatgcttatgtggacagcacatgtacggcagcatgttaatccggctgcaaacatatatgcaatccaactctgcttcggcttgttttatccgattcattctacagcaaaagtgtggggatatttgctgtgtatgattatttctctaactctttatccgtttgtagaaagacagtaatatttctatatattcatagctcaacctgaaccattataatctagacccactacgatctaacggtgtagatatttctttttttcttcgattaatgtgggaatttctagcctccacgatgaacgtgatgtcttcttttcgagctgtcttaataatataatatatagatccgtgaaggttgtcgcagtcccgttggctactgccagaaaagaattctcctgtaaagctgcatttgcatgttacttgtcatagaatttcttttttttccattttttttaagaataggctggagatttacctaagaatatattaaggccatctggatcccctggcttcaagaagcttgggcaagttgctatgtgccgctgtgtaagactgtaaggttattctccctgcagaacaatctgaaaaaaagacttgttcagaattctttgggtgctcaagtgcaaagttagggcctgttcactttgatgccaaaaaaaaaaccttaccaaattttggcattaccaaaattttgacaggatttcttatatagttaccaaaatttggcagcaaactaaatgtagccacttttttggcaactttactaaaatttgataaggttaaaaatgacatcaaagtgaacaggcccttatttttcggagccttataagggcccaattcaccatgatggcccaataaaactatcggtgctgtgcaccccaggcccgccatctctctgggctcctttcttgtcgcgaaatttgtattgggcccaaatcaccattatggctcaaatcaccattacggcccaattcatcttctcttcgcctgctgcccaaaactgtatgtaggccacccagtcgacagccatctgggcttctttacaggctaataattacagcccaacgccctcgccgtcgtcagaggccgaaaggccatcccgatgttcgccgtcgagtagatcacggcttccctatgtacttctatagtctctattcatcctcaacacaactacacaagcgacggcggcgcggtgtagtcgtgagttgtgacgcagccggtgcgccatgcgactttggttggcatcgtcgaagcattttggttggcatcgcgtcctcaggtgcgagtgtgtgacagttgttccgcagcgcgctcatgcccactactgtgaaacgtgaatgccctgcgcccctgcctgctgatcacctgccgcacagtgcccgcactccggtatttcgcgatcgcggtggtagcctgtgcaaaggcagcgagcagcagtactactactcactttgctatagcaaatatagcgcccagtcgtaataacactacactgtaaaaagtcttcctggctaaagaaaacagtaaaaaaattactccctccgttccataatataagggattttaagtttttacttacaacgtttaaccactcgtcttattcaatttttttttttgcaaatataaaaagcgaaaagttgtgcttaaagtgctgtagataataaagtaagtcacaaataaaataaataataatttcaaaaaatattgaataagacgagtggtcaaacgttgcaagcaaaaacttaaaatctcttgtattatagaacggagggagtatgtactagtaggccgtgtttagttccccaaattcctaacttttcatcacattacatcacatcaaaaactttactacacatataaactaccaattttttctccaaactaacaactttcttccagcctctcaactttttcagctctaaacatagccgtagtatcgatgatttgttccctttcctcgatcctgggctggctggacccgaccgctgataccgtaaatcgggacgaaacacgaggcgagctgaccaacgagtatggccatgctttcgctttgcagcacgcagagccaagagaaaggcgacccaccaacgggaggactggcccgcgccgcacacgcacacccaaaccccacatcgtgtcgcggagctcgccgtcacggtcacgtgtcgcgagacgccaaccgctgccagttaccgttggttcagctggccccgccgccccgtcgcgccccgcgcggccggcgatgtctcactacgcgcgccagcaacgttaccacctcccttcatgtgcgcctgcatgtacagtagagattgcgtggctcaaattatacagatgggccgaggcgtctcccggtcgtgtcgcgatccgccgcgcggcgcgcgcgcgcgtcgggctggttccacgtactactactgtactccctctatactcgtaaagaaagttattttggacagcgacacagtcttcaaagcataaatttaacttcttatttatataaaaatatttattgaaaagtggtatatgtatatttttataaaaatatttttcaagacaaatttttacattttcaaactcaacaacttgagttattcatgatttatattcctaaagtttaatttaaacattgttctaaacgattttcttacttagtattagggagtactccggtgtttatcatcggcacgcttgcgtcgctgcctggtacagtcggcgtttgtcgtgacagctaacgcctcgcgggttcgcgtggcgctcttcccagcttgaagacaaaggtttggctctcttcgctttcttcttctgtctttcgtggggtatcgacgcgcaaagccgcaaacggcgcaaatggtgtggttggtggtacgtacattcgcttcttgccccagcagattactccaccaggtgcgactatactactactgctgctacctcgtgatattacttttctatgccaaatatgcgttacctgtcttattccattgttggttttgatttgaatgactgtgccgcagattgcgtaatctgatgggcctgaacccttatgttactcgtgttacatgatagctctttcaccaaagaatccagccaattcatgctaaaaggtttgagtatggaggagtcggtgttgctggtgggttacggattatcaaaggaaccaacttggaaccttggactgaaaaacggggttatgcttgttcacgtgtgtgagttgatgatcgctgcgacattttatatagataagctttgtgattcagggtgctgtctgaaagcaaaatattcccgaatcagcaaggtaattaagggattgttctgaatctgtcacgggcaaacattggccctccctttccggcacattgaccttccatcaacggactgtgacattctagttgcgaaattagatttggaatgtgtttgctttcattggatgatacgtcttcgtcgacatggacgcataacccaccgtatttctcagacccgagttacgttcaagtttccctgtgaggctgttgtcagttgctgaaacaaccgttcttctgtgaagcgacgatggaaaaacatgttatcgtgccgatttaatccagtagtgagattaaaaacctttttcgatacttgcatcgatctgacttcgaagatgggtggtgttgtatggagacattcaagaacgcgaagcgatctcgttgccatcatcaaccggggcaaattcgattcggttacggcaagcagacgatacagcctgcccgcgcgaaagcagatgttagatcgaaatactgacagttcagatacaaatcgccaaggacgcacgtcgccagaaattacctcccccgagctcgaactgccatctcgggctctcagcatccaacagagagaaaagaaaaggcaaaaaaaaataaagaaaactgccgcctcgtaatcatagagtagtgttcctacctggaagtttaatcaccgttagtgctgatgcggttgggcacaaccacacggaaagcaagcatctataatagacttgtagagttctatagtgcagaattaagaatatacattggattagcatatgcatcgttagaaatgtggggtactaatacttccgaaaatcataaaggagaaagtcgaaagtattgaggggccctctgttggaaaggtgtgaccttgatggggacgatgaactgttggcgtgcacgatacaggtgtaaggctgcaagcagaggggagcgcggccggagagccagcgaggaaggccgggaaaattagaccgacgagatgacgatcttcttcagacggatagagagaaagagaaaggaatacgagaaccgcaatttcgctgacacgtcgaattctagaactgctcggccgctttgttggagcacgccgtattatttatcctggatcagaacagaacaaaagtgcagtgctgtgacgatcaacgagctgctggtgaagctctgcgctgacacgttgatgcagcggagcacggcctttggagctgcatggcatgcagtgcatgcattgcccagtggtgtctcggatgcgtcaccgatgcactgcccccataccatcatatctatcctaaacaacacaacaaatcttgggcaactttgcaacacggcctctgcctacgagatcggcgacgacgcgatcaccggccgccggtacgacgggctgaacgaacctggctggcatcctaatcttttcgcgttcccattccccggccgttttcttggtgtttgcattgcaccgccaggcgggcggggggccgcactacggttggtggggacgcgcattgcgggtacgtgatgcagtaaacgcggcaggagcgaccaccacggctaccggtggccataactcacaccaggaaaggagaaggcaacctgccttgactgttgctccgctgcctcgccgcgcggctcggcccggcccccatatcccgtttctgccatttcccatcacaattcacacccccacggcgaggagtccagaagcgtcccttctcctctcctctccacgccgtctagtctcgtctcgtctcgccgaccgacccatccatccatcgatcgatcgatcgctggattgagggttcagttcacgcgcgacaccagcagcctgcctcatcaccttccgctcccgtccccttccgcctctcgcatcatcgccttctacattctccgcgcccctcttgaggcgtgataccttggccttctctgcccgccgatctgcctcgccacgcggttcgtcgtgctgctgcggggcggcgtccggcggagagggggcgcgcggcggggtgtaggtagctatgaagaacggggcgaggaaagacgcgggcggcggcggcggcggagtgttcgtcccgtgcgtcgacatcaagtcgttcgtgctctcgctcgccttcctcacggtgttcgtcgcattgtggcagctccagccgtacggctcgttgctcaccgcggcgcgctccaccgcctctgtctcggcctcgccatgttccctcatcgccacgcccgccgccgccgccgcgagcgcaggcgtcatccggtcggagaactccaccgccgacacggccaagaccgcgccggccgccgttgctagcgcagtccccgcgcggttggctagggcggcgaggccggcgcgggtggaggaccccaacaagcgtgagctccggccgtacggcagcgcggcggcgctgttcgttcagatgggcgcgtaccgcggcgggccgcggacgttcgccatcgtgggattagcgtccaagcccacccatgtgttcagcaacccctacttcaaatgcgagtggctgcccaaccccaccgccggcaacccgtcgccgcgccccgtccgcaccaaggcgtacaagatgctcccggactgggggtacggccgcgtctacaccgtcgtcgtcgtcaactgcaccttcccatccaaccccaacgccgacaacgccggcggcaagctgctcgtccacgcctactactccaccacctcccgccgctacgagcgcttcgtggcgctcgaggaggccccgggctcgtacgacgagtcccgcttcagcccgccgttcccgtacgactacctctactgcggctcgtcgctgtacggcaacctcagcgccagccgcatgcgggagtgggtggcctaccacgcgcacttcttcgggccgaggtcgcacttcgtcttccacgacgccggcggcatcagcccggaggtgaaggcggtgctggatccgtgggtccgcgccggccggctcacggtgcaggacatccgggcgcaggcggagtacgacggctactactacaaccagttcttggtggtgaacgactgcctgcaccggtacaggcacgccgccaattggaccttcttcttcgacgtcgatgagtacatttacctgcccaatgggcagacgctcgaccaggtgctcggcaagctctcgggatactcgcagttcaccatcgagcagaatcccatgtccagcaagctctgcgtgcaggatccaagcaaggattactcaaggtttgtctttttgattcctcgcatgttctaattttggtcctcttcttgcatacctactcccattttatatcgaagaaattccatatctgctattttgtttttcagatttagggggtgcttgaatgtaggatatttgagtacttttgcgtgaattagagcaaatgctgtgaaaattttgcaattttttttgttatagccgttcagtatatcagttttaggctgcagggtgcattctgctgggttcggtagcatttttcttttgggtagtttgttgtctgccatggaatgtgcattgtgttgattaatctatcagacattctagacgaggttaagtaagtcagcggttacttatttgtgcaatttgttgatcagttgggcaatgagctgtagtataatatagtagtagtatttcaacttgcaagtccagactgcagacgttgattgactggtatgttcaagtgtgtaaccatgtcttgtattgtattctgatttctgactggtatgttccttcaagttaactttgcataggcttcggttagttcggtacaaaagatccaattttcttttaagagttggtttgaggtactccatctttattcattgggatgagtaggtgatggacataagtcatcgcaattcatcatctttgccaacataggctgtgtttagatccagggtgaaaagttttggcgtgtcatatcggatatacagacatatatatttgaagtattaaacgtagactaataacaaaacaaattacagattccgcctgtaaactgcgagatgaatttattaagcctaattaatccgtcattagcaaatgtttactgtagcaccacattgtcgaatcatggagcaattaggcttaaaagatctcgcaatttacacacaatctgtgtaattagttattttttttcgtttatatttaatactctatacatgtgtccaaatattcgatgtgagatggtgaaaaattttgccaggggatctaaacaggcccataattgtaggaaactgcaaactaattaaggtcactaaaggaacacaactaatgtctggccaggaaaaagggatgcaattaatgaaattaattgatgtctaaaaactctcaccatgctttgctgaataatactgtatagatttccatgtattacatgaaagtgaaactatctatgtgcaagaaacttctttacggaatattcagagcatcatctattattattatgtaacccctgctaacaaatttgacttcacaactactccctccgtttcacaatataagtcattctagcatttcccacattcatattgatgtctatatatatatatatatatatatatatatatatatatatatatatatatatatatatatatatatatatatatatatatataattttctatagatgctctttctatctgcattcttgatctttgggcaagtcattgcctgtacaagtgctgttgtgaatgttggcgcctgtaaaaggcccaatttttacacaacaaagggctcatgactgttggttcctgaaaaaaaagaccttttttaacaccaaaaggttgaatttttatgctctatcatgcttttatgtctgtttgcaaggaaacaattatagtaactgtttagattggtaggtttgacactgtttgatgctaaaacatattacgtgtgccgttcatatgcagggaatggggttttgagaagcttgtcttccgcaattcaattaccaaagttaggcgagatcgcaaatatgcgatccaggcccgaaacgcatactctgccggcgtacacatgtcacagaatgtctacgggaggacaacccataagacagaaagcctgatcagatactaccactatcacaattcgatcaatgtcatgggagagccttgtcgggaatttgtgccggtgccggtcaatggtagtaagttgatgttcgaggggatcccttacgtatacgatgataacatgaagcgtttggctgggcagatcaagcggtttgagaaggaagcaattggatctgctcatacataggcacatagcaactgaactactgaagactgccggtacataactacagtctacatatatacctgatgatattgtttaggatgcctggttgagagttgagacgggctcacgcttctgctgttgcaagccaccgtgtctggctggtaagcagagggaagagcttgcaagtgggttggtccaagtggtgtaaagttttggttctttttattgacatgccattctctacaggagcactgctgtttttgctccattttctcctttctcttttctccttacccccacatctgttattatagatctgtgtaaactgtaaacttatggccctgcctttttacagtagattctttgatagatctccctccggggttacatgcagtgtttgttgttttgtgtgtaaatctggattgcacattactcttctgtactatccattaggccatcagcaatgggtaccttcgacccgtcccctcacaaacggccgtttccctcccgtcctcttttcggcgtgagccgtctccccagctaggagcgcgtctactccttgggagacgcggctctatgcaaggagcgctcgcttttcgcggagagccggccctcgcccctgcgaggagacccgctgcgaactcccgtctcctcaccgctccccccaaatccccttcctaccctcgccccctcgcctctctcccacggcggcgcccactcgtcgatccgctccaccggccgccatcgaccggcgggcggggaggtccgcgacggcagggaggagctcggcggccttgaagaggaggagggcgagccagtcgtcggcgaggcggcgctgggcggaggtgccgggggcggcagagtcgagggcggagtcgatgtgggagaagagggtgtgggagatggcgatgtggatgaggaagaggagggagagcgggaggacgaaggtggcggcgatgcgggcgaagagagggcggtcggcgacgatgatgatgagcttcgtcggcgacggctggagggagagaggggagcgggaggagggcgaccggcgctgacctcgccggcgagccgccgccgtcgctgcccgaggccagatccggcaagcccaggccggatctggccacctcgccgccactccgacgacgacgaccctgcggtgttctaccttcgcggccggtcggcgcggctcaacttccccgaggagatctccttgctggcttcgccgtcagagggtggcggcgcaggcgagccccgcgagcccgacggcggcacgctgtccgcggcctcgatccggaagaaggccatcgaggtcggctcccatgtcgacgcgctccagaccggcatgatggtcgcgccgacccaccaccgcgagcagcagaagcaccaccaccacccgcacctgcaaccgcacggcgaggagcaacaccaccacgaggattggattagttctaagtatgaagacattcatacttaaaaatctcttgttgatctcttcctctcgcccctgtcttggttggattagttgccatattagagtaagcactaatccatccatacttcttgctcgatcttgatttcgcgtggttaagtaagtcgtattagcctttcaggttaaggaggttgttaaggtttttaagtaagaacctcctgtagcttacttactagtttgtgatgcttgctgtattttcttctagttcttggcttggtcttaaggagtttttgtttgattgtataagctgttttcttagataatggatcgtataagttgttggatggatcagcaagtattaggcctggtccttccttccttgtgtactactattactcccatgtagtactatgtttggttcagttaagcatttttgtgtgtaaactgtgtttgaactctgctttttgatgatgtggaattggaatttgggggagacactgagcgagagagagaacggtcgtcgccgacgccgtgtggtgtgattggtgtcgaattgaaacggcaacgaacgaacccacaggtacggttgggctcgtctcgatcggaattgactagagggttccagggtatttcgggaatttgccacctggggctactgtggactaggacacccactgtggcctgagtacccccacccggttgctttggattttgaagccactgctcagggagataatacatcgtgaggttgttctctatagccactctatgagtgccctcagccactgctcagggggataatacatcgtgaggttgtactctatagccactctatgagtgccctcctcggttaatgaggacactcttctagtagtggctcacattgctgatgcccttagcagtgtgcttctcttctagtagcttgtctggtgagcacttggaacgcaagcaaacatacagtaggctgctactattctgcattgaatactgttgtgctgaatctggaaatgacaaagctgaggtactctctccatcctaaaaaaagacaaactctggttttccgtgttcaactttgactatccgttttatataaattttttttataattcatatttttattgatgttagatgataaaacatgataaatattttatgcgtgacttgtctttttattttttttataatttttttaaataagacggcggttaaatattgggtacggaaactagggtgtctttttttttttggacggagggagtaggcgttttgcacaagtgtagtgcatatgtgtgtggcttcacttacctttgatgagctagctggccttgtgcatgccgagattggctaggcaataagtaggcatttttggggatgtctccaacttttccattagccactatgattggagcatggcctgagatcggacggatataaggtggtgtttagaaaggagggactaaagttcctccaccaccttaagagcaggtacatcaatagactatttcataaaaaagctagctataagtgtattttaagaagataaaagagaaagagaaaagcagcgtgctataaatttatagccagctacagcacggactttaagatataagatacatatgtgtatgataggtaggactagatattaactgtgtagtatatatttataagtaactattgtataaattgactataaatgatttaaagacagtagttggctatactattaaacttgttctaatgagagagcaacaggggggacaggctaaatgataacgcgtgatggctaggcggctccacgtggtcacacgctctacaatggcttttgtgtctggtccaagtaacaacagctgcttaagagcatcgccaacaacatcttcaaattaagctctccaaatactgatatagccaactctctaactgatttgggtagtcaaactaggtattcactccaacaacctctctatttacatctccaaaataaaaaaaagacccactgtcagtctccgttgccttcttcttcctcctctttctctttctcctgcatctgcagcccatcgatggcggcttcccgcgcgcgtgggcagcgacgaggcgggcggcaacggctgcggcggctccccgtgcgcgcgaggagggcgacaacggctgtggcggctccccgtgcgcgcgaggagggcgtgcgcgtgaggcgggcggcgacgatccactgcgatttaggcaaagagaaagatggtaggagtggtgggacccatggatagccagctgaaatgactctccacatttggccagtgactgctatgatttggccagccatatggcttagccaaccaaatatagagactgttggagggtattttttcttcatactctccaaattttagcttggagagccatttggctattctcttagagatgctctaacctagatgcggcaaacgttcagccccatcgtttcgtggaataagcgaaatagcatatttacaaatggaaagtaatttgtgaataaaacttttttatacgtgttcatagcgatctaaaagcaaaggctgaaaaaaatccgataaagaaaatctcaaaatcagtttcaaatttaagattgaaaattcaaaatctgcctaataagcaaaagaatgagcttcagagattttttttttttgtcggtcgggctacgatgaccctttcattatagggttaattagatacatgccattaaaaattcaccggttttgaaatataccattactatttgcgtatttggaacgatgccattgatatttgtttgtaatttcagtagtgccactaagacacgtattttgcatgtattggacaaaaatgccctcatcttctacctctctccctcttctctcatcttcaagctctctctccccgctgcttcaactccggcgccgtcaccgccgctgctgctgccgctgccgcgccgttgctgctcgacgccgctgctgctcgccgctcgtgctgctgctcgctgccgctccgcgtgctgctgccgccgcaccgccgctgccgctcaccgatgccgtcgctccaccgccgctgccgctgctgccgttgttactcgccgccgctccgcacgctgccgccgccgctccgccgctgccgccgccgctccgctgctgccgcccgctccgccactgccgctcgctccatcgctgctgctcgccgctcgctgctaccgccgctgccgctgctgccgttgctgccgccgctgccgctcgccgctcgctccgacgctgccgctgctgccgctcgctccgccgccgcctgttctctgagctgtggaagaaaggagaggggagaaaaagaagcaaaaaagggtaatttggtccaaattttttcgtaaacggtaggtagtggcatatcttgaatatgtgtaaaattgtaatggcatagttccaaatacacgaatactgatggtatatttcaaaactgataaatttttaatggtatgtatctaattaacccttcattatatggtagattaagggtaccttacacaagcatagattagatagaacataactagacctgcaggagcaagcatttatttgcataacagggcattagcttgttcgtatgcacggcctgctataactcgctaatgctttggttcccaggcactaccttaaacattaaaagtataacaccatagcttagtacataaatatcctgggcggctgatgattcatggggacttaaagaggactttatcagcactccccacaatcaccgaaccccgtgagtaaggtacgccctcaaaaagcttggccataggcactactttccaggcctgtagctctgaaatctttccatcaggcctctcacagtgcggtgagctggaccggtgctacacggtgccagcaaggcttttcgcgtgcatggcagatggatgcacgccctagctaagcccctcgcctccaagcaaagccgcgcggaacatggacggcgcgaggagcgcgcaacaccgaaatccccaggcacgcgcgctgtgggcagcgtcgcctcacacgcgcgtgccctagcgccgtgaaatcccagaatcgccctcccaaaatccactcccgccgcagcttccgccacaacactagcgctcccgccacagccactcttcctccggccaccaagtcaagaaaatgcacgaaaaaattcgggattggaagagaagaactcaaagaagacggattcaacaaaacaaatcgagacgtatgtacaccacatgatgaaaaagaaaaaaaaatccgccagatccgccgccgaccaccgcatcagagtcatcttgctgccaaggggagctcggggagaaggagggaggcgtggagcggcgacgtcccccatggcggcgctggaggaggcagggcctcgcgccgacgaccgccgcgtccgccagatccgccaccttggccgggtcgtcgccgagcccgtccacctccttcctggccgcggcccttcgccgccgcctcgaatcgctcgccgctccagggccttgcgccgacgaccgccgcgtctgccagatccgccgccaacaccgccttgcccgggtcatcgccaaggcaacctgtcgtccacccccccgccacggaggatgccgaggtgctgtcggccacggccgcctcatccggcgccgcatccacagacggagccgaggccgcggacgaggaggacgagcggcgagtgcggcggagtgggaagagaagcggagctggcgccggacggggaggacaagcggcgggtacggcggtgcgatgagaggagccggaggggatggaatggataggatcgaatgggcggagtgggaggggaagggtaggtggaggaaattatttcttccactcgcccatgctaaccgcacccaggtcacgcgcactgtaggagtagttgccttgtatagcgtctccatccaattaaggccctgtttgtttcagcttttgattcttataatttagattattaagccagattactataagttggattataataagctggcatagaataagttgtgagttgtttgtttgtctggattattgaaggcatagattattgggtctgaaaggctaaagtctataatgccctcagctatctgttcagttaatgatataggtgggtaatttttctcaagtatgtagaggtagtgggtctttagccactcaataatctgaaaaaagctcctctagagcagcttatcagattataataatctgacttatagattataataatctgctataataatctacttgtttgtttaagcttactcctaataagttagattataataatcctaaactgaatcaaacagggcttaagccacacatatatgggtgcttacactctggggtgagtgtttttgggccaactttttaggctaagggtacgggacccatagcttgcaatgtgagaggcctcagtgaacttgattattccaagtctgcgggacagaccatctctgatagcttccttgttagctctgtccacaaggagcacactgcacacgtctcttgaaggtttcgaagcgctgaaccatctcggcatggtcacgctcctggttgaaagccttgcaccactgcttatacaaggcccacagggcatcatctgaaacaaggtccttctcttctgccacaaagatcaccctaccttcgccgtcgacgtggcaggaaacgcccctaggctaaacgcataggcctaggcaaaattaggcccaaaatccctacagaatgtagactgatcatccggcccattataccaaacgtagccataatccacatggatcatacagaaactacgatccgttttggcccaacacgtttagattagcctgaaattttcatcagaggcctaatccgaaggagatccgacgaaaatatccccccctccggttcgcgtgacctcggttggtggtctccccttctaaaatctcgccgagtccacaagcgcatttaccagcagctccactcccatccatccccgcgaccctcgctgatctcaccaccaccccgacccacccgcaccgccccaccatcacatcgcccgcgtgagattgctacccaaaaatcctcacctccgacgacgaattgaggaggaggggagagagagctcaaaaaccctaggaggaggtttgaggggccagatcgatggagagccccgcgaaggaggaggcgggaggggagctggcgatggagatcgagtccaccgtcacggcggaggactggcgccgggcgctggcactcgtggtgccctccgtcgtcgtcctccgcaccaccgcgccgcgggccttcgacaccgaggtcgccggcgccagctacgccaccggcttcgtcgtcgacaagtccaggggcatcatcctcaccaaccgacacgtcgtcaagccaggtaggggcccgcccgatcccgcccgtttccctccccgggagtttccgtgtgatttgtgcattgactcgtgtgctactggtttgatgctgctgtcgctgtgttcgcagggcctgtcgtcgcggaggcgatgttcgtgaacagggaggagatccccgtgtatcccctgtacagagatcctgtaagtgtttgctttcatttcatttcatttcatttctgttctattctattttgttctccctgtgctaatggcataatgttaatccaaaatttttccccctcttctcgaaacaggtacatgattttggtttttttcgctatgatccaggtgctatcaagttccttaagtatgatgagatcccgctagcacctgaagcagcatctgttggtctggaaatccgggttgtcggcaatgacagcggcgaaaaggttacgtaaaaactagattaacctctttcctagttgatattgtgaactatcatataatgagcaatgtagcacaagaaacttgctaggatttacatctccagaaattctcttatggactatgggacaatcatttttaattgttaggctttaggctttagtttcttatattggccttgtttagttccaaactttttcttcaaacttccaacttttccatcacatcaaaactttcctacacacataaacttccaacttttccgtcgcatcgttccaatttcaaccaaactttcaattttagcgcgaactaaacacacccattgttgagaagcacaatgtagagctcacaaagcaaatgttctgtacatcgtacagttcattgtgggctctattatcacatgatgcagtttggcatttcagcaacagcaagcgaactgtctcttcttgcatctaataaaggctaaaatgatacaattcattgaaacctctatgttccacacatgtagttcactgaaaactatataatcaaatggtacagtttggcatttcagcaagtgaactgtctcctctttcctgtaatattgtgtggtctgtagtgcttataagattttagcatatagggaaaaagacaatgcatacaacatcctattacgggcctttaatcaatatttgttgattcaggagacatctcttcaactagttggctcagaaactgtagatatgtgccaatcaatggtatagatcaaaacatttcacatattaggctggaaagaggcactggaacaaattattttacttcctatttaagtgtggtaattcagattctgttgtgtcctatgtgacatgctttgacgggacaatgatttgtactaacactagatagtgatgcattaatatgtatatacattttctggacctagatgtggaggttaatcacttaatcctttacattccatgggtacacatcagcataataacttcaaaaattatccgatagattgtgtttcatactgcaacggtttctgattttcattcaccgaatgcaggtgtcaattttggcgggaacacttgctcgacttgatagagaagcaccttactacaagaagtatgtctcctttctagttaccataacggcccattacattagtgctattttcttttctcatgattacccctggatctattgttggacatagggatcaaatatatagtacaaaattcatttgttggctactgaacttagaaaatagtaataaaatatagggagatacatatcatagaggatcagagatcatagtttacttgctatgcgaactttatttagtttcagtaagtgaagatacatatggagaaagcggattaaatctcaacctttcgcttcatttttctccaagccttttcaatccaccgaacttgggcaaaaaagactttgtagttcgtattcactctatattctctacccacccaaatggagcagcttgccaccaccagcttctactagataatactatatgattaataatttttatgtgcagccttgctgcatataatcttacgtttaaccttttttttttgacagggatgggtacaacgatttcaacacattctacatgcaggtacttttctcgggctactcaatattacatccatactctcgttctcttctgacttgtcagttgggacattaatacacaccttttaaccattacttatctgaatgatgtgctcatacaatatcgatattaaaatataatgatacccattttaaaaataatgacattaaagtagttctcgtgacaaatatactcttataattttttgcatgacatatttgaatatttttatgtatataataatggccaaaatttctaagtctgactgtatgcattctagaatgaaatctatttgagaatagtatatgtttaattcaaattggtgatgttcatgcatcttctgaaatatcgggcatgttttagtttgatgccgaaaccagccttatcaaattttgttaatgccacaccttatttatttatttttttgggtaaggtaggtatgtggtggtacgtttagtttgaaacctcatctatttgggtgtgatgttaggtcaggaagtttattagctaccaaatattggtatggaaaggtaggtatggttggtttgttgccttgctaaaatttggtaaggttagaaatggtagcaaaccaagcatgcccattatccgtgattttgtcttatagttcaattgcttttatccaatagaggttcactaattttccttttactctctctgtcattttaatgtaatcatatgtttctataggctgcatctggtaccaaaggtggctctagtggttcccctgttgttgattgtcaaggaagagctgtcgccctgaatgctggaagtaaatcttccagtgcttctgcgtttttccttccattagaacgtgtaagttgtttacaaaatgttcattgaaactagctaaatgcatgtgctttgctacggataaaagaaaacgtattaatgtgttacccatcttttttgctatagggaatattcatcttactctaatttaatgtggctatccatttagatttgatattttttaatattaagaagttcagggattaacttgcaaaatttacaatgggagtaggtggggtgacagattcattgccaccaccactaccttcttttaaaggagtatagatatactacttttagcccaggaagcttatgcttttgttctaaaattgcaaggtctcttatttaataagaccaacgaagtggtcctgctagttgaaattgatacgagtcataaaagcacacatgcaattaggttaacatctatactagacatcacaagaagagagagagagagatagaaagaaaaatataatttggcattgaccgacatccgagttcatacaaaaaggaatagcattgctgtttaatattgattaattgtaaggtctcttattgacaggaacaacgaagtggtcctgctagttcaaaatgatgtcattataaagcgcacatgcaattaggctaactttaacatctatactagattagctggcttaatgattttcatcaggtaaaagtatggtatgaagtatcctattatgcactagacatcacaaggagagagagagagaacttatagtttggcactttggcattgaccaaaatccgagatcatacaaataggaatgccattgctgtttaatatttattgattgcccgtggcacccttatgtttattatattgtttgtccaaactgtttccaggttgttagggcacttaatctgatacgtgacagttgggaagcttttggtagcaagcctgaatctgattacattcctcgtggtacacttcaggtgagcatgctgtctgatgatcccattgttctattttttttaccaagacctgctgtgtcattagatgtttatttctattacggtggagctactgaagatgtatggtgaacaagtaaacattttagcacttaattgttcttctttctttgtatgtcagtgataaagtttgtgaatttgcaatgatcagcaccacaagtgtacagagtgctgcagcagccattgtatagtcaattttgctcctctgactgctgtacttttattacagcgatagttaaaaagcacaatctgtccatgagattattagagttaacaaaggctattactcttgtttgtgttgccatttctacctattcttgttgcccccctcctgccagtccttagatcatttcccttttcccttgtttttaaggtgacctttcaacacaaaggatttgaagaaactcggcgtcttggactcaggaatgaaacagaacaggtatttttgtgcatcattgctggtttgctattggctagaatttccaccctctttgcaatttgaatgacatcagtcagcatcagaaaatagt

SEQ ID NO: 9868 - DNA, 39865 bp, Oryza sativa
ggggatggggaggaggagggggagggttagggatagggttttcatcaatttggaactgatctgaaccgtcctcggctcagatcgatcgagggtttggaccgtaccacttgggccacacgcgggccggtggtccagcaagtgagaggaggagtatgggagtattaactagacttttacgcttgcgggttaaataagaaaatgggttgaaaaaggcccatagagaaaattgatttttattttgatttttatttagataaatgctgaaatgatatttgtattatgaaaattaccaattaagctatataaattccaagaaaattttaaagagtgtaattaatatagaaaatttaataaaaactaaatccaaccataatattttatttctcacacttactttacttgaaaattaatttaattatatacctaccaacataaaaataccctaatattccagaaaatgtgtatatcatttaattagaatttaatatgttttaatttaattttctctttttttctttccattgcaatgcacgagcacttttgctaaaatttcaaagtgtgtaattaatattgtagaaaatttatatttcattaaattaaaatttaatatgttttaatatagtgttctcgttttttctttccgttgcaacgcacgggcacttttgctaaaccaaaaaacacttttggtcaatctacacactccgtaatcacccggtgcaacgcacgggcacttttgctagtttatactaccaccttaattaataatagtaaaaatatggatggacattattatattaaaaaaataggtacattgagatatatggtctgttcagattatagctaaaataaaccatatcaaattttgctaatttggtaatactgccaagttttggcaggattttttatttatttatcagagtttggtaagaaactaaatagatgcacatatttgaaaactttaccaaaaaatggtatgatttgaaatggatcaatctgaataagcccgtaatcgttatttagcagtgtctataaaaacataatactctctccgtttccgtttcatattacaatgtaaatatactaaaattccacatgtaatttagagacttacaatataatacattctgactatatttcatgaaaaatatgacggcacaaatatatatagtccctttttatatattatgaaatagcatcgcactatattgtttatcaactagcgcacgatacaaagtgcttacatattatcttaactaattaaaatattcaacatttttctatcgtcacataatatgttttagttcgtcggcggtgcgccttcctgccctcacaagtgacgccatcgatctctcatgacgcgtacgatggacaaagattaaaattgaaactgatacgaaatccaatcggataatccctacttagagaacccaaagaaaaggggaaaaaaagaaagaaagaaaaaaatcgcacaaatccaaaagcccacccaatcttagcaggatcacattgtcagtgtctcctaagcctcgatctgcctcacaaaacagaaagctcaatcgatctatctcacaaaacagaaagctcaattcgagtcggctctgttcaaatcacatattgatgaccaaatcaatgcccgcatcatgcccagatggatgcctaaatcaataaaatcattcatttagaactgaataaaataggaaatatgtaaatcattcatgtcttacttagttctcagtcccaacaaagaaactaacatctctaatcaacgatatactgaggtcaccgccgccgccgtgcctcgttgcttgctcgaggccgaggacgaagacgccgccgctcctgctacctgccgaataattaaatataattgaatatattttcataataaaattatattgggttgaaaatattactacttattttctataagcttagtcaaacttaaagcggtttaattttaaccaaagtcaaaatgtcttataacctgaaatggatggagtatctaaaacaacgaatttagataaaatatttcctaaattaatttattttaggacgggaatagaattgtagagaagatcctatatatatacccgcacaaatcgtactcgtagatgacatatgcagaacgtgccggatcacgtcattaaactggtataaaggccgtagcaaccaaaaaagaattgataaaagacagagggcccaccgtatatgcatgtacttatgtgacataaggactatacgtgtcctggaatcaaggtgttacccgatctcttttcaagcgttggccgggtggatcaataatcggtgatcgatgccaccaagcgctatgaccacaccaccgtatctccggcgagtctctccggcggcgagttgctttggctgcgccggcggcgaggcccccaccttggacgacaatgacgtggcgccgctgctggacgtcgagaccggcggcggcgatcggagaggacggccgtcggcggaggagatgaggacaggcaagcagccccgccgcgagccgacgacgacggacgccgagatgatgcacgagtggaacagggccggcgttatggccatcaagtgcgtcgtccgggtaagtgtactgatcgatcgatcgatcgagcccgccgtggatcccaaatttaatcctaatttttatgctctattcattcgaaaatatagcaatgcacgattagacatcagctagtaatacggtgcctattgttaggtcaaagaacaaaggattcagtactgattctttctaacaaaaactagcgttttgtacgattggacatcagctagtaatacggtacccattgttaggtcaaaggattcaacactgattctttctaacaaaaactagcgttttgtacgattggacatcagctagtaatacggtacccattgttaggtcaaaggattcaacactgattctttctaacaaagactagtgttttatgcgattagacatcagccagtaatacggtacccattgttaggtcaaaggatgaaaaagattcaacactgattctttctactaggttgattatttttgggatagagagagtaacaatgactagctagcattttgtacgattagacatcagctagtaatacggtacactgttagatcaaaagatgcaaatgattaaacactgattctttctaccaaagactagcgttttgtattgagccgtctgttaaggatacacctattggagcgtgcgtgtgttgtggtacatatatacatgtatttggagaaaaaaaattatatttttgttgacagaaaacacgatgcctgggagatctgcttaactccagtgcaggtccaaagctcgccttcgggtgtgctagcatgccagttgatttgatcctgtaaccaacaagaagtagaagcaaagaaatcgcggttaaatctataaatgatagccgatcggctaagtgccgatgacacatcatttatctttatctttgagccgatgtcatatgtgtatcgatcggcaatcttgaataagtaagaaagaactaaatctactcgatcagctatagatgttaacgatatatactccttatatcgatatatacttaaatcaagtgattgggatagatcggtcgccatgccgagacagtataaatcacttagaccgaaatatatatattaataacaggactatatatgtctacagcatagccgatcagatagatctagcatgtatcggctaatactccgatactactttatatcaggatattaaaacaggtatagagtatcaagcaaaagcctaatatactcaaatacagcaatatcttggcataaatggcagatttaacatgttaataaagcatataaagcaaatatagttaaatcagataagatcggctgaaactccgatgctaccctaatcggcaacctgaaggcaggctagaggttgatattctaagtacgacttaatagatcaaacttaactgatgcagcattaagtatgaaaagaagaacaatatctagacaatcaaaccactggaagtttcataaagtggtaaatatcttatataatttaggtcaacgtcgctatttaacctggtcggctgccttctaccgacagatgttagccgattgtagattagatagcggtattgccggagattatgtaagatatatgacagctcggcgaattatataaacgagatcagagtatcataaagatggaagcactaatcccgaaaacacaagtcgtcataacaagttttacctcttgttgaagatcgaaaccgatgcagctcaacccgaaaaagaactcgtcgaaaaaaaactaaagtaaaagggtggcgatgcgccgagattgtattgaacgtgtgttaaaagttacatagggctcgggtctatttatacctcgagaattacaagatatgtccataacggacacgactactatctctaacaaactctaagatattataagtctttgcggcagatttttgcccaatcatatctctaaggaaattacataaaacatcctaattaatagatacaattgcctcctcaggactctatccatgtgcggcaatcgccttgaagcacctcaatccaacccgacatcacacatcaagttgtattgctaggatcggctacatcggcttacctagtccgactcaggctcagccgatcttatcgtaaccgatctggactcctgctctatttccgaactcgatctccgcctccgacttcacttcaatctaatcttctttcccaatgccgatattaccaaatttggttgttaacaattttaaatattaaaaaatatcttattacgcattgttcagcctctaaatcagttcgatttgggtaagatttggaaaaaatgccacatgtaaataggacataaatcttttttgcattctctttctaaaaatactaaggccaataaaatttgcctattaccatagcaaatatgcgagtgtcattttcaccatccacatacccgtggatgatatatttgtgaattttatcaaaatttacgtccaaccaaagaggaaatatccaatgaaaacttgtgaaaattatacctagctaaaagttctctaaatttcatgaaaaaattattagagatagatataagcatgaaatacattgataccaaatctcaaattcaaacttaacttactttgagtggaacgataaagacaaattttagatgaatagtcatgtttctatatatatttccctaaaaaaaattttacccctaaagaaaattgaatccgaacttaagattttgtaagaatatatttcatgcctatatatctatttctaataatttttttatgaatttacaaaaaagttatatctgatcatttccctgaatttttatttatttaatacttttcacccgatataccctatctacgatcagtttggaatgttctcattgttctagttcatctagcttgatttagccaggaatctaattaccgttctacagcccctactgccaggagtagaattcaacaatcctttccatctgtttagaacaattctaattggatattttttgcatgcttttgcagggagtattgacagtgttttggctgtatatggtagatttagtgagaagacttttcagtacccacatacttggagccttaatagcgtacgtggtggcaatgttcgtttcgttcacttttggacggtaagcgagtcattggaagagttgcatgtggcaccatttcacactttcatcctacggggagtaagcagcactacgtgaattacaatggaaaattatttttattcctcgagaggttattgtttgcatgtcatttagataaatataaaaaatttgaaaaaaaagagatgatatattaacatgtgatatatcactccacaaacatgtaagttcaaattccaacttatgcatctcgcaaaaaaacaatttattttttctagtcaaatttgttttcgttgcgatatatagaagttgaatttgaacttgtatgtttgtagagtgatatattatatattaatacattttattaaagtttttcataactatttaaatgacatgtaaacaacgagagaatatcctctcgagggatcaaaattaatccactctcaactaatagctatagaattcgcaatctcattattgtgcaacgttgaagccattctacgtgtaagtacatattgcatatctcttctctatctctacttatctctaatgttataaaaattaaagatgtttttgctggtactttggtacgtcatccgtatatgagtcggtttttaagtttgtttgcttttgaaaaaatatatatgtatttgagtcaggttttaagtttgttcgtttttggaaatacagaaggagtcatataaaaaatctttttaaaaaactcgcatgctaatttgagatgagtggactcctaattacagctcatgaattcatgatcttttagagaaatatatatccaagcaaatttcgacagtgattttcaccttaattaaaccatatatcaataataaaattaaaataaccttcacctgttgcaacgtatgggctttttttaagtatataataaaagacaaattgcatatataataatagtccggcagcttctctattttattactccactacggctacatgcacaattggggtttccacacagtcgttattgtttccgttgcaatgcaggtgcagacagtttgcgctgcgttcggttggaacatttgggacctttgccacgcatataaaacggaacgagttattagcactaattaagtattaattaaaaattaaaaatatattagtattattttttaaagtaacttttttgagatttttaacaatgagttgttcagaagttcaggaagtgtttgtgtaaaaataaaggagcagaaattggaaaagttcaggaagtgtttgtgtaaaaataagggagtaaacgttggaaagagcaggaaacgaatgcacccttcagagcaaatagctactagtactattaaagagcacctcaatttatctctagaagtttgaccaaatgcatttgtgaaatatcccatacgttggcaatgtcaatggcttcaacgaatgatgtggctcatcctgattgcactttgtgattcacttttactaggtaagatatggatgtatttagtttgttaccaaatattggtaatgcttagagaattttggcaacaatacatttggcctattctaaaagaatgacaatattaccaacttgtttgttaaattttgaaaatgtttatttaacagtaatcctaacaggcccaactagaaagtctctcacgctgggccttgttgaccggccagttagccatgcgttctgggccaccgttgcctttcctcgtcgccaactcacctgcccggtggctcgcaacgtcactctcgccgccttgaactcgtccgtcaaggcctcccacctccacgcacggacccaacaagaattcgaacaagctcaactgaacaaagcccagtgcaacaagaattcatgcactcgcctcgtgagggctgtcaaaaatgctcaaaactcgcgagctgctcgagctcggctcgtctaggctcgattcaagctcggctcgagcttcagacaaactaagcctgagcctctccttaagctcgcgagttttatcgagccaagcttgagcttccaacgagtctagtaatatatatttttttgttatttaataaattatgagatcaaatatgttatttgtatgccttatattaatatcatatatttattttattcttttttcctcttctattaatacgatgcactagaaattaattgttttttaaaagattatatttgaaatatatattgttttacttaaaaattaagctcggtagtcgagcttgtcagaaagctcgaatattttatagactcggctggagcttgtatcgagttcgagcctagacaaacgagctcgagcgagctcgttgacagcccttgccctcgtctgcgtctggccgtctggtacacatgtaggagtagtactgtttcacaggaagacaacacaaataagtactacaggctacagagttgctgagactgacgatggcctcaggattggtagcagtaaatcgtgcgtgcattttgtaccttctaggagtaaaaaaggagtactactcctagcagatggtataaacttgatgtcttgtactgtacttaagtgatcgagtgaaatacagtaatctaggtctagatacccctacattaaccatgaacaacagtacatcttggatgtcacccaagggactgattcacatcatcaaatgacgctactatctggcatctgcagcaaaacacaggggacccaacttaacccaaagcattcaagcccccatcatcaatctgaagcaagccaaaaagaacagaaacaatcaaacgagagcagtagtagcacaaccaaaaaaaccaggaggcatcaaagagtggcaggcaagtactatcagattgatccatttattattttctcccatttgctgacaaccttgtatcgagataccattattctgattccacgtcgtaaagcattttctctgctttttgtagacagcctgttgaacatgatgttcgcgctgtcgtacagttcgaaaaggttcgtcatccttcccttttttttcgttctttctttctttcttttcttcacctgaattttataaatgttgtcacggggatcgccgtggccaacatggagcagggatcctttcctttctcgtttgcaacgtaccaacagctagtgtaactagacaaccgagtcatctggagaaaaagattgagagccaaataagtgagacaggcttgtaaaaagctcatgtcatttggctgctcgctcagcggtttttgcatctctctgacgtttggctatgcatctgtcggcgttgttcgatagcgcatcctagaaagaaaaaggtttcttgtacagttgtactcaaaaggacagggtttgttggttctgtttgtgtgatttttattcacgctgtatacaaacaaattataatactccatagtgactatggctgtgttcggatgcctgagttcccaactctaatagtgcgcacgaaaaacggagcgatccattagcacgtgattaattaagtattagctaatttatttttcaaaaatagatcaatatgttttttaggcaacttacgtatagaaactttttataaaaaaacgatccgtttaacagtttgaaaaacatgcacgcgaaaaacgagaggagagtgttgggaacttagagttccgaacacagcctatgtttttttaagtgtagtacgtatgctggtactggcaccaaacttacatgttactctatttgttgatgtattccaagcagggctcataaaactgatgaaaacctcccggttttggcacaatttttaggtttagagccaccttgagctgataaaccgctctgataagaaaaattcaaagtgcatttcaatttttttttacaggacttacttgaaattcatcagatttcaatgcttttcatgaaaacaggtaaaaccgcttaggagcattttcttattagataaaacctgatttcaagttggtcattggacctcaaatccttcagtggtgaattttgtgctcccaacttatgagcttaggaattaaggatttaatgtgtgcacacgcacgtgcgggtgagggttcaaaaatcatttgctcgccaaatactgcactagcctccacagcaattttgacggtttttgtgaatagtatctaacaaatttgtcgaagattgaatttcagcttatttttttaaaaaaagaatcgtcagtttatcagtttgtttcttgatgcgagctgaagcgaacttgttctttatttccacgtattagaccatcatggaattatctctgctattataaaaattgaagatgtttccgcggtccgtcattcatgtttaagtcggttataaaaattgaagatgtttccgcggttcgtcatccgtgtttgagtcggttttaatttttatgatttggttttaatctatatctcttctctactgttataaaaattgaagatgtttttgccggtattttggtacgtgtcatccgtgtatgagtcggtttttaagttcgtttgcttttggaaatacatatccgtatttgagtcagtttttaagattgtttacttttggtaatacagaaggaatcatataagaaatatgtttgaaaaactcgcatgctaacttgagatgatcaggctcctaactgcagctcatgattttctatatatatatatatatatatatatatatatatatatatatatatactagaaaaaatgcccgtgcgttgcaacgggtaaactaaaattataccaaatataaaagtattagatgattagggtttagttttacatgatatgagctttttaagaaaatctattcctaatgaaataaaaacaattcaacttaagggacctcaagtgaacttattctgtgcgtgcacgcggcccatgaggcgggctacagtgtgggcggcctgagaacatattcggggacgactttagggacataaagtaaatgtattctctgaggagattacaagcggcccaatagtgtgggcagcctgggaacgctggagaagctgagccgtccgatctgatggacggtcttgattgatcacgacctatataaaagttcaatgatccaaaccctaaccctaaaaacatttcccctccctccctctccctctccctcagtggcggcgcctctccccctccccggcggcgcctctcctccctccccggtggtgccgctccccctcgcctccctcgcgtgacagatccggcgacggtggtgtcggcgacgaccgtgggtggatccagccgcggtggtggcggccgaggacagatccggcggcggcggctccctccgactcctctcgcctccctcccgcgacggatcttacggcggtggtagcgtcgacggcgaccgcatgtgggctcggtggctgttgctccccctccccggtgtggcgacgtggccaggagcggtggtgggctcgggagcggcggcgggcttgggaaccggtcacagtggaaggctacgatgccgacaacggcggcgacggcggcggacgacggacgacggcgacgaccacgaggagggtggctctgggagatggctagggttaggatttggattttatttttgatttggaatgttgattttgtggggattcttggttttgatttgggattgcaattgagtgattctgtgattcttgggaattgggggcaaaggggttgggaggctgatctgctcggggattttttttaaaaaagacggacttggacttacacgacgatgacggacgaaacggacgatcggaggccttacatgttttgaagtaggtatagagttataaaaccaaacgagaccattatgtcgcatgcatgaccgtaaatgcattaggtggtatgttttaacttaacgaagagaacaaaaaagaaatcaatggaagagcatcttttaacttaactaccgtaatagagagaaaaaaaattaacgggagggaaggctactcccatggaacagaatgggaaacaacgtttgaaacgcatgcgtccaaatgcgaaacggaaagggacgacgtaccaaaaacccatggtaaaaataagttaaacttttataatagtagagatatatccaagcgagctctcacagtgaatttcatcttaactaaaccatctaacaataataagattaaaatatacttcacccgttgcaacgcacgggtattttttctaatcaattaaaaaagtctaagtctaacttatttttaagctttctcattgtctgctaattagtttatcagatgcaacttaattttaaatattttaaatttaattttaaatttatagccgattttatgtttttctgtatttttcccagcaatgaattttaaaccgctaataacataatataaaagtttttataaaatatgtgttggttgttttgctccttttctatggcttatcaaatatcagccgtaacttaaacgatgagagcattagtttgagcgattgggtctagttgcctgtcatcaaaccatctcacaagctaactttacatgccttttcaagtttaaaaataaaactccacatgccttttgaaagcctgatcaaagcgagcgaaatatgctgcaaattttaatctctcaaacaaacacaagacattaaacaaaaccaaatggaggaaaaaatgtctggcagagaatgattgatgaacatgaagcgagatcgacaaaacaagttgcattttctttttctttcttttctagtaataacaaagagagaatagagagagaagagatacccatatcgaggagacacgatgcgcatacggtacgccgtgtacagtgtacagcctcccgagacaaaattcccaacacaccctggcgcctcggcgtactacgctgtaaagaagagagaacgggaactcccgttctcttgtccaacaaaagttggataaaaattaacaaaagttggataaaaattaacatttttatggcacgttttttaaactgctaaacgatgtgtttcgtgtgaacactttctatatgaaagctgctctaaaatatcatattaatctattttttaagtttgtaataaattaaactcaatcaatcatatgttttgcgtaaaaaacttaatctttattttcatctttattttcagtagaaaataactccaccgtaagagagaacgaaagaaaacgagaggccgcgccgccgccgcgcgccatacatgtggccattaattcccgggtggccccatacgtcagccacgtacatcgcggtggggactggggagcggggtgcatttagcatattttatcccgtcgcgctacgcatagcgaatattcgaaaccccccaatcccaacaggcgacagctcgtcccatgacgaaactctggcacgcgattttacgtaactgccctcgcctggacaaagcatttcaccggaattatctgcaaagctgcgtcatcactcgattgggtgaaagcttatgttacgtttaactgcttcatgttttcttgggcaactgaaagccaaaaactgatttggtcgaccagccaaggtcgtgacaaacaagacgtctttgtatatatcttgtgtgtttgcttaacctacttttagtgttctcctgcatatcttaattcaatcaaacttttcttgctttagtcaacttataatctagtaaatcggcaatgaggtgttagagacttagagttggttacctaagattgtgacatggaaaaacttttgtatggcttcgcctgggggcttaaataaagacaggacggcgtacaaaccaagcaagtcagccattgtacttgcttataagtattcggtattttgtttgccaggtagaagggtaatgtttgtttggtacgtaaacctgaggattgaaaatgacgcgactggtcacggtgtcactataaatttatagaccttctattaaaaaataaaataaccttgtttcgtgacattacatatgtatagatttgttatactccactagataatatcacacaccattatagattcgtttatttcggagacagataaggtataggtttactctcttcaatttgttaagaaaacaactgttatcaactagtattaaattagtattatgtaagtgtgagcgtctatgtatatctcggcacataaaaatataaaatgtgagtataatatttgtttatcttcgagaggagagaagaccatcacacaaaatcgactatactagtgtataatagattgttttctctgattacatatgctgatacacatcatcacatacgggcaatacacacaataccgatgataataaaatgcactcacatatgtacaagtagggttcaaatctattaacagataaacgactaggggcggaggatcaagtaagactagcatgaggggctaaacaatctgtccaaagttatagcctcctttttttaagtaaatactccctccgtttcagactataagatattttaacttttgtcaaaatcaaactgttttaaatttaactaagtttgtagacaaatatagtaatatttataatattaaaataatttcatcaaatcaataattgaatatattttcataataaaattgtcttgggttgaaaatgtttctactttttttcaataaacttggtcaaacgtaaagcagtttaactttgaccaaagttaaaacgtcttataacctgaaacgagggagtatatggcaaaaaaaaaagatagacggtttaatggaaactcctataattttaacgctgataataagggcttgagacccgtggtctccatggcatgcagatccactattgtagacaacccacatttttttagcttgtacccgatcattttggttccattagaggaagtaaaaaaacagtgttgtgcagaaactgaagaactaaaaaagacataccaccttgttaacacgttcctaaagtttcctgattttctagcaacgcccagaatcaaccaataataaagctcctttaacacggattattttgcacacgtagaaagtttaggccctccagtgccagccactcaggctgctgcattgcatagtgtactactagtcgttaaacctataaaatggccaatgctagtccagtactacctctggttctataataattaacgctttggacaagtttcaggtcaaatttttataaatttgatcatcaataactttaaaaatatttagtttaaagaaactagaacaacatatatatatttatctttaaagcactataataaaagtaaacatatatttatttattgtatatattataatagaaaaataagatcaaagatatattttgtagaccgtgttattgtccaaaacataaattaaaataaaaccggagggagtatctctgtcaaaataatagtccaatgagaggagaccagttcggacactcaaaatgatcatcacgtcatcaaaaagcggccgtccagggacgagggggggtaccgtggtcatttgccgcaccgcacgctcccctcgcgaagcgccaccgcttttcagccagccgccccacgtgaaattacccctctaccccccacgctccctctctcctcctcttcccctctctctctctcctcccccgctgtcccgcagcctttcccaaatctagccgcacgacgcaccaacccacgcccgagccagagccaggtcgccgcgccacctcttcggcttcgccgcgccgccgcgagcgggcggggagactccccacccccggtgagtgcccgcccgcgcagatccgcgcggttctttatatttgggaacagtccggcggggggtttcttgcggttcttggggttggcgggaattagggtttcgttggtggggttttttcatggtggctagggtttttggtcagatggagcttcggttggtgatttgggtgtttctttgttcggaattgcagggagggagagggcggttcgtttattggatgagccgtgaggaaattgggaggaagaaggcgtgatgtttactccgcaggggaaggggtggaccgggtggtcgacgccggctccggcgaaccagcggagcggtggcggcgctcccgccgcgtcggcgccccttggcaaggggaaagggactactctgcgggtcgccgaactggaacaagaggtgtttttttttaacccaaatcctggcttttctttctgttcgtggatgtagcttttgaattccaatctagggccatgtttctttgctcaccaaatgcaatgtgcggtttttcatggcatgctatcagtcgatgagaagtggaagcagtgaaattgagtgaaaaaaaatattagtgtgcctcgtgatttcattttgaaccgtaaatcatttgaacattccaattttcatttatttgtgcgaggccatttctgcacttgctaatgatttaaataacgtggtttcttatgaactgcttaagaaacagagcgctgcctagggtgctacattacattggtgtcattcttatgtccttttaataactcttcagtcatgttaatctattatttgaatataaaataggcttgtagaaactactgtaacaagtagttaggcatgcaaatacctacggaaggtggaatgttttatgtgattgacttctatgttccattataagcattcgatctaatatatatttttcttcagttcttatctctctcacgctggcttcctaaatcatatttactacagttgcacatccattttcttgtttgatcataccattagtagttattttcttttgtgttcatgtccgcagttacatgaatatcagtacaatatggggctgcttttgattgagaaaaaagagtggacagccaaacttgatgaaatcaatcaagcgctgacacagaaagaagagattttaaagcgggaacaagctgcccatttgaatgccatatcagaatacgaaaggcgggaggaaagcatgcggaaagcattgggtgttgagaagcaatgcgtaacagatgtatgttattctctaataatttcttactcttgctgtttatcagtatttcctaatattcgtaatgctgttaactgttgatgactaagcagttttttgaatactatactgcatatactggtgatatcatatactggtgatatgtaaattttatcacagtcatgaatcatgatgtaataatatctaatggtcaaatgaattggttgaataatttctaggttatggtttctccagccaatagtttttaacactgcattgtccttatgtttatgtttaacaaaagttctatgtatctgagcacacagcacttgtcatctgcagtcctttagccttcggaccatgtacttttgaacgcttcattcttgtttcttatcacttcatatttctgaactttgcagctcgaaaaggcactgcgtgaaattcgtggagagatagccgaggttaagtttatgtctgagaaaaagataactgatgctcaatcccttgaggctagtttggaggaaaaaaggttggagatcgagggtaagcttcatgctgcagatgcgaagcttgctgaggcaaaccgtaagaaatctcaggctgacagggatttagaggaggtagaagctcgtcagcgtaggctggagaaggagaagctatattttgaaaatgagtatggcattcttgcccgttttcctttgtctgtgtgctctctactgtgccaagcaattgattattgtatgtcattgatatgtttaggaggaaggcaggggaggaccggatcaagcgtcaggaggattcattacgtgactgggacaaaaagcttaaggaaagtcagaatagaattcttgatttgcagagatccctaaatgatcgagaggagagagcaaacgagaatgacaaacttttcaagataaagcaagaagagttggaggaagcaaaaaaagctctggagcatactaaagctacactcaaaattaaagaggacgacattaacaaacgactagctgaattacatttacaagaaaaggtaatccatatatcactgaatgccttttcctttatcctcatttcacattattacaaattgatagtggaattaaaatacatatcctgtttctattcgattataggaagctgaatcaaagaacaggaaattagaagaaagagagaaaaaaatagctgaaagggaagaaaaagtcagtgcaagggaaaaagtaagtatgataggctaatattgtgtttcttcttcaatatagttatacacttgatagcaatgtctagaccatgttggattgttggttgtgttttgttctaggtaccgtttggtaaactcgattttgtgttaaatatgtgggtttgatgttttatgttctctgttattcagcttgttccctgttttatgcattcactattgcataaagttgcttatcaattggtgcttttatctcttttgtgatctcttctttcaatataagtagcatcatgtccgtgtgttgcaatgactcctaaataaatatactatactctttcatataattgtaccaaccaattctgttgcaggttgggcttcagaagcttcttgaagatcataatgtgaagcttgaatccaaaagacgagattttgatttacaactggagaatgagaagaaatcatttgatgcaatgttggtacagaaggaagctgatttggtgcagagggaaaaagatgtcagatcttcggaggagaagctttcgaaaaaagaacaagtattaaatgaaagtaagaaaaaattggaagaatggcaaaatgatcttgatacaaaatcgaatgctctgaagaagtgggaggaatcactacaaaatgatgagaaacagttatcggaacaaaagctgcagattgaaaatgaaagaaagcaggctgagatgtacaaattggagcttgagagtttgaaagccacagtggttgctgaaaaggagaaaatattgcaagagcagaacaatttgaaacttacagaggaagagaggcaagagcacatcatgcttacagcacaactgaagaaagagattgatgaatacagaatgcgaagcaactctctttctgaggaaactgaagatttgaggaagcagcgtcagaaatttgaagaagagtgggagcagctggatgaaaaaagaactcacttggaagaggaagccaagaaactgaacaatgaaaagaagaatctagaaaggtggcatgacaatgaagaaaaaaggctaaaggatagagaggatgagttggacataaaatacaaggagcagggggaaaatctcgcacttaaggaaaaatccttgatcgataatatagaccatcagcgtttggaaaatgaggaattgctaaagagagagcgtgctgatcttcaacgaaatttgcagctccatcggcatgaattggagatggagatggagaaaaaacaagcgagcaaagagagagaacttgaagagaaggaaaatgagttaaataggaagatggactttgtagaaaatgagctcaaacgtgcagccgaattgaatgaatcaaagattcagaagatactattggagaaaaaacagctgcagaaggaaaaggaagttcttgtggaggataggcaaaaactggaaactgacaaggcagatatcagaagggacattgatagtctgaacactctcagcaagagtctgaaagagcgtagagaagcatataacagggacaggaataacctcatcgatatatttgaaaagtacaaggtgtgcaaaaattgcggggttattatttttgagggcttggatgccctagctcttaaagatagcactgatatagaatatcctagtcttgctgttgaggcggatgatcgttcccccaatcctgacaccttagcccaagagaccggagcacttgttaattcaggtggccgtttatcattgttgcagaagtgttcaaggattttcaagttttctcctaggaagaaggctgagcaatcatctgaacagcaagcagtgaagaacacagactttggtgcaagactagaggaagcatcgcagagcgatgatgattatgagccaactcctgtctatcaggtagcctataactcatttgatgctgaggatctcccatctgagagtggggcatttgagaatgaagaatctgaaaggcaagatatagcagatgacgtccagatggagtcttctcttggagttgcagataattgtgtagatattcatggaactcaatcatttgatggcaacacggacatggtggtggacacaactattgtggatgttgaccaaaacgggaaggactcggcagtgcttcccgttgtagatttggagcctgaaacatcaaaacaaggacggcgccaacaaaacaggaagggtagagcaaaaggtggtgtaaaacggacacggtctgttcttgcggtagttgaagatgctaaagaaatacttggtgagaatttagaagtaaaaaaggatgatggccagggagattcagttactgtgggtggtacacggaagcggcgctttgctggagccacaatcagtgagcaagatgaggacagtgaagctcattctgaaagtgtttcacttggagggcagcgccgcaagaggcgccaaacagctgcagcagttacgcaagccccaggagaaaaacgctacaacctcaggcgcaccacagtgtaagtttctgtatttatcccacgtttaatttctactcaaggttatcatcctttttttaactgacttgtggagtaaattgatttcctttttgctttattttgttggaaagtgcaaatgcggcaactgcagcccaaaccaacaaaaagaaagctgcgaaaaagggaagtaaacagacagtagaggctaccgcagatgacacagaaggaacctcaaaggctgaggaacctgccactgggagcaaaggggcctcccaatcagctgatgatgcatctcaattacccgagtactcgcaggtaagatccattctgcattgtttgctattctgtattttatgtaatactttgaaaggctttcagtatcttggatgcatgcctttctgggttgaggccaagctttctttttgggtttgtgtggcatatacattcaggatcacagctaactcgaaacttgctcttgttaggctgaagctggtgacacacatggccctgtagaggtcactagtgcagagggggtagatattgtggatggtatagatgcagcaccagatgcgatgcctatgacaccatcaggaagtgaacttggagctgaacaggatgatgaggaggacgatgactccgaaaggcggaaccaatcaattgggaaaaagctatggtctttcttcactacatgacaattgcagagggctactgaataggttatttctagcgtttctgttttcgattcatgacatgccattcttggaactctaggttgtgtgcttggtgatgatgatgatgtactagtagattttcccacttcaattatgttctccccctgtaattgaaatatatttgtagtagacatagctttgatgggcgctcacagaagttagcttttgagaatgtacaatggcgcgatgcctgtaactgtcaagggttgaggcttgtaattgttgttcattttgttccaggatcagtttacgtggttgaccaccttgcgaagtttgtggcatttgtcaacgcgggaagcttttttttttctcgtccagacgaccagattgtcttccatgtctttgtgcatcttgaattataggactttgttgactggcagttcttcagcttgtgaaatagggggctcaacagtggcatccaggatcagttacatgcaaagtttgtggcatttgttgacgctggaagcatttcctttttctcgtccagatgaccggattgtctagcatgttcttgtgcctcttgaattagaaggcccttctgttgactggtagttgtgcagcttgtgcaatgtcttatcagtgctacctccatccctcccagtaatacctctattccagatttttaggggtaaacatgattattaaaaaaatatatgtagatttaaatggagatgttgtgattggatgagaagtataatagatagaattaaatagagtaagtttgtgattgtatgcgaaatggaaatatatggtgtaattgaacggcgtagagccacgagttgggaagagaatgttagtgaaaaaaatattatattttaaaataaattttaaagattaaaaattgctatatttggcaggagtagtgtatttttggcttgtatatacgtcagctgtctgggccttccaatggacgtctgcttcgatgcaagcaatcgccggtcttctggcttacgcggctaaggaatatctatgctggactctttgcctttgtccctaaggcatgctgttctgttctgttgtgatattttctttttctttcgagacggtttgtttgcagcatgtgctcactttcatttggcgtatctacgctagcctaaagcaaatgcatgtatgtcatacccacaagtaactacaaattctcttgacttcaccttgcagtatactaaataaaaaaaattgtctgtatttccagccataaattttgcataaacaaatcatatttaccttctaaaaaagaatagtatttccagaaggaaagcacatagtacttcaccaatcttttgcccaaaaaaaaaacaattgagagcaactcggtgtcccagtctagtagctttgtttcttgtggctactttggaacgcaaaaaatctcacaaaaaaatatttttcatataaatcagtttaatacctaaagaaccccagggggaattcctcaggagtacgcctaaaaatacatatgcattgttccaatatttatacgtgttaataaaataaaataaaataaaaatacgtgttaaatatctcattatcccatgattcttaccaggttataggactccgtatagcactttcgtatggtgttgtaatcgcttcattgtccaattttatttagacgtaagcaggcagtactacttatgtacaggtgcggagagttgcatcgggagaaaaagcctactatatgataattcgacggatttgctgttaaatccgagttaaccaaacagaagccgatcagagaccctaccctccgccgatgcgtcgagaagaagcctccgccgccgccgccgccgccgaggctgggaccccgcgctcaccggacctccacgacctctccgacgactccgactacgccgccgccgccgccgcgtcctccagtcactcggtgcgcctctctcccccaccactcgtgtgcttcctgccgttccccgttcgcctcgcctcgcttgctcccgacgcgagcgcgcgattcggtcgcggcgcgagcgaattcgctcgattaggtcgatgatttttgttgggaggttttggggggatttgggatcccgctgctcatcagatgttgttggggcatcggggttcgggggtagtgctctagttccgcacgtaactagttcggcagctgtcacctcttcctccgtacattgattggttttattggttgggtgggtgtgtgcgtgctatggatggcgatgaatgatagcctatgttgagttcccaatttggattgaattgacgttcgtttggttgggtgaactgaatttggtgtttgtttggtgatcgaaggcgatgcggagcgatctggtggatcaagggtcgggcgagacggcgaaggtggatgtggtgtacgagaaggagcgtgtgacgatccacccgacgcagtatggctccggccggatcagcgggaagctgcgcctctacttgcagcagggctccctgttcctggtgagttagaaccccagttagtctgaattgttgattgttcatgaatttgtggtaggttttgatattattgttaccacatttgctgtgaggattgaaccatggtccttttggcttgatggccagggcattcgtgttgctacttgaattatatgttggttggcttatatatctttgcttatcattgtactccatatatgctaatgatacaatatgctactattcctgcatagacgttccttccacattttctgctaaatgtctgatattagaacaagagaactgaaattgaaaatccatatgattgttgttggttggcacctgaatatggttttgttacacatgacatgttatcatattggtacccaagttgcttaattttcttcttcatttgcttatgtctttgttcaaatctgtgtgacagagttgggagccaaatgagggagttgattctttatcaagcaattcagctaccatggaaatagaaaaatgtaggaacaacacaatatatttcttttgtcatacttggtaattgaagtgcagcagtgattacacttgactctttctttacttgcctgactatgtacagatagaaacctgtacactataaaggccttgccattaagtgatgtacgcttcatccgtaagcacaccccgacatttggattcgagtacataatcattgttctctcatcaggtgaagtgctcttctagttgtttgctttcttgtggttagtttgaaactttttggaatttctatagtcacggtgatcactgatcacattagcttttaggtactttatcttacaggctcattgcatttctgcttcttctagctacataatacacatgctgacaaaaatgaaaaaaaatgatttattgtattgatgtatcttttcaagttttgcaggattggcttttcctccattctatttctacaatggtgggcttcgtgaattgtttgcgacactaaagaagcatgtttttattatcaggttttctttctgggttcactctaattaaataattagtcaagctgtcccttgtttgttagtgcctaaattgctcattcctggaaatgcaaaaattgctatctggattatgagtggactataagtgaaatctacatacaacaaatctaccaagtatatccataactggattttcaaagcacttttttttccttctatatgataggatactgtcataaatatttaatatttatgatctaattaacctacacttgggaagatgcttcactggacatttcaacatatctaggagcgtttagtaactcagcctacagaaaactaattaagtaatggagcattagagtgtcatactacaaccaatcaaatgtttacagaagtatcttttgctgcatatatgattggattttctctactctatctcaaggtcggacgatgatcctaatgtatttcttgtcaacgactttcaagatcctctacaggtatgttattatactttcttgtagccagacccataatttctttaagaccaccatgccctcaatagaaactttactgtccttgggaatatgcaaaacaatccttttagtaggagtcccttgtaaagctatatagtcatctttgtttagaagtccatgttctggcctatgtcttgcataagtttaacttagaacgattacttacccatgaacctcaaatccactttatttgatgccttatagaaaagtttgtcatcactggagcttcctggtgttgccaccgtagcaaatgccatgtcacgacagaactcactcagtttcactagttcagttgatgaagccagacatgggagtgatgccaaacatggggcatcttctagcatgactgaatatgtctcaaagcaaaagcacagatcgaatgatccgggtcgtgatctttctatccaagtactggagaaattttctctggttacaaagtttgcacgagataccacgtcaagtctttttcgggaaaaccacagtagtggtggtcatacttatggaaggcagcagcaagaatatgttttggacaacagagcaaatgataagtacaaagatcagcaaataacaccagataaggattctttgctgtcagattcaatggaggtaaccatatctttttttctattgttctttgttattcgtccactacaaattttggaagagagcaacaacagaacaactttttgaagcactcacaagtcatggagacaagcctttaaattttactgttatggttaattcatttttattctaattttttttgtctgaaaacagtaggggatgcacctgcgatatatataaaagaataagtaatacatacagagagagtaaaactaaaatacaatttcatattcacaattaggattaaggccatctgtaatgagaagaaacctaagctaaactagtattatcttctgtcatctgctcatgttcaaaaccattatctgccaacttcctttctattactagaggtagtattagatgtatcttctatgtattatttagcacatatttgttgtcactttagttggaaaacttaaaaaaaaagattttttaaataaaaaatagtcagtttttttcttctgacccctggtactgtccaaagctattacaattttgcatactgcaatgtgtgtaacatcagtttccttgatcttggcagtctaataaaattctagcgtggggaaaaccaagagaacaaccgttgagtgttgatgaggtattgaattctctgagcacttattttacatatctgtccccttatgttcaagtgctctatggtgctaaaattccatgtgctattattctgcttagcgttgcagttcaaataattactagatctgtaactcaatccacaagatacatcagttgtctaacctctaacatacaattggatgagttcaacatttgatttcggatgtatttactatcacagtaaagtattatgatcctcaagacagtcatacttctgttcaatcttgtgacctttgatatttaaacctcttgtttcttggagtcattatgtctttggctcagactctaggcatatgccttggggcttcaagcaagctaagaaatcctgcaggattttagtggaactcaggaactgttgcctcataatttgcaagccatgcttctcctggcaggagaattagcctttagcagatactgtatatttgatactaacaacttgttttctggaggtataaatagattgaaagggatagttacatggaaaattattccttttatccagtaaacatctagttatctgatcatgtcaagcagaggagcattgtgctggatacacacatgaaatattgtgctgcacacacttccattagtgaaaagatttgttttaccaaatggtagtttgacctttttcttcaactcaacggaaggctaagatttagtctggcattttacattaattaagaactgtatgagtttacgctgcacataatgtctttagtttcatggatcttctccaccaaccatctaataattatcatgtattgatcatgttgtaccactgttcctctcagaaacgtcttatgtttgtctgaaatttttattgcacagtggagatccttcttagatcctgaaggtagagttatggattcgaaggcgctgaggaaaaaggttttctatggagggattgaccatgttctgagaaaagaggttttatacttaactttgatttgctataaccactcaacaaggcattcttgtacatgagttttgatgtttaatatgtaggtctggaaattcctgttggggtatcatgaatacgattcaacatatgccgagagggaatatcttgctgtcatgaaaagaacagaatatgaagccataaaatcccagtggaaggtcagtcaaggttcataggttcaatgtgctgcaattcagtgtgcttattaatgctggctaggacatgctactaccatatatattgagtatatttttaaagtagagctcaagtgatgtagactgtcatttgcttttgctcagttttgttagatctgcggtatgtgattttgcttgatgggagcaatgtttctggacatatgattatccatttgctgttctctttatccctaagatcatgctgatagtttgcagtagtaacattacaaatgttaagacactttcagctgttcgtcataacaacaattcatgattcttttacattatggcatacattactcatcttttacatgactattcatgaatcatgattcttcttgatatattatttgcagagtatttcgtccacacaagctaaaagatttaccaagtttagggaaagaaaaggccttatcgacaaagatgtggtatgaatttgtctacttttttttctatctgaacttttcctccttatttccattttagcttcctctctgaccactttttatttttaactgatatccaaactgatcacttgttttaactgttttttggatatcaaggtgaggacagatagatcagttccatattatgaaggagatgacaatcaaaatgttcttgtgctacgggatatcctgttgacgtattccttctataatttcgaccttggctattgccaagtaagtttgcacgttctattacccttcacccgcaattatccaacatcagctgatgaagaaaactgcctgccagtttaagtcatttaagtgaaaaacactgcatttgctagaaagcttccactagatcacataaccctgattcttgttaaatataaggaatgtatacatgctgaatcacaaggcactgcagaatattcatttgttttgtagccatattattacaagtgacagggttaatcatgctacactaaatatttagacctataaagcatgaaatttcgttgtctaggtttctttgtttgtttgctcatgcagcgagcgctctttcttccagggaatgagtgattttctggcacctatactttatgtgatggaggatgagtctgagtcattttggtgctttgcaattttgatggaacgactaggagccaattttaaccgtgatcagaatggcatgcatgctcagttacttgcattatccaaggtattttagaattttccattcttcgagtagataagcagtatcatagtatcacaatagaatttttgttaatccgcatatcctgtgcaaatcttgcaaaaccgttgtgcttaagtcatatcgattgattatgtgtgtatcatttgttatatggcttcattaattgccttcaatcatgcgatgtggccttcgatattatgccaaaaatacatattatatagattgtaaaaaaatgttcaagtgacaagcagttcatgtttatacttcttaaacggcataaaaaaaatcccctctttagttttcataacttttcattattccttattactgccttcaatccttaccatgttatgattatccattatacaaatgtgtctgacaaacactgccagcttaggtgtcagaataactacttttatcaatataggagtattatactttttgtgactgcacaatactaaatttatgtgaaattttctatgtacctcatgcagctcgtggagcttcttgatcctcagttacataactattttcggaagaacgactgcttaaactactttttctgttttcgttgggttcttatacaattcaaaaggtaatatttctatctttccctatttgagttgtatgcattttgcaccttaaacagaaaatctaagttttcgtctttagctttgtaacactatattgctatgttctagttccctgcagagcccattatcttatatagaatccataaaaaatattgaaatctagatgatgaattaatgaaattctctgtagctccaatatttagctacattaagcaaatctaattcctccaaaatgttctcccgaaaatggaggtgcattttgtgtctaagaattagtgacacggattttcaccaaagattttgcctagaagcatgtttcattgttcacacctgttgggctgtatacagactgtatgatagtacgctgctgtcacgtatatcgggtaaaaaccacaggctagtaggaccagtaccttcaagttaccttattagttggtcggttggtccaatggcatcaatcatcgcgcaacaattttgaaagtttatgagctattcctacctttattaacaacaaactgcttatgagctggtgctcaactgaaacctgtaaacttttgacatgaattcaaacctgggttaacctgcaataccagcaccagtggtaacttgtctagaagttaattatcttctgctatctactatacgattttaattacattagtttgctaagaaattttacactgcatcattaatgcagtactccccacccaagcacttgtagaggaaaatgcagcctgcactccatcccctctaatagtctaattaagttactccaatttcttatggattgcagggagttcagtttcgatcaaatcatgctgctgtgggaagttctgtggacacattattggtcagaacatttccacctctacttatgcgtcgcgatcctgaaaaggtaccggtcgcggataataggagagcagatggatttcgacacccttctcaagttcatcaatgagctcagtggcgagataaatcttgaccgggcaattcaggacgcggaggcattatgtgatcaggcaggccctaacggggctgcctgcattcctcctggaaccccgccttctatgcccatcgagacggacggtggcctctacgtacaagaagacgaggtcatgtgagataccggcgattcagtggtcacctcatacgacaactgccatagaaagcattgcactggtttccataattccattgggtgcttggtacgttggtatatataaattatgaaggtgatcaaaataatgaaatctggctgttgtatatatgtacgttgaaatatcagttctcgatgaacccaacaatagttaacacaagtctcttttttttgcttaatggaaatggattgtcttttagacgcctatgtttggcttcactgcgtaaatatataatattatgtcacgtgatacttatcaactggcaaagttttgcagttgggtatttggataccagtaaaatcgactgtctgagtacgatttatagccttcaaggctgtttggactgaagtgatgttgagcacgtaattcgtttgtttcacatatcctccagttctctgctcaactataatccagcaaacctgcgagctgaatgaacacaaagcgaccttgtgaatttgtgatattaacggccattaattttatgtggctctgtgtagcttagcctgcataaaaccgtgatgatattgttttcgtacgtgtcttcctctcgcgtgataatcactctgttgggaaacaccacatccacacgttggaattctaaattcgtttcctttgcatcattgcacgaattgggatcacatgcagtttcattgcactaatctttataatttgtgctttgctctataagaccaccctatgtttgatatgaataaataaaagacccaacaaaacacacaaagtaacataggctagaggtcaacactaataacgcgataatgaaatcgtggatgtgggactgcacccactatagaatctttttaaggatgtgttagagacaacctgtttttttcttaaagataatgtaagttttttttgaactcagtcaattacattaagattaaggtgatataatttttttagaacactttcagcctttgcattactaaaatgcacaaagccgagcatataaaaccacactcaaaaagaaaaaaaatgacatagagcgttgagaataaagaaattcttggagctatcattttcctctagcattaataaaattcattggtgttaagaaaaaacttcttgtgggaaggttggctagagatttcttagaaaaagaccagcccctgcaaaggcaacagtctagaacgaggaatgagtggaggcgagcccggatccagagatagatggatgaatggtgtcgattcaagggttttttctattaattgagaattaaaatgtaactaaatagtcgagtgctattgagggccatcaattcaaagactaaatcgtcacccatgaacaactccttggccccctccttcaaaaggtcggagtattaagagccaccaatccttacgactagatcgtcattcatatccctaggtaaaaaactacttgaccaccttctccaaatgtagacatgccgcaaccacatccaaacacaccgcagtcactagatccgctgcatatggtaggtgttagtgtgtcttcggtgcatttttttttaaaaaaaaaagagaggaaaagaacacaaactgtggggaaatatgttgcgtcaaatgattttttttcttctaagttcaaacatgcaaagaaagatcaacaatatcaagaaactgaaattgccctcaaaactcgtgaaacattgctagccccacatccacacgagctaaacgcttcgcttgcctttaggaacaaagcggaatcttaggttggatctctcggtctgttcaaggggctacactgtaaccatctatccatccatgaacccccgacaagcaatcacgcagaagttcagtgtccgggcaagattttatcaccctgccccacaaaacattctttctcctcttcttgtcatggcaatgcacaccttttctcgagaaattcatctccctttccctcttgtcgccgtcgtcagatgagctgaaattcagagctttttttcaggggaaatttcagagttcgttcagagtaaattgctggtggctggatatgtaatgtgttgtgacgacgcactatgactatgctgtttaaaaatgagaatcgtggactatataatggcgaataattagaggtttgattgtgagcttccagctcggaaggcaactgacaacttattaaagaatttccttttgggaggaactaacttgttaaaccaaagacatctcaagcagcagcagtattaaactattagttaagaactgtggataagttagctgcacattccaaggtagtccttaatccaagggttgaggtcccatgtagtcgtgcacaggctctaataactgaatcacactttctgaagaaagacgattaccatacttgtacaacttgtactaaaaggtgtagttctacaggtaattataagggcaagttttatagtagaggtgactaccacatccaatttcatgcataacatatatcattaaattaagaggtaacatgtattataggttacctctatcatacaatccccaatatctctaacactctcacatgtttattgaagtttgtgtaggggttgccccttgtatgagaggtaactatttctctctcatatttcttctctcctccacctcattatttactcctatgtggcatcttggggcttatgcttagatgcccatagtacttgccctaagggcaagttttataaaagaggtggatgttgcatctaatcttgaccacatcatcaactaataaatgtagaggtaacatgtacaatatatcacatctatactaattctaatacactagccccaatgtttgtttgcccaatctactcttatcctctctccttttgtcttgaattttgtctggtggttgcctcttgcatgagaggtggctgcttatctctctcatctcttctctcctccacctcactattttagcttatatggcatttagaagattgtacttggatacctatagtacttgtcctaaccattgttcttttggcgtactgtgtagtattcagtattatgaatttgccaacttttgtctcctggagagcagaatcgtcagccttttcacttcatgagcaccagattagggtaatcaagacaccaggttagtactagtattataatacctgcatgtagaggatgatttgtaattgtgttagtacaaatggacattagaattttaagggtacaaagtgaatgtttgtgaaggacatcatgagtgaaacttgatgggaatactggaatatttccactctttgtatgtgaaatcctgaggcaggattggacatcgggctatgacgttccctgcatgtgcagaattccacttctgaaaaagagatactccagtaaaagtcatgagattaatcagtggctactgccactagcttagcttagcagcgcttttgtctttaagctgtggctaggctatgacgcgaggcctaaccctgattagaggttcggacactaacacggtcggccatgataatctgttccgagcctctgtgatttctgtatcctgaagcatcacttccttttgtttcaatcggttcatttgcagatgtaggtagtttcagtctcgttgcagaacctttccccctcggatgaacatacaaaagcctataatgcgtcctcggagacctaagcttacaaaaaattgcaagttgcatactgcccgctgccctcatatatgcgaatatgcgatagattgtccaattgaaaagacattttttttcgaagatacattggagatttggagataggcgcatagcttaattagcatggagccaaagaaattttcagagcctgggcaagttgtcattcattgtacatagatgcatcgtaccaagattttgaatacatgtttcactgaaaattccggtgttgcaaagtgaatgtagctattctcaactgtgtagatttttttagtgggatctgtccatccggattcaactcctacatttagcataaacacgtagggatagtatgtatgcataccttatgagggtgtgcacagtgtgcatgtgagtgcaaaagaatattgccgcttttttcttagcactacgtcattgatactaagggctcattctaaactacggtttggataagctaataccttgatttcgttagcaagtttttcaaactaataaacaacatgtttcgtgtgaaaacttcctatatagaaattacttttaaaataatcaaataaattcattttgcaaatttttaataattagtattcaataaatcatatactaatgctcctcgctttacatgcaactaataatcaaaaaccaactcctcaaaggtttcgtggtgttcttttctcctgatgaagataagataaagtgttttacataaaacaaggttgtattaacatatgattaattgagttttaattattacaaattaaaaaaatagattaatctgatattttaaagcaactttcatatataaaatttttccacgaaacgtaccgtttagcagcttaaaaaatatgccactgagtatccaaattttcatccacttttttcaaaaccggttaccgacggccgacggggttaccatgctgtctcacaaaggcgtgagctaactaacttctttgtcaatccgacaaccgcgcatgcgcggccggctcatccattccccagctcaccgccgtccccacccctcccgttccgttcctaaacacaacacaacaccacggtggccccccaccacggccggccgaaaaaccagctcgccgccgccgcccggccagccggagtggcgtgcaagcgacggctttcccctctccgccgcagcaaaatcctggccgtaacagcagtagtgcagtacagtgcacactccagtatggcccaaacagcaacctgggcctcctcatgacgtctactctctctgtcccataatatagcagcctagtactggatgtgacattttatagtacaatgaatctagacatcctcctgtccagattcattatactatgaaatatcccatccgatactaggttgctatattatgggacggagggagtattcatttgattgggccatgctcctgggtagacctggtccaccgccctggtccatgaaccatgatgcttttgcacagccaacaagagaataaagttttttttttttttagatcagcaggagaataaagttggcatggatgaagggaaagaagtagtaaaagaagaggaaaggcagaaggaaaagggaaaggatagttccactcttaaaaaccctaatgatgaggaataagtgggcttatgagataaacaaatggctaaggccactttcagttgtgtgacttgtgtcttagctttgggacaaaagaaaattagagagagaaatgttttggtcccacgttgttgagagtatttaattagtgatggaggaccatggtttggaatatatagttgcaaaacattggttgtaatgaaagagatctcacttagtacaggcctttgtgatctgccaaaaatatttttcagatgtcatttgcgaatttggtactatgtttaatttttttgcagagtggccgcgctgataatcattggttatgcttagtgagttcggatgatgataaagaaggtttaaacaaagacaaaataatatagcattacattttcataacaaggacaatcatgattcggaaatgggaatctactaattaaaggttccatccgttaggtttggtacatcaaaatctctgtagtttattgcaggttatcttcaagtgagtaaaccttcagtcttcttgctcccaattaaaagaagatgcagaaaaaggcgatatatgtatcttaccatctggtttacttcgctatcacttgttcatagtttaggacaaatacgaccaagtactaatttggttatcttttcttttttttgaaagaactcagcaagctggttttatattatagaagaagtgagagaaactgtacagaacagaaggcaggggagacgttcccggaggaattcttcctgcctgcactccctaaaaaacaaaagcctaatctcttaatataatacacttcactcccttggcacctgccatttcccacaaacgaagctcatctatgatcttgctagcaagtgccgatggtgtagattctttccctctgaagatgcgattattcctttccatccaaatctcccaaagcgtggtcaagactgctgaacgtagccctttctgttgcaacttttctgcctcatctgtttgctcgcgctgccaattgaggagagtgttgtctgtggtcacatgtaggaaacattgcggtctgaatttgcgaccaatgtcccgccatacctgctgcatgaaggggcactccatgaagaggtgctataccgtttcgagatttctgaaacagagttggcagaaatagttatttggccagcccctgcattgcaaacgatctgccgtccatattctattttgtgccagcagccacgcgaagaatttgtgtttccctggtgcccaagtttccatacaagctcagcagaatccgaaaacgttttgcccatgaactgcatgacatatgctgattttgccgtatacaagccactggccgaccacctccagaggattgtgtcctcagccccttcatggatcacctctcctgcgttgtggagcacttcccatacgcatatatattcctgaagcagctgtattgtcacccctccgcggatgtcttcgatccaagcatcattagttattgcctcaagaaccgacctgtttttccttttggagtgtttgaagaggtttggggctaggtatttcagcggctgatctcctatccagttggattcccaaaatttcgcctttcgtccatctccgaccgatactttggtggcagcagcaaacagagcacgatcggtgtcatcacagggcggcggggttcctatccatgtttttttccgggcttgtccactcataccagagccaacgtagcctcagcgatcgtgagaacttctccaaacaaggtatgcccaatccaccatgtattgtcggagaacatacttgctgccaattcactttacattttccgcccaaactttcttggtctccggcccaaagaaattttcgttgcgctttgtcaacatcatttaggaatccttttggtggtttaagaacggtcagcaagtaggttggaatggcattgagaactgattgcacaagaaccttccgcccgctttgataaaccagcttgtttttccagccccccatccttgctctgattttgtccattaccggctgcaaatggacccgctttaacttccccgtagtaagaggcagtccaaggtaggtttggggaaaagcacccagctgcccatcgaagttttgagaaatatcttggagatctatgtcgttgcatcgaattggcgtgattgaactctttgttgtgtttacctgcaggcccgtggcatccccgaatttgttcaggattcccaatagggtttgcacttcttggcgtgaaggatttaggaacactgctgcatcatctgcatagagagaggttctgaattttagtgcccgcggggctacgcttgactaatttggttatcatttcaaaagaacagaaatgaatggagataagttaaaagtagaatgtttatctcacaactgacactaaaactgttacttattttggttggccatgagttgtaattcctccatagtattatacttgctctgagatgctcttcaatgagctaataaagtgttccgacggcaaaacactatcttcagtagacagtgacacttaactgaaaattattgagcatccttgtaactggccgtcagctactagtattatatactggactaaggtaaggtgaacgcataaaagtgcatagtattttttaagatgcatgaatttattagccatcagccaatgaaccaaagtttcagcatagattagcaaagacattatgaattagtcctgaagcacacagacgtgaaatgtctcacaaacagatagtacagcagcatcagtgcatcacaccaatgtttaccagattgatatattaagccccccccaagtgatcagtaatactgtacacaccttgacacccttcaaattacatgaaacccaagaaagtaattaacacaagccaaactatgcatgcatggatggatggattacgtacaattaattgcaaacatcaagatgatttcttctctcattttttcttttcgattttgctccatgatagtatgatccatggtcagactctgagcaggtagatgctgagctccgggccgccgctgccgtcagggttcatcatgtagaacgcctccgagtccctcgacccgaccacccgctcgaacctcgcgcgcatgtacatcaggtcgccctcctcggcggcggcggcggcggcggcgtcgtcggggagaacgccggcgccgacggacaccggctcgacggcgccaagaaccctccactcgtcggcgccgcactccctgcgcaccgcgaagccgcactttcggccgttgcagtaggcccgccacgtcggctcctccagcagcgcccgccgcttctcgcctgtacatggtgcaacgcaacgaacgtcgccggtggccgacaggccggccgtcgtggtgttagtgctcgccggcgctgaagaggatgaaggttgattaattcgtgtgtgtgcgtgtgtgtgtacctgggttgattggttgcttctcgcactcgagcgcgaggcggacgaggccggaggacatctccctgacgagcgcgccggtggagtaggcggccatctccaccagcagcaccggcggcgagcgggtgtccgtctgcagcgcgacgtgaacgcggccgcggcgccgcccgaagatggtgcccgtcaggctcgaccccagctgccgccgccgccgccggtgcgtgatcgccgccaggaacgccgcccgcagcctcgccagcgcgtccgcgcgcttcctcgacgacgacgacgactgcacctcagcaggctccgcggacgacgtcgcggagaaccgcgcggccctcgtcgtcgtccccatccccgccgcctcatctccacctccctccctctcctgtccacctcgccgctgcggcgacggcggcttggcgcccagccgcttcctgctcagccacgggaagttcccgcctccgcctccgccggtgccaccgctcgccgcggccgccctggagctggaggacggcagcggcagcggcgaggccgcgcggaacgctctcgccatggcaagccacacctccaaagcaaccaagcaagctaagctagctagctctccctcgacttgtcccctgcgcgcgcgcgcgtgcgtcccgttaataatgggcttttgctgctggctccaagcccaccagtatttggtagggggtttttaagcgggttagaacaggtacaatagcagactataagctagctgtaaacatagtttaagaagataaataagaagagagaaaaacatcgggctatagatttgtagccagctatagcacagactttaagatgcagggtgtgtatgacaggtgagaccaggtattaatagtgtattatataaatattgtatgaatgagttattagattagctgtatatgaattggagttagtaggtggctataatattaaacttgctcttagccgagcagcgcgtctcgctctcgctcccgcgcttttgcaggtggctcgcggccgcgcgcgtgcgctgtcgggtgttgttgggggggggggggggggggg

SEQ ID NO: 9869 - DNA, 17459 bp, Oryza sativa
ttccgtggattcagcttctttggattcagattccgaagagtcagttttctctttgttagcagactcttcttccttgggaggtttcttttctatcttgggttttggtttaggtatcctattgacactagaaacctgcagacaaagatgaatccccaatgttttgagagcggtgaaacatgtgcatattattctagaatcttaatatgaacttcctaaccttatcttgtaggtccagaactttttcgtagacttcttcagatgtgaaagcaggtggactgtagacaggggtgctgcaatatgataaatgggagttagacacatatacacatttaaatgtagaactcgcgaaattgtgttggctctagactcagcataccttttctgtatggcttccttctcctccaaccaagtttttactttctctgcttcacttacaacctagacccagatagcatcacaaccaataaaatgagaatcacatcataaccagaatgaatttatcgaacttcattaagctcactggtttacctcatctaccctcttttttggaagccacggtttgttcgagtcccagttcttaacaatctgcaagaccagaaagtgttacagatgagaatagagtagcacaacaatcatgaagttgagcagcaacaaaaacattgtttggtcttctgtatagataccttttgcaactcagcaagatacaatctagcattttcacaagccgttggccgggcttttagctcactcaatctgggcaataaagaaaaaaaaaatcaatgtcagtcaatgacctatatgaacctaagtggatacagagcaagttacctgaaaagaattgggtcaccgatggccttaagttggtcaaggcgttccttgaattcatttgcttgagcatcttcaccatccatatacaaccaatcttgtacctgcacttaaacaatctcagcatgaggattcaacagacaaatgaaacccaccagaagattattattgaacagacctcattaagtttctctgcaaaagattccctctcctgttcagttgagacggtcaaaatttctgtgttctcttccagctgtgatgtgccaaataacagaaaacaagtagtcaacaaacataagtatagcacctagtaaataataactgtgctaaacgttatgaaacttttctgtgtttttctagatttatgtagacaatggagttcctattatcagtgcaaagctgaagttctgaggaatataataccctcaaagatttcagatatatcaagaaacaagaggggtcatgtgaatggcagtaacatgttttatgctattaacactgaaggtagaagagaacagaaggtaccttctccttcatagagtatatgtaagactccaggttatttttcagttcagcagttctcctcctttcagcatccttcttatcaagcgcctctaacctagtttttgcttcagaatacaactccttcgaaagaattgatccagcaccagccatcttttccacaacctgccattggacaacatatttattaagtcatgttctgtcaatattaacaccagatttatgaccttctatctttacctttaacgggaccctgaatgttcttttcttgagcaccttctctgtaacaatatcttgtgcattactctcatctattggagcactggacttatttgcatccccatcagaactcacattctccttactgtcagatgtgtcattagctgctcctccttccgaagacaaagtctgactggtggaattactctctagagttaaattcttctttggaacttcaacccattcagttatctcaatcactgcttctgccctatcaagagaaataattccgctcctactcaaagaaaaatgtagatttgccttgatgggtgcagataaattgcggctactgtacctgtttgaaataaccacatggttaaattcatgcagtgaaattaaacacatacaaattgccaatggcaatggtgttgagatattatttagaaatagaataaacatatgtactgcagcctcgaagatggaatgttccgcccccaaaaaaatagcagttgaaataaaggtactctatgttcagcttgttataagcagtaccatgacacaaaaaaagtacataagatgatatgcattatgcatgcttacttttcgcttgcatctgtcaggcctgatacagaatactccacaaatttgtgtgatgtaacacctggaggcagttcagaagctttttcatagctgatagaaacatcgaagtctttagtatgtctaatggacctgaacatctgtagacaacaaaacaattgcaagctagattattttttaaaaaaaacttttttttttgcatataatcaaaaggaaacaagaaaggtgcattataaccttaattcccaattttttcatccttggcaccagtaattgatcagtgctttcatctttgacataatctgggccatttatttcaaacacaaaaccataagtagaaccatcaatcatccctaacttacggttcaacttaattccatcacttaagttagctgcatgcagtgaggcacccagaacaattgcttcatctgcatcaagatgcttatccaggtcacttcttcccaggaattcctgcagcttagcctgtaccaggagaatggaattttattacaaaaataacaaggtgaatgatggaagcacaactgtttcagaagtacagttaagtcatctgcatagtaggttaccgtggttaacaaatgcctttgagatatgatagcaaatttttaagatgttaactaaaagtaatggattgtattaaacttatgatgagaatcaagtgacaagagagaaataaaaacatggcagtcatgtgcctgaatgccattagagccccacaatacaaggtcaaacataaaaacgagttcagtttaatcacctgcaattttggtactcgagtagctcctcctattaattctacagcatagatatcatcaatcttcattccagaatgtgcaagcacttctttaactggagttagagcctgctcccataattcttcacaaagttcttcaaatttttcacgtgtaatggtactcctgtaacaagaagcgaccattaattcaacaagtagaacctagaaaattgtcctgactcctgatcatgatttaaaactagaaaaagtttactttgtacagaaagaaatcaagaaaagatgaaaggaaggcagaacatcaaccattatagaacaatacagtaaggaagaagggtcgactatgcttgcaaagtattaatattggcaactactgtatagattaagaagccagtgtgtttcactatcttccaggttccgatgttccgtgcaatcaatggatatgcaaagtattaatattggtacctactgtatagattaagaagccagtgtgtttcactatcttccaggttccgatgttctgtacaatcaatggatatgcaaagtattaatattggcaactactgtatagattaagaagccagtgtgtttcactatcttccaggttccgacgttccgtacaatcaatggatatgcaacaaaggccaatgcagaacatcaatggagtagctacacttcaggccacagtaaacaacctttgtagctcttaacgaatttgttctaatggaattgcattcatgtaattcaaagataacaaggtgattgatttaattgaaacaccggtcaggtcattttagcagataagagacaaagcaccagccacctagcatgcatgctactccagcatagtaagttgctatgcaagaatttgccaggctgacaagcatctctaattttcaacaaagtttcaattgttcataaccaattaaactcgagagcgttatcttgaaggcttgaacagagaatccaaaaatgttaagtaaatttccatttatgaatttataaatatcggtccatattacatgtgtgaagattatgcaagtggtgaggacgcacctgaaatcgagatcattatatagtgattcaactgaaattggagcagcagtatttgcactcagaatttctttggtacgcttaacttgcttcttcaacttagccatcgccttgggagactggcggatatcaactccattaccgagttgtttattaaattgatcagcaaaatagtttaccaggcgcatttccatttcaaggcctccaagtttggagtcccatctaacatccttaacctgtagataattagctgaagaaattagtaatagattctggcattctgtatctctgtaatgtaggcatttagcaagctcaatttttcatatatttgtcagatcttccatcgcttaggcatgtgaaagatgatgtaaaaaaaggggttttcagtggacttttgagtaagcatacgacggacaaaattgaacaactaaaagaccttgggcaagatcgaattgtacctggaactggttcaccgataccgtcttcccaaactccttggccttgtaagctgagtagtacaccagcgcggcgtaggtactacctgcgcccatgtcatagaagataacatgcctcgactcgttcgagaaatccttgtcgatcccgtactgcaacgctgccccggcgtgctcattgatgagcgcgaggacgttaactccggcaagctgcgccgcctgcgtcaaggcccggcgttcggcctgcccaaagtagggcggaacggcgacgacggcgtcacgcacaggagcgccgacgtgcgcatccgcgagcccagcggcgtagtggagcaccatcgcgacgatctcctcgacggtgtagacctgcccgtcgtccgcgcggaccgcggcggcgccgcgcgcgtcggggacgaggtcgtaggggaggaagagcgcctccgcgacggaccgcacgtaggggaagggcttcgcgaggaggtcccgcgcgcgggcgaacaccttggacgggtggcgcgcggtgatgccggacgcctcctcgccggcgagccggttgccgtcggcgagcgcggcgagcgccggggacttgcgcttcgacatctcgttgatggccaccgcgatcgggacgcgtccgggggcgaggtgcacggcggccaccttgagccactccgaccccaggtcgatgctcgccaccgccgcctccgccggcgggacgaggacgacggcggcggccgcgacgaccgcggcgaggaggaggaggagacccgatgtgcggggcggcgccatgacgagcggcggctagtagaatggcatgcggggtgggggggttagggtttggagatctgggactagtgtggcggatgcagcacacacggtggaaggggagaggagagagcagcgaaggaggggagggggagaacgatctcgacggggaggaggaggaggagaagggcgtgtgctatatttgcaatttttgtgattgtttttcttgcgttcggagttttttcgattatgaccctgaaaggttttttctgatttcgagttgtgcgttgctgctgaaggtgctttggattcttggtgaatatgtagaaaaaattgagggctcatgtgaaaaaggtgagaagaagaccgtggcaggaacgtcacgaattgagtcaccagtccaatgaaaatacgacacgtggaaaaagatccacatggcacgccttggctagcgtggtgcgctggaagagcgagaggagcgtgtgctagaccgcacgtggaagtctcgtgcggcgactaccgagtttatcgagcgtcacgtcacatcaaacatgccagtaccgtcatggcgggaagcttgtacagtaaaaacgtaggagtagtgctagtgtgtttgtgcagtttaaactgtgccatgataaataaggaaatcattcaaattggcgaaagcatttttgggatgataatgaaattatgttactgatttttttttcatctatcactggtcaggtattgctaaaaaaagtgtttgataaaatactactagtagtaacttgcaatcttgccagcatctgaaaaaggattgttcacctgcaccgcacaagccagaatgcaaaagctttgcccaatgagcactacaacgctgttcagtgtcacactctcactgcactgtctgctcagtaaagatcacaggtcaatctccaagaatgcacagcggttgtctcatgctgagctcaacttttagtcctggaaattgtgcaaggtcgttgcttgttcccaaaacgttctgccacaaaaaagctacttttaaaaacatgaacaaataagttatatactacagtgatagaagagttgtctgatcattaatagcaacacgaattggggtttagcaaatgaacttacaagtgcagcaagatgagcttcttgtagaatactgccatcaatctccagtctagctattggaaactctggaagatgccctgactgtttcttgccgagtagatcaccagggccacgcagtagcaggtcggcgttagccaagtagaatccatcggatgacttctcaagcaccttcaaccttggcagcgcgctaggagtggagcataggaacacacatctggatttcctttcgccacgccctacccgaccccttaactggtgcagctgagacattccaaatctctcagcattcatgacaaccatcatggaagcatcaggaacatcgactccaatctcaatcacttgtgttgagaggagaatacgtgtttccccggatctaaaactgctgagggctccatccttctcatcgctcctcatgcgaccgtgcaacagcccacagggataaccttcaaatttttgctttatggaatcaaactcggcttttgctgcatgaagttgtggtagctgctctgattcttctatgataggatatacgaggtagaccttgcctccatcaaccagttcatcactcatcatcttcaagccataagtatttaaaaatgataagcaaattgatcccaaccatatccaagtgcagattgggacagaaaaggaaaacaacaaagatctgaaacaaaaagaaaaaatattgaatgaagtcatgtcatcacctggaagacagattcaaaaccagcatcatttccttcaagagcaagagtttctataggttgtcttcctggaggcaagtccgtgatctataagaaacgtggatcacaattgtaaagatttgaaatagctgtgaaaaatgaaagaccctactagttgttaaagtaacaggtcctggaacatgaaaaatgaaaaatgcaagaacatttttgcactatatcctatccaatatgtgaagtcataaagtagcggatcctggaaaacaacagggtggactactagttgttaaagatataattgtgctagcctagaattagtccctcgatgtatgtagttttcaccctgtgccccacatagtacgcgatatgacattttacttccaatgagtaagtatttggaatactcaatttaggctatgttcttttcttcaactcaaaacttcaacttcctcgttttctgttagcatgttttttaaactattaaatgctgtgtttttataaaagttttctatataggagttgtttaaaaaatcaaagaaaaccatttttcaagtttataatagttaaaacttaattaatcatgtactaatgagctttctcgtttggcgtgtgcagaaaatcaactaccaaacagaagaaacgaacgaagccttatatgccataagcctgtaaaatacctgtgtaagggacatgtccccatacagagcaagagccaacgttcttgggattggagtagcggacatagcaagaacatggggagccataaatatttcagaagcggaattctcgtctgagattgtatcatcatcactcgatttcgtggaaggggtatatagctgtaatgaatggcagtaatttgtattaacaaacaaatgttaactatgttaaatttgaaaccaaaataagaaagacatgaattatgcaacgaggtttggatatcaaatactcaagtgtaagtaccagatacattatcttttgttttggacaattaggcagccttgagaactacagcacactccttgaaggctttcaccatagcattttatataatcactagcatattacccattgaattgggatttttattaaataaaattatcattaacccgttattaccatcattttctgcaatgatatgctagctattgtaataacagcaagaatagcaaattgtaatgatgggtcattttctgcagtgatatgctagtttgtaagaacagaaagaagaaaaaagtcagtaggaacgctctggcccatcttaccacaaaataagatacacgaacatggaaatccagaggcatacttcttactccctaagccccaaaatataagcacttctagagtttttcatggagattaaggagagaggtgaaattaaatgagagatggttaggattggttttgatgaggaagtaggtggggaaattaaatgagagatggttgtgattggttcagatgatgaagtacatggagaagttgctatgttttgggacaaattttgaacgctaaaagctgctatgttttaggatggaaggagtagtaattagcaattttctttctaagtttgccaacaaagtttacagaatgggtgacaatcctggagcaaagtaagtaaacgaaggatgtgtgtgattttattcaacaacaaggtttacagaatgagtgacaatgcaggagcaaagtaacagtcaaaaagtccccgcaaaaaaagtaacagtcaaaaaggacgtgtatggtttttattcaatgtaaatagcaaatgctcagcaaattaccttactattaaaccttcctctttgaacaacaccaaagcgctgctgctcatctataacagagatgcgcaaagctgagaattcggttttatcaccaattaagctgtgtgttccaatgaccattgctatttctcctgtcttgagaccctgccatagaataacaataacacataaatatatgaatctatgcgtatgggaacttgagagtctagaaagaatgcttgcatttcgaataatccttgattccctcgtggaagttgaaccagttagtaaagcaatgtttggtttgcattcatctccatcaaacttctccagcaatgaagttagatgttcataatgctggagggcaagaacctccgttggaaccatgaaagcagcctagaaataattttacaaggtatatgttagactaacatctcattaatgaagaactgaagagtacaactaggaggaagataatcatttttcgtgtatatcctatttggattaagcatctagtttgcttcagtaagctgtccttttagttgataaaatccttttatatacagtacataaggcaaggatgttggtttgtagtatagatacctgaaatcctgagctaatgacctccatgcatgcaaggaaagcaactacggttttaccacaaccaacatcaccctgtcaaagaaagaaggctttcaagtcttcagcaagatgcatataagccccaatagttgttatttgaagaacaccaattatatataaaaaggaaaacagaatcattaattcactatgtaataccacagccagaacctgtaacttggtacttaagattttcttcccccatatgaggtatacccccatgttccatttccccaagaaaaatggaatgctacatccagtcaattgcaagtttcttgtccacgaacttggtgcttaagaatggtagaaaatagtttggttcaaatatttttgcttaagatcgaaacatttgaaataaactggccaaaataaaacaacgcaatagtagaccagtgatattagagccaagatatactagagttgattacagaggagcatcaagcaactgactggtaaacaagtccagactccagaaacaagagcaagaaagttaatgaaccaagaaatgtgcaattaatagttacttgcaagagtctgttcataggaactggtcttctgagatcccatataatctctttaacagcattcaattgactaggagtaagcaaataaggaagaacttttaacaatttccttgcaagaggagaccactcgtcagcaccaacagcatttagctcatgatttttgcacttcaataacaattcttccttctcaacccgtgtaccaacagcttcaagcatttgaaacagtcttcccaactgaaaaacgatgataaatgtttccatcattgcatatgcttaattgcacacttaaaaacaagatgcgataatatgaacttgaaggacatgacatttgcgcaaatcgatatccatgtttaagcaaaacaaaaatattgcttgctgacaagcatataaatgataacaaaaataatacccaggaaatgcactcctgtatagatgccatcaccgttggagttgtactttgaagattgctaaaaatgctgaaacccccaccccactgccacacatgcgagtgcccgcccatccattcaccccccccccacacacccacacacacccacacacaacaaaattaaatacacagcactgaaaaggaagaccatctgaagggagaggggtggtgatatatactgttactgactcatatgactgtgctacttctactgttatgtcaagaaagaaatatatggtaatacctgaagataaaagaaatcatcgaaaataagccttctccgagcaaaatcggcttcatctcgattcttaggcttgtggattcccatgtaagcctaacaaccaaaacgaatattgaggacagcatttaggagggcatacagatcacatgatgatgacatcatataacagaaattcaaacagatagaatgaagctatatcttgtaatagtcaacaaagagtacatgaacatgttggcacgtatatccagtgattttaatatattagcacacacgtgtgattaccacacagatatccaatagcaagaagaaaaaatccgacagtccatccatctctaggttccacttgtatgagtagcatttagtaagggaactataattagatggtttgctcacatcaaagagattgggcaagttgaattcacaagaacttcatgaggcatagggtcaatgtctggcgtcagcatcttcaaggccctgtgcacaattgtaaactattattactcctacatattcagatggaaaataataatatcgaactacatgcatttcatattaagttaaggtgatttactctttatcctttgggctttgcagtcatcccttaagtatcatcataatttaaattacttaggtacaatttagctgaatcatattttaggaatggggaatcggcatctttcaactatgatcactttaaaatagctgtgaacttagaggaacatcacttagggcccaccgactcagctttcatttagaaactagaaaagcacacaagctttgcactgaccttgagatggagaggctcagcaaacttggtttcaatcctgcttttgatgggtatataggatatggtttcctgtcaagcagggtgcattgttgttcctcttcttcaagcatgtcaatagtgtactctctcaaatcataatggtctttagtaagcgccttcttgatctgtgcaaacaaaatcagctaagcttaataatcacatataggctgtgaggctacaaagtgcagtccattacatgcataagtgaaaacatctgtatagcagagctacttttatgtcattgtaaagcaaatgtgcggctgcaccaacacaaattttaggattacaattattttgtagtgaagcatcaccaacaaataaagacaaattgaaaggtctgacaagcagcatgtaacaggaaaaggtatgttagttcaccaaccttaccgctgacataagcaagatccccctctttgtacttcgatgatatacacttaagaaaagatggagaagagaagcgtgtgccgctgaaaaatttcttgaggtgcaaatgaattgtcttcttttgttctgcttgagagttacaactcttaactgaagagcttaactcactctcgattattgaacaactaacaacaacctcaaggtaacctaaagtgtgcttaagtctggctcccctgagaaaacaaacgataattattgtttagagtacaggtttttggcgtatgaaaatgacctagccaagtttgttatacgaaaatttttcataatatacatttatgtaactacatttgggtttatgcaaaagaattaagtggtcaaagttacatcttactgactttgaaaattccaatatggcaatcttttgtgactggagggagtaccatttcaattggactcatagtgcttaattatgtttttcagtaatcagtctttctttgcagggaataatcagccaatctatgaattgaatatttttaactaataattttgaacctaaccatttcgctcacacacatgaacataacttttctatgtgttcacaacatccacagtaaaacgtccttttaatagcatcgaaaattgtaccacaatatactgaatgccaccacatgagcaagatcaaagaaatgggggaaacttttacaaacatgctataacacaagcactgtcatatcacagcagtcaagagagtgaaaagacaattctataccaactccaacaaataggatcaaggccagcagttggagcaagggaacgtatcccatgcacacaagcttacggtgcacactccgtcacaccaactaacaaatgtcaccaaattttctaaaaaatatatatacatgtacctccaatagtatttcatatacctgtaaagtataaagttcaaattcattatattctagccataacgaaaagaaaagaaaaatctgatagttttaagagtatatatctgtcagaattttgtcttttatgttacggctaaaatatattgaatttgaagatgagactttgcatataggtgtaatactattggaagtacgtgcacatttttttccagaagttttggtgacatttgttagttggtgtgcacggcgcagtatacataggatatgttcccttggactggagcaagactaattgaaatattaacttatactccccaaatgatcccagcaggggcatcggtcacatgaatatttagaaataataataagatcatcttaaaagatccatgattttaacagaatcttcttgtcccccagcagactcaaatttactctataaactcatttctgactaattcccctacaaactccagaaattgtagtaatggtaggtcttcatttaaattttacagggttaagagaattgactatataaatacccattccactcctccaaactatactgcccttctgtacaaatttcatggattattatgaccaaacgttgagtgtggccctagtgtcattgtgataggatggcacatcccatatcaattcttctttattatcggattaagaattttactcaacaagaatgatctgatattaaataccactaacaatccgagggcatcaattcaaataaggaaatgatatccttcacatgccaaaagatttttatggaaagactaagctcgggagatgccacataattaacatatggcaagtttaatgccgaagaagaagacagtggaaaacatcatatttctgattattcaattacctggaagatacaacggttccaaacagcatgatgtactgcccctcttctattgaaccttgaggattttgtagatctgcataggtccggggaaaatgctgcaacaatttccgtacctgcagagaagaaatatattgcatgctaagaattctatcaaatcaaaagaaaaaaaaaatactgaagcgtatctgctgctagtaccgtatggaaaccaccatcctctagctggcgatattgcctactagttgttccgggaaaacatcttatacttctgtccaagatgctagaatcagaaactgtagcatctgccactgccaatgactctggacaagcatcggtatcaactgccggttcaagagaaacaaactgtgctgtgagagaactctcttcactgattgataggtgatcgacgtttgtaagggttggatctaatggatggcatttgtcagaaaactcataagctgccccaaaatttccaccggactctcgcatgaaattcgtgaggttttcagaaagcacagtttctttctgactcatgctagcagcagcagcatatagttcaataggtgatgaatcaccaatttttatgcatggaaactttgcacacatttctgggaactcaatttctttgcatacactgatcaattctgtagcagatcctctgcgggctctttcttgctcaattaattcttgtgtattactataacccatcaaaacagacacctgcaatcataaataatccagacaatgttcactgttcacagcaagtacagatgaatagttgtgtgacattattagtgaagagtggcatcaagcagagagccgtgcaaatcaaatccagacgtcattaagtagagctattgcataggcttaaactataaaggtcataacatcaaggaagttaatgtacaagtatatgcgcattgtatttaaacaaggttactatgcactagtttgaactcacaacaataattagaggacttgggaaatataaatagctttcacttggtagagcccaaatggtggaacgattgaacagatgaaacatacagaactaaactcattactgatgcctgcaaaatcgaaggctaacactaacaagtgaacacaaccagttgctggcagggcacatactttgttcaggagttttgatctctctgacgtgccatccacctccaacagcttcctgacggacgtgtgattctcgcgcgaacaccaccggaagagcttagagccaagagcattgctagacctgcaacctgaacagttcagtgctagttgctaactcgctattctagccacaagcacaaattgcccacaaggggaggggaacctaacaaaatcaatacctcattctggaaggaatccttctagagcgccctctgcgaaaatccaaagaaaacaccctcgctaattgattggtgtgaccctgaagaagtgaagcgacctcatttcagataaggaagggggatagtatgtgaagagaaacgacatacgcccataccttaatccatgattgcgctgaggaggaggcgatcatgggtgcggccagcgaggagagaaccttcccgattcgccgcagcgctcagttcatccaccgcggagacgaacaccatcaaacaccaccagagcacgagcaggtgcccaacactaatggagcgctccgggttaccaatggaaggcggcggcgaaggggcgggagtgggagggaggcggggtagaggcaaggcagcgggagagagagagagagagagacgaagcgcgagaacctaacgtggagcggggacacgcgagagcctcgccggaccgcgcgcgccttccggggacggcagcggcggaggtgaggtcgtctttcccccctctcgtggaggcgagtggagtggaggccctcaccggcggcgcgggcggtgcagtgccgtcgccgtcgccggaaaaggggacggaggccgtacgtggtgggggtttgggtaggggacaagaggggagcgcagaagagtcggagacgatggaatggagtttccgcaagttgggctggctcctgctggcccaggataaggtggtcgagttccggttaggcccataggaatccaggcccattcatagatggattggttgcgacccaaagaggcccacaaaaatttgttgagaaaatccaaaaaaaatatcgggcctgttcagattgtagccaaaataaacattacctaattttggtataattttggcatgatttcttatgtatttagcaaatttggcaacaaactaaacatagacatttttttggcaatttttttaaaaaaatgatatggttaaaaatggcaacaaagtgaacaggcccatcattgacaaacttctaattgcaagaaatataatcgacatgtgctagttccatgaaatgtcatcgtacaagtgactttatcttagaaataccattatctgtatggtttcattagcaaacctccattaagtgctataggatgaattgtgcattaaacgggatggaattgatggaaccctagcaaagaaggtatttctaagaaatgtcacttgcacgatgttattttgtgaaattcgcactactcgatgacattttttagatttggatatttgccagtggcattatttttgtttttgtcatatttgattggttgcagccctacattcaagttgggcatccgattttggatgcaatatatcgaatttggatttttctggcaacctggttgctgaatcatgacagccattgtgtcttcagactttcaaactcgattcaaatagattgtttcttgtggatttcgaatagacagtatattggctaaagtttacactgacttgtggatttcgaatagacagtatattggctaaagtttacactgagtaaaacggactgatttttgtgctgttgatcgattctgattctgcaatgtgccacagaacagaagttctgacgatactgttatatagatccaagtgaccgggctacaggatagaccatttgacaaaaaaataaatccaatcacaagtgctacagggcgtaggcaacaacaccgaacaacgcgacaagcagcagcaacacgtagaggcgtgacacggccggcgggccgccggcgtcgctgaacctcgcgtactcggccgcgagcggcatgtcgtcgacggggagcgagcacgccgccggcccatccgccgccgccgcgacgcccgcggcggacgcctcgtcggcggccatcagcgcctggatcacggcggtggccgccgcgccgtaccgcgtggcgttccgctgcagcagccacatgatccccatcagctggcactctcgttcgcccgtcacgccggcgccgccctgctgctgcttcttcttcgccgccgctgccgccgccgcggcggcgccgccagagccggcctttatctgcggcatcaccaggctcgcgtcagacagaatgaacagtaatggcatttactagttccgtggtactgttaacccacaattaatggacaccaaccggacgaagtaaaacaacaaaaaaaaattactacagtaaaatttaccttacgctacagacattcttgaagtcatgaacacagaattatgacaagtgacagcccgagcctgagctctctgctttctactgttggcacacatggccttctacgtgccatgcatgttacgacgcattaagatctttggaagaacctatcagtaccaatccatatagagcactgccccaaacaaaaaaaaaagacaaattttgtacgtacactagtaacactactataccattttagatgatatagtatacgctagtagagttctagtggagtatcactactatactaagggggtg

SEQ ID NO: 9870 - DNA, 29213 bp, Oryza sativa
atatgcacatgtttcaccgctctcaaaacattggggattcatctttgtctgcaggtttctagtgtcaataggatacctaaaccaaaacccaagatagaaaagaaacctcccaaggaagaagagtctgctaacaaagagaaaactgactcttcggaatctgaatccaaagaagctgaatccacggaaacatcgtcggaatcagctgcccctgaagagagtcagtctgaaccacaaaagactgacgatttagaacctgaagctcatgatgagttgtgattattagcgtgaaccttggcaccccgtaggatttgttgggatgatactgatactccaagaaggcactttgtcagaggcaaaattttggttgctcaaattttctcatttgtttgacggccaaaagatgaggtgtaggatttccgtatggactagatgctataggaccagcagaaaggtgatccatagcttctaatcgcagcttctaatcgctgtatagcagtattatggtctctatggcatgctgtcaaagttaatgcctcaaaggcttcgacttcacgactttgtagttgcattgtttgtatcgaactaatttgttttgatattgctgagctatagaaattttacatcgattagcagtcttatcatttctgttgtttttgagagcttccagttgaatgtgtgctggtttgcgtcatgtctatcattatatattgtgtttaaatacgtgacaccggtgaatttagttattttttggcatgcaatttttacaacaattgtaaaaataatatctaatctattctattatatggtataagtacttataaagaaaaatccacccatatgattttcacgtttccaaactaaataccttgaaaggtactattgaatttgaaagtattaaaaatctaaccaaataaagtcaacagcggtcatatatttgaatacagagagtatacctcagaaaagaaaatcattctccctccaaaaaaagaaggcaatgctgctggttgtgttaaaaaaaaaacattctcctccagaataaaaaaggcaatgatgtattagcattatatactggttgtgtcaaagtacgctgtgtacaaactcggctacatcatgtggtcatcaggagggttctaacttctaaactatcaggtcagcaggtcgtgcagtgactcgggactcgggagcgccaacatacacaggacacggtcatgcataatcgttgcttcctcttactcatgataaattcatctaaaaaagaagcatctcaagtagtatcaaactccacgatgcgagaagtaggtgcaaagaatcaccgtctcttctttcaccttaacttctttcctgttgaggtagcgcagttgttagtttctcaaccagaaatcggcaaaaataaatgcagaaacagattataaaaagcaaaccatggtgggaagatgtgaataatgtttcctgctagaagatccacgttgtcacatatcttgggactgaagatgatggtccttttcacgctgctattatccatgtcaagatctgttgacacttcccctgttgtggccaactgaaacacaagtaccatggaaacatcagtagcacaaaatgctggtaatgcaggatttgagtgcttcacaattggtcaaaatgaacaaaaaccaaacagttctttttgagagatgaaccacatacattgctcttctccatgaacaagcagcggcagattgttagctttccttccagagaccttgacaaaatctgaactgtaaccccctttggatcgcctggaaatacaacgagtagctacttcagcaatgtgtatatgcactagtgaagcttatttatgaacatgtacgtggtagtacagagctacagatgattaaggcgcacctaaataatcttgctctctgttatactgtcttaggaactcagcatgcctatctttctccatctgcagaatttgttgcatccttccataataaccagatctgccacagagatacataaaacaaataaatgtgaacaaccagagatatttaagtgatcattcggaagataattatcaggacggttatacccatatgatctcacgggcagtgtaaaacagtccatgcttgttgcattaaatacttgttgaaatatgtcagccatagtttgccccttgacatctttgttgatcaaagccaggttgttttgagcatcgtcctattgcaggataaacatatcattttgaagatcataatagagtaagtatttatatcattggttatgttaacaacctacttcctcctcgctagatgtttcaccaattacatgctccaagggattctcggtctcaagattcctctgacctagaagtgcaagtgttctcttcacagaagtagggacctttggcttttcttccttaggtctggtgtgttgatgcaactgcgttgagataatatttagagacaagctaatcgttgtctaagaactccaaataacaaaatagcgcaactaaacactaaccaaaaatggtgtcccagcagaggaggcacttctatcctgtaaactgtcaagaagttcagaaattgaaacatttgctttcttggttgaacaagcaaactctgagggcaaatcttcagtttcctccttgatattttccaactgctcagccatcatggtttcaggagctctgtttgttggcattactgatgaaacttcttgctccccaatgtatgggttttcagtcttcacattcagtgaaacagaactggatccacgtattgagaatttgagcctgtgttcaccttttctccctgtatcaatgaagaaacgataaacaactcacagtgtaaaaaaacagaaattgttatgtacgaaagctcctaaaaccgaattcctcctttatccgtaaggcaaacaagaatatacatatctatgcagtagataaataggatttatggcaacgtacttttgcctgttccagcagataggaatgatatactaggaggaactttgtgcacataggctagctcatcggcttcttccagaacttcatcccagatggttgattcatctggcaccaccattttgttttccttctctctttcttttgaagcagcacaagctaatgacagtcttgttggtgcaagaacatcctgttaatatataaaggcacatgttcagcaagcactcatacgccactgctacaagtggaaatacactattagtagttaaaacaaacttttgttaatagatgccaaatacatttgttagaaaaaagaccaaaaataaaacaaacttcttgttgtacatcttataaagtggtctggtgccaagagaaaaaaaaagaaatttggaatctctctaatttcattgaagacataagtgcatgtcctgccaacctgaagtggtgttaatgaaatttgcgggcgaaaaaaaaaggtacagcagcataacatatcacatttcacatgctgtagcaacatcagcagatgcagcacctcatcagatattgcatcctcagcagaatcagacacatgatcagagtgttgctcggattgaggaccagcgcgctgatcatcacggaagctctccataccaacgctagaaccggtccatgggcgggtctaacatgggaaactttttgggaacaaacaaactgttatcagtatcaaggttaaggcaaatttccagaacagaagctagggttaacgcaaattcgataaagaaaaaagtgcgtgggtagagagagatatgggaaagaggatgtgcgcaacggatgcggcggaagcagcgggacgaacgaggggcgcccctgctcgctcgcgggatggatggggatcggcgcaggcggcggtggcggaggatgtgctcaccagggatggatgcggcggaagcagcaggacgaacgacggcgcccctgctcgctagcggaatggatggggatcggcggcggccgggcggcgccgggcaaacgacgatgagtgacgagggtccgaaagggaaatttaactatttacccctcctacgggcaaacggcggccaagcgtctcttcatgtttttcagtaaaaagtgcttgccggtctgaccatcccggttttcattcggttatgtagaaaattgtctagtttaaccaatttttcgcgggtcaattatatcattgaactaggcattggttttgatttttttttctggttaaacgagcggaccgattctgtttaataactaggcattttgtaagtttatctagaagaatggcatatcacgagtgacggtccgtaaaagcaccaaatagttaaattccccgtcgggaatcatactcatttggatacacacaatacttctcaagttactatgcaaggtccaatcgttagagctcgcgcctgacaattaaatttacaggtaagctcgttcctaaatatttgttaaatatttgttgatgtgattttgagaatagattgttacatacatgcccgggccaacacgaaaatacatggcccatttgacaacttacacgaggatttggcaaatttatagtcattcttcttgtgcgaatgagatcaattaaggcactcatcgcacctaatcctatacttacatagttcatccccactaaatgtagttaatgctatttctctcttctcccattaagccacatcgtcccaattatttctagccttttgatgatagatctatggttcaaattgtctcttctttcttctctcataacaccatgcaatcttaattatttttagactcaaaattcataagtatcaatttgttttagttttaataattatattgaatcctatttgtacatattatgtaacttaattccccgcagcaacgcggcagggtattcatctagttaacttgattagtgtagaattaaaggaaaactaccttttctttaaggtgtttccttccataatagcaattacgctccagccaacactaaaacaaataacactcttttcccaaaagtaacatgcaagtacaatataatctaaaaaaacatatgtattttcttcttgtttttattatatcaatttcaagtagcgttgttcgagacaattttttttcaatatgtagaataaggataaaccgatctcacggggatatgtgttgcttatctcattggtgaaaaggaaaatatttttctcactaaatcaacactagttaagagagttaattaggagaaattaatctcagttggtagaatttctcagctggtagaaacagatagaggttgatatttctggaactacatcaggtggttctagcatcaactctaggggatccacaccccacgaggagtcggagttgacgtcgagtcaacgggaaaatatcctcgaggtatgccatacgacaattttctctttcttcttaggcacaattacaccaggatacttggccacctgggaatataacatatacattttctaacatttgatacattttataaaaaatattttttctttttacttatatgttattctaaattaatattttaatcaaatagataattatttgtttcatagttcctatatgacaagcacgaaaaattatgttctaagatttaaaattatagtaaaaatatatggttgaaattgtaatatatgtgattcacattatacattttgatttttttttcttggaaaatgttgcaccaaaaaatatagctagtcacgattaatattacttaccgatgtaagcagactaccaataaaaataatataatcaaatcgtttcttcatttgattcaaactaatataatcaaataatataaatttgttctttaccatagtgtaggtaaaactaaaaatttaccacattgattttattttctttgggtactttggtcctgtttttttggttggggtgtttgggggctcaatctccgccgatgcacccaaacatgcagccattcatcatcgactcatcgtcgcttattatttactttgttgaaaggttcttgcaaatttcgtagccacaggacataataagctgagtagatcaacaattgtaaagttgttcaagctgatatcgtgtcatatcggttcatattctgagcagtacgcactgtcaaatacagtgtcacagtgaagactaaatgtcagcctctgtattagctgtcttttggtaatgaattaagcacttcgatgctactacaggtgagtagcttcttgccaaccatgcaggaaatcatttgcaaaatatttaatgtgaattctctttgcacttccttcagtcggtacacgtcgttcccagaagaaactacgagtgtgcatttcttgccacaatgtacggcaatctaaccatagagtaaacttcctacttactgataaattatgacacttccttgtcaccatttatcagaacctggaaagttggaaagaaactagagaactttggagtgtgctcagctccatttgcatgacggtggagatggttttgtcagattcaagatgggttcttcttttatcagtctcaagttggatttgatagagttagctgaaagtgtgtttccctattacagccgatggagaaaaccacaaggccaatgccacaaaactgggtgtcatagagcaaattttacctagtagaaatgggagaggatccctctctttctcaaacaaaccaaaaagaaaatccttgtcaccaggatgtcatgttcatttcccaacgccacatcatgtcgaaagggagaacaaaactcaaagaaaacactggaatttctacgcaagaaacgcatgcaaaagaaaaacattaggagagtcaagtttaatttaccaaactaccttaccaaatatgtcactacattgtacacctagctttgagccaatgctttgcaacttttactgatgctatgcgcataatgttcctatagttgcagttgcaaccagaaaatcaccatcaaccgctactcagctacttgggggcaaaatgttagcttttcttcccctgttatatttaaccacaaagaagaggtaaaaatacctagtgcgccttccattttctaagtaggtgatcgtggatatgtcctttataaaccttcatcagacattgcttcagctttgacattgtggaagagctcaacttgatacatcgatcaatcatgtcttctgcatatttacatgcctcgggtaacctctcatcctttagctttgatacgagcatgttcccactctcctccaatggtggaagcccattctccaccatgcatttccacaacttgatccctgaatcccagtctcgtgtatccaagaacatacgaagcgcgagcgaacaatttgcctcattgggccagaactcgttcttgaccatctcactaaatattgccgacgcctcccggagtttcctccccttcagcaagaactggaaaaccatattgtatgtgtccgcatctggaaacactccatcaaaggtcatctcatcaaggtactcaacaatcacctcaggatgcccaagagtgccctgcagcatgatcattgtgctatacatttccttatctgggatgagtccccgccttacgacaaagtcgttccagagcaccaccgcgccgcgcaattcacgcgccttgaggtgtgcggccagtgcggcgcggaagaacttctccccaggtgagcacctctgccggtgcaagatagcaagatagtccatcgcatccattaacgctgtggaggaaccacttgaaatcagtgtagtgaggaaagaatcataggcaggaacattggcaggatcgaatccgatgacgtgccgcatctcgtcgaacacctcgcgtgcaacgtgagggtcgccggcagcctcgcagccctccagaaggatggcgtaggagtcggcgtcggggcgggtgccggcctcggcgcgcgccacggggatcgcggcgcgggcgtcgtccaggcgggaggcgcggcagagcgcggagaggagggagttgagcgccggcgtgtcgcggtccatgccgtacatcggcagctccacgaacgccctgagtggggagctggccgggttggccgccagggaggagaacacggaggcgaaggtggccagggagagcaggccctgggtccgcatggaggagacggtgtcccacatgggctcgaacaggcggttcttgccgaggaggtcgacgacgaggttccacgagtagggggagtgctggtggcggaggtgccggtgccccgcccatcggaagaaggcgacggcggcgcgcgggtgggcgtaggagaaccggagcacctgctcgacgtcggaggaggtgacgcggacgtcggcgtcgtcgagcgccgcgtcgacgtcgggtgccgaggacgccaggatctcgcataggagacggatcttcgggggcaggtcgggggcgtccctgtaggtggggaacgccggcgcggacgggtcgcgggcgcgcttcgccgccggcgaggcggcggcgaccgagtcggacggccgctttggccgctggtcaggcatcgccgccgccgccgccgcgccggggacacgagggctagtggtggaattgggggaggagagaggtggccaaagtccagaggtggggtttttgccctatcccaaagaaaagaaactttcttttctttataaacggctgaagcagcgggaggccgagggggctcgcccacacgcgcggccggagaccccggaatcccaatcggatcgcgaggaaagccactgagagagtgtggatggctccctccttgctcgcctcggcggcgagccaaatcctcgccgctccccgccggggaggccgcggccggcggcgtctggtcatcgcctgctccgccggtgccggtgctcctcccaagctggtgactttcctcgggaagggcggctccgggaagaccaccgcggccgccgtcgccgctcaggtgaaaactttctctccatcgattgcgttcgtcgttatcttgatggaaaattgtactagtttggtgtgagctcgctgtacattacttagatttattgtagtatcatttatcgatcattagccgggatgctccatgaattgaaccgagtacaatgtagcatgacattaggtaaaattaaatggcgagttcatattgccgaaatactgaatatgttctgatggttgtatcaattcctggttagttggttcatgaaagaattgcctttaacttgttcttttccacgttttagtattatgcaagtgaaggcttgaagacatgcttggtcatacagtcccaagatcccaccgcagagcaattgatgggttgtaagatcggtaactcgctgaccgagtgcgctgccaatctttccaccatgaagctggagactagtaaagtaaactactatcttgaaagtgatatcctctatgttttagctatagttatatcataaactggaatgatattctgattcatgatgctgaagaatgttgtatggttacattgtagatgctgcttgaaccccttgaccggctaaagaaagtggactcgcagatcaatcttactcaaggagtccttgaggcggtaggcaatttaactttgctgtattatgggacatgaggataaagcagtcatttggattgatgatttttcatgggataggttgtaggggaggagcttggagtcttacccggaatggactcggtctgttcagtgttagctcttcagaagctgcttaacttcttttcaactcaaaggaatagttcacaagaggaatttgatgtggtagtgtatgattgcaacaatacagaggaaattctacggctaattggtgctactgagagagcaaggtataggttttccttgctccaacttcaccttagcttcccacaggagatagtctctaaacttaatgctggtgctacacaaaagacaggtcttacttgaggtatgtgaaggatctagcagaaaagactgacataggaagactggcttctccttccgcgatgagactaatatacgattctgcaaggccaaatggtaaaactagtgaaggaagactgagttcagagttatggaatgatattgaacaacttattcaggttaattttcccgatttagttcttttgtgcagcaacctagtagatatgtgttcaactagttagctgaaatctgcttttttttttcttttagagaatatcggtttggtttgccgatccctcaaaatttgcatgcttcctcatcatggaccctagaagatcaatctctgtatcttctgcattgcgatactggggatgtacaactcaagctggtggaaatatatgtggagcatttggttataccgaacagcgtttcgaaattcaccaaggagttgcagagaagtttttgccgatgactttctcgtttctgccatttctgccaactgattcttcagcagattggagcagagtgctgaattctttgagccaaaatgcaaaagatttactgaggaatacaagcaacaaagtatacccttcagttagttttgattctgttcagaaatcggtgacccttttcatgccgggctttgataagtctgaaatcaaactatatcaagtaaggcagttaccagtactctttcttgattcaaaggagcacatcatctcagtactactcatctctattggctgttttcgacaatctgttgttttgtctgaaaaatgcagtatagaggtggatcagaactactgatagaagccggcgaccagaggcgcgtcgtaaagctgccgccggcgatgcagggcaaagttggtggcgccaagttcgtcgacaggaacctcattgttaccatccggtagcagtgcggaccagcagttgtgtaaaatctgtcagaagagacccaaactgttataataaatcggtaagttaagtcttatttagacgtactgggtctgatcgtatggcaatattcgttatttctttgttgcaaaatgtgtaaaaagagcaagatttttgcagtgtcatttacagaaaacggaataaatcagcaccaataatctgtcaaatctcccaattagcacaaattccttcagttccatgcctacagagttgccgtctgcatgcctgcgtggaatcatctgagccgtcgataacacggatctattgatccctctgcatcgctgtgttcccctaacccgttttcttcccctgcgaagaacacgctgaagaaaacgcgagaaactaccagaaaaatcgcgtgttcgcgcgctcctccctgcgagtctgcaaacacttcccgcatccggatgcaaccagacggggagaaaaaccgcaaaggaaatgtccgtacacgcgttctcgatcattctcgcgcgccaccgtgctcgcatctataaaaatgatgacgaacactcgtgcatgccaagtcggagtgaactcgcaagattcacgcgaagaagcttaggagaacatcaacaatgtctttggtgctctcgcggatgctgctcgacaggttcttccccggcgccggcggcgtcgtcgccggtgaagcccggccgccgatggactggagggagacgccggtggcgcacgtgttcgagatggacctccccgggctggccaaggaccaggtcgccgtcgaggtggtggacggccacatcctccgcgtccgcgccggcggcgaacacgaggacgccaataacgcagccaaggcggggaaggccagcggcgaggaggaggaggaaaacgacggcgtgaggtggcattgcagggagagggcggcggggaggcggcgcgcggccgtgacgcagttccggctgccggaggacgcggcggcggacgaggcgagcgcgcggatggcggacggggtgctcacggtgaccgtgccgaagcggaagggcaagaagcggcacgccggcaacggcaaggcggccggcgacgacaagccagtgtgctgccgcttctggccgtgacaccgccgaggccgcggcgcgcgccggctcgtgtgcccgcgtcgcgtcgcgttgagtcacccgcacgacacgagcctgtagtagtacatgtcaagcctacccgtcaaaaatcttgtcctttcgccattggaattgccgtgccagtatggcgcatgagtgcacttgtacaaaatataaattgggcctgtttagttccaaagtttttttctaaacttctaactttccatcgcatcaaacctttcatacacacataacttttcaatcacatcgtttcaatttcaatcaatttttcaaacttcagcgtgaactagacacagcctaggtgaaaatggcgatctctgcatttctgtgtgcttgtggcagtgaactcagcgcatatggtttggtttgcgacttgtgacagtgactagtatcccctactgcctcctctgacaacctgattaattattccagatttttcttgttaacgagatgattttgtgcgtgaaatgttagttaggtagcggctcattcaattaacgtggttcgcgttgtcgtacgggcgcgcgagagcgagacgggacggttgccgcgcgacgcgatgcgcgatccctcctcacggcggcgttggccggggtgggtggtggcgccgtcgttttccgggggaattatttgctcctcgcaacgctatccggccgcataaagtcgccgcataaccactgttcgctggtactgacctagcaggcaggcaactaggcaagccatttcatctgttcctcgtggaccattttcgtggcattatcaggttcaggtatttggccattttcgctaggaaaatactagaagagcggtaaactactactccaaccttgcaagacgtaaaaaaaaaaaatcttgtgtcgcactgtagcctcctaggcgagtagaaaaatatttaatgtaaatctgaaaactaccatataatataaaaatgaacatttgagatttgtttaagagcactcataatgccttacatctattttcatattctacaataattttcaagttttcattataataggtggaccctgtgtgttgatgcgggagtttagtatgataacactgagtaaaaataatgtgtaagatagctagatactataaacttacgtaaattgatatggtttatgataattcaaattcaaatagtatgtagaatgatgattcaaatgaaaagtaagggcatgtttggcttgcaggtacaacagctgcctgtagccagtcgtggccggccgctgcttttttttttgtgcttgcttcactgttcctacatgctgcagtgttgctgcagctgaacagaccctaagttgatgtggctttacgagagaagaaaatgagggagatagtttggatcatagattaatcatctaagggctaaaaacaattgaggtgatatgatttaatgagagagagagagcacattttaactaagttaggagttaggatgaactatataagtatatgatattataaaaatgatcaagagacattgaaatattatgcgaattatgtgagatgatgatttaacaagcttgcatttgaaaagctataaaatttaataaattataaataatataatatgcttgcatgatgtttaaatataataattgttaatggatgatgatgtggtatcttttcatgttatgctttaggatttagtggactttatagtaagagaggataggttgtttccgctgcataattttccgagttatgttgggattaagatcctctaacttacttctctctaactgatgtcattgatatgtgggccctctatatagtaggctcatatgtcagtgactcaaagttagagagaagtaagtcaagaggatcctcttccgttatgttgtacagagctcagaggtgggaaggcataagcttttttttaaaaaaaaaacgagaacggcaagagcattgccgattatattccgattatattagagggaaaaaaggcataagcttttttgagagtgctgtaaaattaattataattgagcatgctggggaaaattaattgtgggtctaggatgttggagagtttgcttgtgcacgttggatcataacaaacatttggaaacgcataatgagtagttccacccgaattgttctgtcaaccaattctttccgtttaagtcaatccctcctatattttgtaggaaaagcgatgggacttgagctgccccctctgttcaatgatcagtgcacaactgcgcagcaactgggatctcaataatggtacaagatgaaaattgacagtaaacttattcaagtcaggttgtcctctgtttgatttgtgtgcagaaccgaagttctgagccacgttaccaagaaaaatgatatggtggacaaacttgataaagtgatacgcatgctaatgtagaggactacatccgacatgggttgaccatgatctcgcaaacaaacaacgaacaaggaatggaacaatggtattggtagttgatagtctataaagaaaataatctagtccaacttgctagatacaaccttctactgttctacatactagcacgagacaaaccactgcatgcaccaaccaccaaacactgatccatttcaaccatcatgtccttgccaaccctggataagttctctgaaaattcgtttactaacttcaatttcttaatttgctaagagtagtagtactacctaagaaacaaggtgcaaaaaatacgacaaaaacaaagacatgaaaaggtagccggatagtaaatgctaatgaacaactactagatgatcaaagatattcagagaatcagagtgatgaccgtaaaaagaggtgccaacttctgaagagcatcaagctaagcttccataaactcttttacatggtactgatactgatcagtgatcactaatcactacgcacaccaaaggaagtaaaataaaaaaaaaaagaagaagaagaacagatcatcagaagcagagacctattactatgtcgcaggaaagcagaggaaggcggctggctaagctttggctccaaaagttcagagatttgctgcaagcctgcgagagagcgggtgtacgtgtcgatctccggctagtagccgccgccgccgccggcgttggccgcgagcttgatggacgacggcagcgggctgcgcagcggcgagcgcggcggcggcggctgctccaggcgccgcccctcggcgtcgtagtagatcacgccggagaagtccagcggctggcaccgctcccccatcagtatctccttcctccacaccccgtcctccgcgcggaagctcagctccgccccggccttcctcctcctcctcgacgacgagatagccttcttcccgccgcctccgccgcccaggaacggcacgatggcgcgcgacgagaacgacgccgcgatccctcccgcggccgcaggtgcagccgccgcgccgcccgcgacagccgcctcgcgcacgtccccatcagcgccgccaccgcctgcgcgatgctcatccccatcgccgccgccgccgcctcctcctcctctcctcctcgcgctcttgcttcctcttcgagaccttgatggctagcttagcttctcttctcttctctcgcgcgcttctgcgtctccttctgcgctagctcgccattcccgcgggtatttgtagctggcgagctggtcggacaagtcaaacaaagccggttgggacggtgtaattaattaataataataatcacttaatcaccctgttcatgcttgactgatgcggttagatgacctgcttagctagctcgattggattaatttaatctttttattcgctaatggatggctgtggccatacctaggtggtgagtaaccttgtgtccctgaactacacgtacttgcgagcttgtttaatgaagtgaaaatgatggatttgtgcaattgtgtgcttgtggctgatgaatttacatgtcaaatttggccgttttgactggtgcgtgttggtggcagttgaattaaattaaaacctaagccgcgcgtaaccttgttgattgagatttgagcttggagacggttggggattaagagagataattaaggatccatggtagcctgctaggggttgtgttggcttggctctgtactgcaaagtgcagacaatgaaggggtattaaaggagatggctaatcagaatcttccaaatatcatcgtggtactatatagacctatagagagcatacacttgggaagaaggtaatgtgtcagtatttggtactagtacatgattacgaataagtgtatccataatcccactttgcctgttcataattaaaatccataatcgagtattccctccgtccaaaaataacccattcctaacatccaagataaaaatagtgaagcgtgagaataaccaaaatgctattaatcattgaaaaaagtagtaagagtgataggtagttaaaagctattgaaagagataaagtttctcgttttacatgccgtgggtagattggatggtataagttagttttttgtgagataaaatttaaaatctagaaattgagttttttttagacggaggagtaatcctatatatctgtaaaatttatccccactaaatatagttaatgataattctctcttctctcatgaagccacatcaccttaattgtttttagcctttggatgattcatcgagggtgtataatgtatctcttcacatcacctcaattgtttttagtctttggatgatttagcaggagtgtaaattacacatcttcatcctaaaggcacaccatacaacctaatcatttataacctttgtataattgataaagttacaaaaatatataaacatgcacataaaaaaatagtatagtaggtaagaaagaaaattttagaactcatatatactatattatcacacaattcttccacaagaacgcgcggggtacccatctagttatatatacaactctgaccgaagtgaaggagtcggtcaagttgatcgaaatcatcggctcgatcaaatgctcaataaacaagtgctaccagtcaattggagcgaaattaaaaataaatcagtgtgcacacacctgctgctacatctacaagcataatcatatcggctaaacagaattgaaagaatcaatcatgacacgctcatcatgattcgtgcataagctaatccagacagttgtacgtgcaccgataatcctccctcatgtcgatcgacagatctactcctacctaccaacaacgtcagatcgattagctccccgagtgcgcctgtgcactggccgtcgtacgacgagtattcgaccatccgagctagtagccgccgctgctgctgctgcgactgtgtgcgacgtacgggtgttggatgcgcgtggttggggcggccggaaaagcgcgatcgatcgagagatcatccagtggcgttgcgaattgcgatgcacgccgctagctgcatgcgtcgtgcgagtgcgccacatcgcggcgggccgcgggggcgggggcgcacgagaaaatgctcgtcgtttgctgtccatttcgaagccccggccggtaaagttggccaacatggtcagcacatgttggcgtttccgtggtggagggttgatctagcccactaacgctagctagcaagcttatcgcgttcagaattcgggtcgtggcaaaagtttcccttccactgctccatggtcatttgaagataaataaaaatctttggggttgttttttttgccggaatgaccgaaggaggtcattcaatgtaattaagataggaagaaaatattacaagaaaagttttacatcgacagctgactgtcgaggaaggatgtgcaccagagcacacgccccgaaccaagtgccaaccgcccaaacacacactatagacaggaaagccaagcaccgaaccggccatcgctatgcgagaccgattgccacctggccaacaacaccactacgatacgaagactcaaaaacgacgccctcacgaaggtcgcgatgccgaagacgccgtcgtcatccgtccaaagaactggactaggttttcgtccagagctccttgccgagggaggagggatacctcaacaatgcccccaggagggttaccacgcccgaagacatagtcattgttggcacaaagacttgggctaagctttcgctcgggatccctaccgccgtggtccgtcgcccaatctgaatccaccatctaaacatcggcggcacatggcttccaccacacccgaccggcgcccctccgtcggtcagctttcagtcctgccaatgacaagactgccaccacaccgcaccgacgccccgccgtcggccgacttcctcgaaccaccatccctgagagctggtccaggacccctccgttccaccacccgccggcctcctcgccagatctggccgaaggagaacccgggactaggtagcattgcttcggcagcctgagcttccccactgacaagcggccgcctcaatccagcctaaaaactcctcgcaaagagggggatgagctctagaaagggtgagggtgccgatcggcaacgaggaagatgacccaccgccgccagttccctttgcaccatctaggcctgcgccgacaccggaaatgcagccgcacgccgccgccactccaggctggccgcacgccttcctcggacgagcctcacgcgcgtgccagcctctgttgcggcctccactgcggcctcctcgcgccggcctgcgctgcctccgccaccgcgtcctccgctgcctccgccaccgtggcctccgcctccggccgccaccacgtcctccgctacctccgccaccgcggcctccgctgccgaccgtcaccgcgtcctccaccgccgtcggtcgcgtctccgcgcacgccggcctctcaccggctgccgctagccgccgcctccacctcccgtcgtcgcgcacgccggcctcctccactagctgccgccagccgccagccaccgccagacgccgctgcctccacctcccgtcgttaccgcctgagagcggcttgctccggccagctccggcgtggaggcgccggatccacccgtggggaggccggatccggccgcggcggcgccggattcgccgcctccacaccacgtctgtgacgcctccgcaccgcgcgttggcccgcctgtgatgcgtcgagacggggcaccgtcaaggtttggcctcgccgccgccatctcggctggccgctcggttatccggcggcgggctccggcagcggcgaggggagggagagggggagaaagtggcggcggcggcgctaggttttcccctgtgtcacccgcgcgtgggcgacgcggaggctaagctaccggaattcttttcagtcaagttttatttggctgagtaactaatctttggggatgtatcgcatgaagctgggattatacctgaactatcctattatagagcctcgtccgttacccataagtttattataagccataacaacttattagcaattaaaaaaactgatttcctattatagagccattttataagccataacaacttattagccatcagaaaaatgatttgcgaaaatttttatatatgtgtctttaacaacttaaaagctaatattaaaaacaaactaagttgaacatatcttaaaatcaattcaaaatttaaattttgactttagttttagtttttttagggtaaccgatggggcaataattggcatcgtttttaattacaggcgcaaatataagttgaatccacaacaatcagctgccacattttacatacgtcccacacgtctcgcggccctcggatcggctgatatgcacgcacaagtgactgaacatgtggatcagtggatgcagcgacaggcaggacatagagcggccactactactagctagtggccattattgacgtgctctgctcttacctcatcacattctcataccccagtacgattcctacgaacacttttgccttgggtaagtggtgagttgagtgatctacagattgacagcaccgtgtccctcaatcaatttgctttcgccggcgccaccacttgcaaccgcggcgtggcgtctctcttcttgtctgcattctcgcacttgcacagttgcaccctctgggaaaggaagcacgagggtgaaaagatctcctcgcttcgctcactcactccatgctcatcggtttgtgcatggatcatatcttctgatctgtaattgcgtggacacttcgagcagtagtggttgcagactgggagggaatgtgctcgcaagttgcagttgctgatgatgtgggaatgttcagaaagtgcagagacactttcgaagttttgataggcacaagacaacgatcgatcacagtattattcttagaatctctagttgtgtacttccattcaatgtttcagttgttctctttgggtagtttgctcttgcacgtagcaaccagaaattggttaaccctgagctgagtggggtactggtgttcgccttggtacagaacgtaaccatcttgcattaacgaattagggataggtagggtgatcaatcagcatccaggacttatttagcaacactgttttcagaattaaggtgtgagtacttcttctctgctctggtatatgatcaagcgtatgatgggccaaatttaataggtgtcgtaccggccgtcgtacatgaacatatatttgaaaaagaggttgttcaattcactgaaactctgaaagacagacgaatcttctaagcaagcatatcgattgattgttcgagaggaatcaaatgagcgtgcactcagagactttggtgtatactttctcagactaaatttgatttagtctttcgctagctgcagttgagcaattccagtttgttgtcgttatcagtgcaagtcatctgtgcgtgcaagtagcgaacgaattttggtgcaagtgcaaccttgtatgggagtaattttttcctttaattttgacccagttctttctttattagaggattaataagctaagagaggatggccctgtccccttgacagggatgcttactggccgttcggttgccatgtaaaggaatagagcgagctatggtcatataatctacatttctttaagcagtttgatcataagaatattgaatttttttccagaaataaacaagagtcttatgcatcattgtattaagaaaagtaaagttgatacaaaacgaaccgtacaaaaacaaaaccagaaggaagaacatgaagaagaaaaggggaagaaaaaagaaacagcacagttggtctattcctgtgactgaaaataggcggcctaaactctggcactatatatgctgagctgaggccgtcctagccacagccgccaccgcgctgcctcctccgccattgcctttgccaccttgggctagctccactctatctgattgaacacgtgattgttgtgctcattccatatcattcaagctccgagtgtaacgaccgtgtcaaaatctctcctctgtccttttaggatctttctctggctattgcaaagccggaggtggaaggagtgcccgttgattgacatacaataacactgtcgaattgcaccgaggactgtacacaaaagttttcaggattccagggagacatctaggatgtggtagatagtctcctcatgttgatcataaagaatgccatgatccgagcgtggtagcccaatgttgcttagccggtcaaccatctagcagcgtcatagtgccaccaaccataggaagtagcgacaatgtgggggtgcgaggggttctccaaatcgataaggaggaaggacacaccctagaaaaaggccttggtaagccgatcacaaggagtagagacatgaactctcctatttccagacgaaggagtctagctggcggagaggctaccgaatgacctgatccacaaccaatgctacaagtattccaagatcgcttgcacaccgagggcatcacagatgtctctaatccatctgttaccttgtattgcttgagccaccatcctacggcattgggtgtgtgtgggaatacgatcgtggatggtcagtggtaaggaatggatctcaacgtcgtacatccagccttttcctcccacaatagagccaactcatcattacccatgcccatgcaacaggacgtgaaagccagtgcgaaatcgtgcttcttgttcgaacaaggtatcatgagtccctgccatggtttcttcggtgaggttcagtgcaactagccaaccagatttagcatgatgtgagagcaataagattgaggatgacgagatcgccaaaatttgtttggtcatagactcagcagtagccgccctgtgcatttgatctacctgcccagtggaacctataatggatcttgttgattcccttgattacccattttaggggttccacgccgaccaaatggtaaatagatatggaactcaaaactgccttcatcgtgatgatctagcttataagagctatttgcttcgctttcagcaatcggcacaccacataatcaatgagaggttgtaaatcttgcttccttaaccttcgagaattgagcatagatcaggtggtgtggtgtgaaggtgttcacccagtctaagtaggttcaaatcctgaacccagggcacagcgggcagctagggcttgagccctaggtttgcctctaaaattttgttaaatcactatataaattttatagaaaacaaacactctattagttgatccatatcctaaccttagtcttcaaaaattctgactctaccatgctgaatccaatgtgtttcttatgaggtttcttgtgcccccttcttctttacaaaattaaagtagctagttcatcctagttattcccttgagaggcatatcgaatatggattctgtagattagaaacttaggcaaaggtcctcttgctgcttggaaatctttcgtaggaacatagagatcctccaaacgagcagctgcaggcgtgcaggcctcttgcagaatcggaatatggttcacatacaacgccttttgcaatagtgcgtaatgatccaacagctagtactaattactcaatttgtgcttggccattgatttgtaatgataatctaggagtatatgcgactgtggccggtagtgtgcggtgataggcatcgaagaataagaaacgacgtaacagagaaaaatgagcgtctaataatgtggccccttgacacctttcggccagagagttatttatgtgcttaatcgcattctgaaccactagtccggggctctacttgcagcgattaagttgacttgggactgttcgatgtgacgcggcacggcggtgatgagcgggccagcgttgactcaacacctacaaagataagagagatcgatacactgtcgaatggagaagaacagtcagcgcgacaagggtagccactcactcagtttcatactcagatgatacactgtcgaaggagcacatctcgttgccccggcgtatgggcatatggccgtgtgtccgtgtgtctgtgtgcaatgcccacctcacgtctctcgggccgaagctcacggaggaaggagagaacggcaaaacagggccggtggaacgaggccggaaagaagggacgcgcgcgatttcatgcgtatctccgtgattttcccgtcccgcgcgcgacgactcccgagtcacatggcgtcacggcctcgcgaccgtgtttgcttttgtggccaccgcgcgcgtacggcgctcggcacggacgcggacgcggcaaccgagccgcagaaaccacacggagaggtacgtacgcgaggccgcgaggtcgcagcgttgcaccggcgttggccggatcgcacggagaggctctgcactgtgaggaagaatgtgccttcgccgatcgctctcattctggaaaaggaacagcgatgtacacaactttctagagtctgctagggcatccgaagactggagtcaccaaattgttgcgcgcactggtaaatttttaaggtatcggtgaaagaaaagggtttgcggttaaagtgagagatgctcattcgacgacccacaaagagtaatttaaaagaggagatttaattagtatgcatgttagtaatactttgtcaatgcgttcccacgtacacacacacacaaaaaaaacctagctaacatgcatgttaatgtcattaactcttcatccgtgtcatgtagccaacgatttttgactaatatcctagcaactttgtgaattaaaaactgaaaagtggaagggcaataagagccgaaaggcccgaaaagcaagagaaatgttcatctcagcatatcaggcgatggaacagaactaattcccagtccttatctacaaacacctacaggtcaagcagaaccggattcctgcacgaattagagccaacaaaccgaccaatgaacggtcccgatgcaatgcaacgaaatgggcgcgcgcgtgcgtacgtgttcgtacggattttgattattcctcgcgccggcgccggcggcggcggcggcggcggcgaggctccaccgatcatcgatggcggatggctcacatgatcgcgcaggcgttggggttctcctcgctgaagatggtggtgagcctgttggcgtcggtggccatgcggtagatcccctcgcgcaccggcgtcgggtagctgtagcggtactcgccggagaagtactcgtgccgcctcggcgtcgccgcctcccacctcggcagcggcgacggcgtgtaccggaagtaccccggcggcgccgacgtggcgtggcgtgccggcgcgtgctcggcgccggcgttcggggcctgctgcgtcgtctgttcttgctgctgcggtggctgctgctgttgctgctgctgctgctgctgctccggtggcggcggctcggggccgaaccggacgcggccagacttcttgttcttgccacgcttcggcggcttcggctcggccggtggcgcgtcctgcgccggcggaggcggctcttgctggggttggggctgcgcctggtggtgctcgtgctcgggcccgtgttgctgctgctgtgccggcggcggcggcgtctgtggctggggctcgggggattgctggtgcggcggctctgcaggcgggatcacgtagacggagttggcggcgctgaaggtgaccgtgcgcgccaccggccgcatgtagtacgtctccgtgggtgggccgggcgggtaggccatggcgtagtccagcctctcctcccgccaccccctctcgcgccctgcatgtcgccacgcttcacaactcttagcaaaaaaatgaacttcgcgattttgagattggtttggacatttggtacatgaacattgactaacattatttatcaaattattaatccattgtcctaagaaacatcacacatcatattatcatttacatgtggctatgtgaggacgatatacatgcttttgaacgggttttacatgtgagattattagctgaaaatctatcgtacttatagtagcgaaaacttaattaagcagcctgcatgcatggctgcagattagcagaagtacctagttcgatcgatcatgtcctagcacgtgatcgatgcagaccacgacgtggcaaggaaaacaacatgtgcagtgtagaagacgacttaccgttgcattttccgagagctttcgacacgaacttgcccagatgatagcaacccatgcctggctcggccttagttttcctcttatctttctccctagctatctcgctgggatgtagcgatgtatgatgcgttggtgcgcgtgtgctcgagtgagcctgtgcgtggaatacatgctagcttaggaggtcgctcaagttcacggtggcaacgagagagaatggaaggaacggggccaatttaaaaggagaatactacgatcggttggtagcaagagggaatccggcaacaatgaactcctacctaaaacgcctcttttctcctcaggggaaggcatcgactgaagtggcaggacgcacataaagggtggtcctcgttttcgtggacgttggttcgagctaacaagtggtggcagaatatattctgctcggccgggacaatgcgtttgtgggagaggagacgcctaactagggatgaaaatgaggtggtgcatgctgcgtggtttacatttgtcatacatggcacaaaagggtttgacagatttgaccataaggttgcatagataaaattaagttgctgtcttactctctactcctacttgcgtgtcgattccttatttttgtaccggtgaaacgtgctagcctcattttcctgaaggcaatctgtttgcatgtaaagtagaaagctcggagtaggaaggtgacctttttttattcagggaacgcgaagccaaaattgagtaataggctggcgggttgtgactggtgcagacggcagaatggggcgggcaatggcaaggttgaaatctgttgctaggtaactcaaaatgattaactcggtttcaaacaaaaaaatgattaacaatgttgttacgcagaaaaatggttatatggtcgctaaagagctaaagatttattattactgcaaaaattgtagcaatagaatagattatacaaaaagcagatgctgcggtctaattatccacaggcaatgaatccatatatttttctatgaataactatatccttcaacttcaagcatcctatcctaatgccaaccattccatcctgcattacgcaggattctagcttaccaacatgggcagttgggcacgcattccccatttccgcacctccatgcttaggctccctaaggaacaccctctgagagcatgaagagttcaaacacaaacatagttgatcacgctacagttgattgcaacgcttttattattcccctcttccatgtggaagtctctggttcaaacctgagctcccaggtcggccagtagtgaaggtcctgtttcaaagtaagcacacgaggtttgccattcaaatggacggtccgcaccctaacaaattcaccattttccaatccctgaaataaaaggttatcagtattaattcaaatcaattgaacataagcttgccaggtcgatatatcacatgaaaagacttgactataccaaaggaagataactattgataatacgtaccttcaccacttgtataaaagtttcaagatctggagttggcttcccattaacttccactatccactgcagagcatagagaccatatctatgtacgggacttccatgacaccatctgcataaaatatttgatactcattcctcgttcccattaggtatctaaaatgtgcttaacaccaatgctatggacctaccgccaagccatgtacacatcttaaattttcaaccaactctagatttaccatcaaggagggagaattctaaatgattacatatatatgtatataagatttggagcgctacactactattatgacattgggagtggaattagaggaaacactatcaatatggcttttatgaagctgatttgctgtcggtgcccaagataacacaaatgggtttcattattggataggatgtactaggaagagattgtaaagttggaaagaacaaaaaaaacatgtgcaattgaaagggtagagctgaacttgttgagacccttgaccccaattcctgttctcttccctttatcaggatagggttactcggtttacactctaccctgactaagtgtactcaccagggttgttagattcaaatttaaaattttatctaatatcgggcacagctagtgaccataccaacttgagatacatgggaattgtagaacagacaaaaacaaaagacatatcacaaatgctcgcacttctcaagtgttggcatccctgaacccacagtagctataggcttatagttccaatcaaagaacccatagaagcaacatataaattcgggtggagcatgttctcacctagcaacataaactccatgaccttcttcgggcaaaaaaccaagtgcgcgcactgctgaatgaggatcctggattatgcatccacaccaattcaccatccgtgttgttccattgccatctcttacatcggttccaacaataagatcaatttcttttccctgttaaatgttgacacggttgaacacatagatatttagattcatacagtttcgtcaaaaaaaaatggttggtttcttacaaccagtcctcacctgacggaatattgtcatgttaaggactccatctgaatcaacagattggtccaatttctggcaagcattctcgatatctaggaagcatgtaattggctccttattgatagcaaggatcatgtctccctgttcaaggagattttctgctttggatccagccaaacaacctttgacccgcaaaacttgtcttcgcacagggtccttcttagctagagcctgcaaggataatcatattgaacagtaaatatttcatgcatccaaaacctctccacttgctcataacactagcatattagacaagtccaaaaccaatcaagcgaggtcctttactcctcttccttacaaactgcagcatttatctgtcagcgaacacttcaagtgaatggcatgaatatttctccagaacaataaatattgcactcgcgtaattacatagaacattcaggttgacagtccatcaggaaacgaatcatagctgtccgaccaagcagagcaacttcagaaaagactaaaggcaaggccaacgtgaaattacctgcacccagctatcactcaatccataacttcttgcctttgaaagcaaagttggatagagttccacctccagaagtctgatgaatggtattggcctcctaactccattgataatacgaaatggtccaggagtaccagagattaccttctcaaggacttgacttattgcatatattggtatacctctaacaaattgatgatcctccgaactgctacaaccatatttcagctggagaaaataattaattgatttacaaccccgataagcacatggaagaatggctaaactgctaagaatggtgccattataccattgcttacaagcattaaatgtgtagggtatgaattaatgctaggacaaagaatctatcaactttagtcaaacatgcagaaaagtctagggcctttaagtgtagtgaatatagtttcttatattgtccatttagttgattgttcaagatatcaaacggctaaccttccgtgtaagacggcgttttgttctttctttttttcttttgaataaatgttcctgagaacgtgcaagcatcattacttaggaaacaggctaaagcaaagcaactgtaatgtaaactaacctgggtggaaaagcttgcccataatgcttgaactcttccttgctcatccgtcaatatacccgcgaatgcactaccaaaatctaaaataaatatttttcaat

SEQ ID NO: 9871 - DNA, 51876 bp, Oryza sativa
gcgcagctgcaggacggctacgtggcctacccgtgggagaagaagatgagggaggcgctcccgatccctaactccagcagcttcctctccatgctcgtcctccccacggcgctcgaccgcgccgcctcccgctacaactccgtcgaggacaccctcgcccgcgccaacgcctggatcctctcctcgcagtcgtccggtgtgcccatctccttcctcaacgtccagaccgaggccctcctcaccaaggttcctcaacagcgatcaaacttgcctagagtaaatgttttagtagctagtaggtgttgtgcgtgacatgcatatcttgcatggtggtgcagatctccggcgagacggcctccgcgacggtcaactcggggtcactggccgacctcccgaacctcgccaacgccagcctttacgggttcgaggactaccacggcgtggacatcggcgtggtgaaggcggtgcgcgtctggtacaccgccgccgccggtgagatgccagtggagatcaccctcgaggccggcgacaccaagctcggcttcgccattagccgcaccgaggaggtagtacacctttaccgtcatgccattcattgcatcttgttaactcgtccttgatcctgctcgtgtgattcgtgtctgatcaattgtgtggatcactcgcgaacgaacagggattcatctacatctcgtccgtcatggaggacgacagcggcttcctggcgccgtcgacgaggtcggggctgcgcgacctctaccgggaggcgaagcgcgcgtcgaagctgctggtgatctccagggtgtccgggcaaaaggtcctcccgtggatggtgtccacgtcgggcgccatccggtgcttcgacaccgtctcgctcagccagaagctgtcgctgcaccggcacgccctgcgcccgatcctgctccacctgctcatgtgggaaggcaagtcggccgacgcgccggctcgcccgcacgagccccgcctgccgcctcagccggcgccgtacccggagttcgccgccggccttgtgcggcaggactcgttcggcggcggcgagctgccacggcaggactcgttcgccataggcgagctgcggcggcagggctcgtatggcgtcgagctggtgcggcaggactcgttcggcgtcgagctggtgaggcaggactcgttcgcgtgcaccgagccgccgccggtgcggagaggagacctgcaggggagggacacggcaggggatacatccttcaggttccataatttctcgttgcccaacaactgggtgtgaatgtgcgattgaaattgaacaccaagggacaagtctcactggttgctgtacatatgtatacttcgatggggtggctttgtgctcatacagactgtggagtgcattgtagtgtgatggagcttacatagagtataattttggccggtgaatagtcttgctgtttcagcgatacttagttcgaacactgttgattgtgttgggaggagaataacagtttcatgtttgatttcaagtatgaaattcattgccatggattgcaaagcccatatctttcaaacacctcgtttggaagttcaacgatactacgtatatactttatttgcacgattactaataccaatttggcacattcaatagagacaacctatcttcattcaaatattccatttggaagttcttttcttcccaaatgcactggagaattgtgcttcatttcactaagaagaaatatttacaattacaaagaagggattcctttgatcaaagaatccctcctactaagaacacatcccaaaacggatcacccacaggtgaggcccgtccaacaccccgttcggaagttaaagagtaaatattttatttgcacaattgataccagtttagtacatttgaagagagacaatctatcttaacaagaggtttgaagcatggacatgtacgggctgtgcagggaacaacccaacagtttcagcatgtgagcctccagcaatgaagatacatatcagcctggactgttgttccgtttgctgatcatatgaattgtaaggttaacgagaaatctgcataacgtctagaatccattctttcctttcagattgattactgatagttcctgttcgacgtagtcgccagcacagattggtggataactatgagcatcggatgcttcagcaaagtggcccaatggcttaagggttgcatcagaagcaatgtgtgcaaacagctatttacataaataggcaaatgggtaagtcaatagttcaccagagcaagtaagattaaattgatggaagtgcctcatgaagtaaatcacatcgagaaggagtggttagcacttacggttgatgaaaccctccacaagcttctattttgctctcttgctaatgctattgcctctagtgttctcttggttaccactacctcatgcattccagctaaacactccccaccagtaagccattccagctgcagttaaagaacataaagtaattcaattggcgagatgctttacttgcttgtgtgttggttcatcacatccaagttgtcagaaataagccccatctttcactagcttacactcccagttttctagtgtttgtgtttcagaaaaggctcaaaatacaaatacaaagtttgattctatgattgacaacagtatcaatttcatggaaaaccagaatttagagatcagaacagaaaccaatatgcatacatatgaccttctattgatgcgcgaatatgaactaattaagatacttgcagtaaaactggcaaagctaacctgtttccctgattgaattagaagacagccaacagggaccttaacttccatctttttgccgttccttagccagatgttcaggcctggaaatctacttcgaccatgtatggtcaggaaattgagatcataatggaacccagcaaaaacagtgccctcagaaccatgccgctcaaggtcacttccagttggtgctaggaggtgtggtccctatgaaaaacacacaaataatcgaccaatgtcaacaggatgaatgcagaatggatctgaataatgcattaaaatgcagcgttcattacataattacaaaaaaaaaaacaactcaatttctgtgaaccaacagaaatatttttagctaagtaaacataatgctgggacctggtactgtttacttgcatcctgagtagattaacaaattacagcaggatattacagattgttacagcattacctccttcatcaaagaggtaaatgcatcctttggcaatccaaatccaactgcagccatctcagcaacaacctatgaaatgacacggccgcttgtatataatacagcaacaaaaaacagaaattaaatgtagagcatgatctacctcaattgcagaaatcattttagaaccccaggaatccatggtctctttccattcaggcaatccatcagggataacaggttccgaattcagctcctaaaccaggtttctcacaagtcagtatagaacatagcgaacgaccacacacaatatgcatatcatttcagatatccacaccaaattaaaaggatcaagcaaacagtctcaaccttaaaacgggtattcgctgggcgaggacccactctccacatataccgccatttcgggtctggacccttaggagtggcgggctgaaactcctcaggcatactcttgatcttgtcttgcatctccttgtcgacaagactgcgaggtacctccacgccttcaggtgtcacaccaaccttaacatttgaaacggaaataaagccagcattacaatagggacagacacgatgttttgtgcctgaattctcatggcgatttcacaatgcagagaagatggtctaacaagtagggtacttttagtgatcctgcctaataaggaccaaatttaacccaaaccctcgcctttgatcccaccagattacctgatagtggaggttggggcgctcctggaggcacttggagtcggcggatcgggcgaagtagtgctcgacgacgtcgaggaagcggtcgttgtcggcggcggggcagcgcgggtccttcaccagcagcgcccccgtgtcccgcaggctggcgctcaccgtcgcgcacagcgcgcgcaccgcctcctcccccgccgcgccgcccccggcgacggcgcggtcgaggtacggcgcgaggtccaccagggggaggtccatcggcggctgctgctgctgcgcgcgcggagagagagaggccgaatcaagtcgtatcgcgacaggattggaatgggggatcggcggttttaagtagtgcgagggggagaagtgggaacacagctagcgagcgagacaggagggacgatgcgtgaagcgagcgagcagtaatccgcgagagggagagacggaaacgcaaaccggggggcgcgcctggataaaaatattctcccagccccccgcggttcagccacgtcgctgacacgagcagtcgcaaaagagaaatcggttcgttgtttttcgggggattttagcggaagacgaggacgagccgcacgccgcagaccagcagcagtcggcctcacctgcccccctccccaacgccggcaagacggcaagcgcacggatcgcgccaatcacccgccctcgccggcggttcgtgcgcaggtcgaccgacgaagaagcgaggggaagaggggaagggaatccgggattaggatttaggaccactggactctggtgtaggcgtgtacagactgatatacgcttgagttgggctgttttcgttttctcggctcattcctcaacgcggctagacggaagaaacaaatgaaaagaaagtctgtcgttcgtccctcgattatagttcgagtatgttcctccttcaaactgaggaaaaaatagttacgcgaataagataaaataacacctatccttaaaaaaaaaagataaaataacaccttgtttatacatatgaaagcaattgaagagcagacaaaaagtgtacctaggaggcagtgcaggggaaaaaaagcaggaattggggcacgaccacgtaggagaggggaggggcaacctcgcgcgtcatgtgtgtcatgacctaaggtcatgaataagattggggataaaggaaaaactcattttcccgcctatcctagaaaatgagtccgaacacaaaatgcatgtcttttgatgaataatatttctttatctaaaattgtcctgtcttgctacaggcttttggtcggtttatatagtccgtaaccgtacatgtgagattacaatcttgtccccattgggcccttgtgagtttacaattatacccttgccatgtcagcaactttagagatattttggtacatttgggatgtcattatagtcttttggtgccagctagccggagtggttgagagtggtcccatggaatcttctcttggcatctttattgctcgagtagtatttttcatctcgggtagtcttttccacctagaatattcaaccactcttttccacttgcttagtccttgatattttacctgtcactagttagaaatgcactcaaaagatattatttagcttagtaacataaacttgtttgaatagtactttccaactcgaatagcattttaccatttcgccacttgaatggtattttgccattactctactcaaatataatttatcattttgccgctttagatggtattttaccatccgaacacttagaaaaactcaagaccttctctatagtgttttggccgaatacgaaaggatggtggtggccccatgctacaacaatgtgagagggaaggacaggatgcgcaggtgtgggtatagcgttgcggttgagggaggtgatgcgcccattgagggacacctaggtgttggttgcggagaaacgcggcctcacgtgtcaaaagagagggagagtcttgcaccgcgagggataccatgatatagttgctcttataaaaagtcttatcatatgctgacaggtagggtccactataggcccctagttgcctctattggatcttgcttctcacgaggcgagtctgcctcagtcatatgccctttgcgtcgacttaggtacggacgctaatgacttgagtcgtatgccctttgcatcgacttgggtacggacgctgatgacgtctactggtcccacctatcggctttagagagatgtgtgtgtcgggttgtggtgggcccaaccaagcgatatgatagtcaaccacattatctgacagcccacgttctcaactttctaggggtaattatggccagttctatagttagcatgtcgcctctcatacgcaaaagatggattggtatccctcgcattaaaagcgagggcagttgcgcgacgtgaagcattgaaggttcgcaccccatcgtatttatggcatagtaggggcccaagcagccacatggctcgggactcacctggtttaaaacaagaaaccaagttcccggtcccacctttcgctgtcgtggcccgatcccacatggcatggttagaaaatccttagagtcctagatagccagtagtggggacctaggtccccactttttcatatatggtacctataaaataacttagaaaaaaatacccgtgcattgcaacgggtgaaggctattttcatcttattattgttcaccgtgaaattcattgtgagaatttgcttagatatatatttttctagaaaatcatgtcaagttagcatgcgagtcttttttaaaaagatttcttatacgactccttttgcatttccaaaagcgaacgaacttaaagcccgactcgaatacggatatgtatttgcaaaagcgaatgaacttaaaaacgactcatacacgaatgacataccaaagtactggcaaaaatatcttcaatttttagaatagtagagattctcttgtctatcattttgtgccgtagacgctttttttttaaagtgtcatggacactattttgatccccaatattattttacttgtttattttcttattgtaccgatttctttaccttttctcatgtagggaaacatagtttgaggctccatttcaaaataactttctagagcttttataatatcctctatctaattagaccaaattttgcaagagatctcacttctaaaagtttgaagaaaagatgctttgcttcaagaaacaaccaatcaagcacaaaaccttagtttgatgccaagcaagatatgcttcttcacttgggtgaaggtaagaaattttgttctttaacactaaataacatcacagaggatatagatggaatccggaaaatacttgatcctattgtgcatatccataacggtgacaccctttagaagtctcttctcagattgagagaatcagttgtgattctaaatcctcttcctcatcaaaaggaaatcatcacactataacactataaagaacattgtagcaatggggactcttgatgtagaacacaagatctatacacccatcagtcctcatcacacatgcaaaactgttggagaaataaacatcttatgtgaatgtgtctttattaaagagtttatgatcaaacccatgagagggtgagacaaagttcattatggagattgtccgcatgtatgaagccatgaaatcagaagtgcttgttttcagtcaatatcttgaaccattgtctttgatcatggacagtggcggaggacggaaaaaaaatacaggtgtggttcatggacaattgtgttagcagtagcacaaaacaagaataaaaagaaaaaaaatacatgcttttagcaatacatcacatgtaggaattagtgatgatagatagatatatcatatatgtagaatctacgaaacaaatagtaaagattgattagtataatatattcgaggttgataagataagataaatatcaacgatctatccattttctgatgatggccacttcttgcttgcttggtgacttgctgctgcaccctccaccctgcgtccaccctatgttgcacgcctcctagcttgccactgtcaccgcctcccatgccatgtcgtcgcgccatcgctcgacgtggatgccacagctctgtgtggttgcacccaggagcctagcagccacacttctcccgaccaacatggttcttcctgccttctcgctagcgacgcgttgcctccgccctctaggctccgaagacttgcagcagccaccaaggcgccgatggggatggagatcgggggaatcgatggaggtggagaatggggaaatttgcctctagattcaatagttaaaagccatgtttacacaaaaacacctgctagcaaatgatgcatgtgcggatatgactcgttcgtttgatgatgcttcactgcgctttgtctatctcggtggtgccttgtctctgcccagagcccggagctgggggtagcgggcaatgaggtatggcgagcgccacatctcgccctaccgagtcctccatcactgatcatggaccaacttagtaaaacgttcgattggactgaaggtaaggagattctatttatgagtgaaatgtcttagttaaaaatcgagtagccttcatggtgttagagtaggcgtcgaattagtcctagtaggttaaaattggacttggagttgcaaaaggttgttgatggtggagttagtgtcggactctgtaactcggcgatcctttaagaagagtggacaacgtcgtaatttaaccatggtaatgacaatgtagtgcatgtgcacaaggagaggatggcggtgaggccatagactcataggagctaggtgtgccatcggtcccatgtattgatgtcgtcattgtggttctagacccggaatccacgttctgaccaaagcatatgtcctatttggatatcgacaagttgacaatgccactaggtttgctactctcaggaacatgtttttctcaatatggtctcgtctatatcctactacaacccaccttttatctctccatatcccctctctctctctctctgtcccttttcatcctctacgtgaagaagaagaccaataacatgtggtacggtgcaatagtggttatcattttagtcaaactaactcaatcaagtcaaggttacgctgatttgaacttaatcgtataaggacaaattgtgagcctaggcagaaatggcttgtttgagtgattcataccattttcattagagcttacactggtttgctactttcctccgttcataaaaaaaatgtaggtcatccactttcatttgttctagttattttaccatttacatgctgatcttttttaggcttatttgatgttgttgtgcactacattgtgctgaagcacccatcggacctgtagagctaacatagaagtccatcataaaaactgaacctcaatctaatcatataatttctatcataaccttctgctttccattgcaatgcaagggtagtttgctagtaaaatataaaagacaaaaaatgatatgggacacaaaagaaacatggtctttattggagtacacttaaaaaaacatatgacaatctagtttattggttatttcccattagatatcgcgagtattatgtttatcatttcttactgattcgaagagagaaactttgctaaataaccaaaattcccttcatttcgtccattcgctagttggcactttttctcactaccgtccattctttctcactgcacttgatgctcccgtgatgctccttctcgttttcttctttgtccggacatagcccacttcacattgctattgtaaagctagcccttttcgaagggcactttgtgtcatttgactatccaaaatggcaataaatgacaaactattaagggcggtgtctcatggcaaagaaacaagaggttaaagtatccattagaaaacccttgttttttaaattgtcctctagcaaataccttgtatttttagtgttctatatctacaatcgccattgttgtcatcaagcgtactgcctgtttactaaggcaagaaagctaaccactacatgcatggatccacaaggccgctccttcattgccacggcccgtaatcaatagttcttgttataccaatgcaatcaatcatccttgctcgcagtcaactagcactagaggttgaggatttgatgaacgtgaatctcatatgtcgattactcaagaagtataagaagcatggttagaacataatagtgcattcttatgtgtaacattggactttcgatttgtaaaaaagtctacacatagcttaggagagagctacaaatcgaacgtccgttggtataaaaaaattcagacggtcaaatgtttcagttgaccgttggtgcaacattatgttatacatggtgaaacaaaaaaaatcagcctctgatacatacaaatattttgtgaaacacaattcgaacacatggtgaaacatatttgttggagaatgaactcctccaccaggggaccgtgaggcccccctttgtgagttcggccaggggcagcgggagagattcgaggattcggtgagtgaagccgtgtgatgttgagggggtcgagccccccaaagacgatgagaccaaaggggtttatacaggttcgggccgctatgaagcgtaataccctactcttgtgcttggtttattgagtgtagaacactagtgcttgaggttgcgagacccaagcgcgagttcgctcgaaagttcccccctccaccactaggtctggacctccttttatacctcaaggggttaccacatgggcccaacaacctaacctagctccggtggagaagtattataatttttgcattaaatgcatgtctggtctcttgacttgggaagccaagcgcacgtcgtcttgatgatggggcctgtcaaatcttgccgcctgacacgaggggtgcccctgtcagtcaccatttaatgggtgaagacttctgggctcctattacaccgggaaacgggagccttgctttgaccaaagagggaggaccgactccggctgggataagagtataagaacctctcaccatcattatttgatgggacatgtcgggctgcacgtcgcctgacatacgcgatggtgcgcctgacatactgggtcccatcggtcattcgaccggtcacagaccggttgagtgcactgcacaccgcattaaatgcggcgtggcgcgaccgctcgggtcgccataaatgcgggtaggtggacacctgtaggcggacacctaacccaccgtacgtggtgacctagagagggggtcgggggagcccgacccctagtcacgggagggggcggtcgccgctcgacctcgggcccgatcccccctcgggggagggccacgtggcgcctggggcagccttctccctctagtctcggccagggagtggccgccgccctatctcgggcccgacccctctcgggggagggccacgtggcattggggggcaacctcctccgtccaatctctgggagggagtggccgccgccctacctcgggcccgactcccctcggggagagccacgtggcattggggggcagcctcctccaactagtctttgggaaggagtggccgccaccccaccccgggcctgactccccctgggggagggccacgtggcattgggggacaacctcctccctctaaacatgatactcccgggcccatatcactgacaatattgctatcacatatgaaacattaagtttttattgtttgaaacatatgtttttctttcgtcagaatatagtcatgtgatattttgttataaagatttaattataacaaattcaacggcatgatcaaatcgctcatcggataaatagtttagaagaaaaagtatttttaagatcactaaatacatgcatacatgcatggtgtggggagaaagccaatcgaatggcgggagagagtagtgacgtaaacatcccatactttttatcggtcatttatgaaacattaggttatatatggtgaaacaagaaaatttagttatcgaaacatttaaatttttttatgaaacataacaaaaacatgtgttgaaacatattgctaccgcgtctgaaacattaaattttaacggattgaaatatatgtttttctttcatcggaatgtaatgatgtgatatcttgttgtaaagatttaattataacaaatataatggtatgatcatatcatcgattggataagtagtttaggagaaaaaatattttaaagatcattatatcatgtaatggatgtatgaagtggatagggagatagtagtttgcccatctgactttttatgatacgtcagacgtccgatattaagcgtttccgcatagcttatgccaaaattaatttccccaagttgcttttgtgacgaagtcttgaatggaatggctgcaccacgcgacactcaggatcgtcattagttagcgtgacaggggtttagagccgcctaaacccctcccaaaaccctaacaacccccctaatccctcccacgggatggctccacaagtagactaccacaaataccccttctacatctcccaaaaaaaaaacaaaacaaaaaaaacaatccccttctacaaggcagcacaccaatgccctcacaaatatcactcgcatagtcgcattacgtgcgcagcgaattaaaaaaaagaaaaaaaataatgaaaatagccagagcgcctcacccagagccgcagagaccagcggccagagggggagggggctagggggctcgctcgcccatataaaaggcgcgggcgtccagccgccaccgctctctacccaagcagcccccctctcgcgaggccaatcattctctcccttcccctccgcctcgcgccgcctctcctctcctcgcccccctcaccggagccgaagcttccccgccgccgcgcggcaggttcgtctcactcgccccccctcccccctcccctcccccaatccgttctcctccccggctcgcgtccggccgaacggagcgcccgcctcggggtcgatttggcgagggtttagggtttttgattcgactccagatcgtgtttggttggggtttagcggcgcgacccgtgttattagggagtcgtttgtgtggccgactctgtggtggggtttggatttgatttggatttggtgggtttggtattttttggcctgggcagggaatatggcggggaagtcgaagggcgcgaggaacaaggcgaaggcgcagggtggaagccaggccgccgtcgcggcggagccggaggtgccggtgaccgatggagtcgaggatgccaagcccgagatcgaggaagttagtgaacctgccgtcgtagagggcagtgacactggcgctgagaaggagcagggcgatgcagctggggaaacacaagccgcgaagaagccagctgaaggtaatggtctcccccactcgatcgtgttcatatactgatactgtatttgtttcttcaaatcagaaactgtgccttgtagaatatagaacataattttaataaagctctggtcttagagagataaatgaattgtgcaataccatcgtgttagagaaatatctgagttttagtactgacaggccatcgggctagagaattaccaagtgtgcagtactaagttttacaaggatacagctggtatctgcatttttagtaattaagtagtttagaacgatgcattttcttttttaaaaaaattgtagggtaaggctagctgagttcaatttatgtggaatgaagaacacgtttaatgctgctgctgttgactttgtttttgcattaatgatgataggtatacatagtatctactgcaatgggcaaaaaagtgtctttagcatttgtaagatgcaacaactgatactttcctgttctaactatttcaaaaagctgtgataagctacaaaactctacctggatagaaactttcttgaactgagacacttgttggaatactctacttatcttattaacagcatgtctctttgtttccacattgggctacccgttctcatttgatcgatcatgaggacttcctatgtgcttagatgtgttattaattatatttcgttctctagtgacttaagttctaacaaccaaccaaccgttttatctcaacaggggaggttcatctctaccctgtttctgttaagacacagtctggtgaaaagcttgagttgcaggtattttatatacaaagtgtgctgtgtctctcagtctgtactggttctgtgtaattcgtatcatgatattacttacagctaagccctggagactccgtcattgatgtcaaacaatttctcttggacgctcctgaaacgtgcttctacacatgctatgatttgttattgcacactaaagatggctcaactcatgagcttgaggactataatgaaattgctgagattgctgatataactgctggtggctgttcattggagattgttgctggtatgcaattcaaaattatcttttttggatcattctcttcagttgttccttttaaaatttgacgcaacgatttgtgttttgttctagcgatatatgatgagagatctattaggtcacatctccgtcgtgtcagggaattgctatccctctctagtcttcatgtatcactttccacatcccttgctcttcagcaagaatctgcacaggaaaaatctgcagatactgcaggtacaacccttggttttgccctatgctgtgtagtttattgatgacattctatattattaggaattttttgcatgtcactgattagtttactaatttacacgcaagttttgatgttctgtcttttctttacttaggagattctgggaaaacggctaatcaagagcttgatgggttgaatttcatggaggacagtactggtgctgtcattaatttgttgccatctgtaccagcagagatcaaatgcgtgggtagcatagttttttcttcatttaatcctccgccaagttataggaggtaactctaatgaccgcatattccgcacttgtgtcatttatttggataccttagaaagattggtcaaatataaggctattgcttagtattttgattctccatggaattcacagtcgttgatcctttcttcagattgcatggagatctcatttatattgatgttatgaccttagaaggaaacaagtactgtatcacaggaaactccaaatcattttatgtgaactctagcaatggaagtattctggatccaaggcctagcaaacaggctctggaggacagcaccctagtcggtctgctacaaaaaatcagtgccaagttcaagaaaggttttcaattgctctcaaatatttccttattatgtcaaatgactactcttaagtttctataacaatagtcgggcaaatcttatgaaggttttcgtgaaattttggatcgcaaagcatcagcccatccttttgagaatgttcaggccttgctcccagtgacttcttggttgggagcttatcctgtgccaggtgatttattcagtacattccctgctcacaatttcattctcttttctgtttgtactaaggttttaatgactatttgaagtgttccgcttctggtatggtcaaatcttaagctagttatgaacatgttttctgccggcaggcagaatggtttgatgtgcacaactattcttatgttgtttctacttctacaactattgtagcgttgacttcagttgatataccccataatcattgccagattcttttcagctgattctgaccttgtctgtgaacctttcatccttcctattttccgtagctctttacgtcgatcttctttgctaattattcttgtttttgggactgctattatttattgtagattactccatgtattttgtctttttgtgtagatgctgtaatatagcttttatactccacatttttgtgttagcagaacatagaagggatgcagctagggctgaagattctgttgtgctgtcatatggaaccgaattgattggcatgcaaagagactggaatgaagaattacagtcttgccaggagtttcctcatagcaatcctcaagaaaggttgttacctacctttgcattcttggattgcctatttatatcatctacaataaatatttctggctattgtaggatattgcgtggcagagcactttataaggtgacatgtgatttcgttgatgctgcagttaaaggggcagttggtgtcattaataggtgtatacccccaataaatccaactgatccggaatgttttcatatgtgagtaagctcaaatataatactatctgaactgttagcgaaacaattcttatgtctgtgagtgttgtttggtttttgtatggaattttggactagtgttatgtgaaatttctctctcggaagggtgtgtgttgcatgtgactgttaggaacttctcttttgcacttgctcatcaggtttggtttgagtcatctggcttaactgttttttaatgatgttttaattcccatttagagatgcttacctatgctcttattatatttcaggtatgtacacaacaatattttctttagtttcgctgttgactccgactatgagcaactcccaaaggaccagaagccaaatggtcaaaatggatctggcagaagtgtgataggctcctcagatccggggtctaagccaaataagaaccatgcagatcctagtggcacaacaaattcaaaaactgaagaacctaatggtgttttggacaatacttctgatgcatcggcagaggcacagatagcagacagtgaacaggctacctatgcttctgccaacaatgacttaaaaggaactaaggcataccaagaatctgatattcctgggctgtataatcttgctatggcaattattgattacagaggtcacagggttgtagcacaggtatgtttcctgattactatatttttttttatgttctactggataccttttttctcttgcacatgttaattgcaataatctttctatattcttctgataagtagatacctagatttatactacctctgtcccaaaatgtagcaatttttagcacagtaccttgtcccaaaatgaagctttttctctacctatactctcctatcaatcaatcacaaccatcctccatttaatttgttacctattttgtcttctcaaccaatcacaactatcatccatttaatttgttacatattttttcctctcaaccaatcacaaccttcatacaatcatttcaacctactctcttaatacccgtgcccacctaaaaaatgcttatattttgggatggtggtagtacccttttagcatgatatatgatttcatacagtttgctgctgatgttgttataaatttgatcattgcattttgttgtatgttgttgtttcactctatccttgtcttagtttctctctctctctctcataaaatgtgtcctgttgaaaatgtttaactgagtttttgtttatttgccttgtacaactgtacttgtcttgtagagcatcatacctggtattcttcaaggagacaagtccgattcccttctgtatggttccgttgataatggcaagaaaatatcttggaatgagtcattccattcaaaggttggccaatatgttccttttagcatgcaaaatattctctgtacaggagtaatgaattttcttcagtatatgggctctcaaaacttatgttctttagttgatggtggtgttatcttgttgctagacgtcgtacagttcacaactaacgagaatttgcaagttaatataaactggttgttatgttaattaagatgatgttgcttaataatgatcatgatgggtgcctgtttgatatattttgattatcagtggtgatgctaaaactgcatgttgtaccaagtatggtgactaaagaactattcttgatatttgaattcttcggatacttatatacttttacttttgtttccctgtcaagtttttcacaagcttatcatgtggcttgttagatgaaaatttaatggtttgcctgacttgtgcacaatttgattttctatcaaacggtaatgcaatttttgatgttagccttacttagtggcacttaatttccactgaagatcattatggaaattggaatagcaagtcaagaaagattttttttttgtagccatacttgattcttggtggtagtgattaaccactctgatcatgttatacagcagtggatgtactctgtgccttgtggtattcaaagactatccttatttcttgatgatatctattattttaggtggttgaggctgcaaagcgactccatgtgaaggagcatgtggttttggatggttctggtaatcctgtaaaattagctgctacggttgaatgcaagggaattgttggaagtgatgacaggtcaaaatctatatctaaaaacaacaatgtgctttttctttttctaaatgctcagtggttcttttgggtgctggagatcctgtataagcttcttctaggtgttttgtgtgtgtgtttgggggggggggggggggagggggtgcctcttttggaacctttataattttgtcaactgcccaaacttgtactcagtgaacacacactacagtgctaatgttgatatcctttattgaataacatgatcctttcccctttttcaactgtatgcattatattttggatctgatgagagtgacccctcgagattctaactacattggactacagcaccgcttctgtgtgttgaggcctgaacttgtagcctcattcattgaggtgagctgatcccgtggtctccctttttctgcaaagaagatggttcgctggtatatgatcagtcctaactatctcatatctttatgtaagcaggctgaatccacaaataaatccactacacagaaagttgcagatgctcctggagaatctaatgggcaattggtaagtacttctgatgctacggttggtgcagaaatttattatggaatactttgtgtttgttcaaaagcattcattcctaaattagtgttacagtcaagtcaaactggatatgctattttcctttataacctaaaacacattgccacgtttttatttctcactttcatatcttcccttattcagttgcatggtaatgatttgtttgtctaaactctaaagttctaacttatccaatatcatgaagcaaaatgattttcccatttttatttaacagtttatgggtgttcaatttcccttgtggtactcatatgcctaaaattctttaaaaaaaatgtggttattcttgtttcaaatatgcaaactggaaacttagtccacctatttcaggctacaactgcggaaggacctgccaaatctgatgaaaactctgttcctagacctgataagtttgatgaagactctggtcctagacctggcacatctgatgacagctctgctactaaaccagctgaacataacgagtcaactgcagaaatcctttttaatccaaatgtgtttacagagtacaaacttgctggtagtccagaggttagtcttagaactactccctgcttgatatccctgctctaatttattgacagcctactctttgctttcttaggagattgcagcagatgaagcattggttaaaaaggttggttcgtatcttctagacacggtgataccaaagtttgttcaggatctctgctccctagatgtctcccccatggatgggcagactttgactgatgtgctgcatagcaatgggataaatgttaggtatcttggcaaagtgagtctctgaactgatccagctggatgtgagttcattgcattttatgtatagtatgttcattatctaattcctttctcaggtagctgacatgatcaagcatttgccacatctacggggttgttgtcttctgagataattgttaggtcggcaaagcatgtggtcaaggtgatagatctatcttaccagctgtttgtttttatgatggaaattctttgcatttatttctttaataatttctaaaggatgagtcatactgtcacccagactcatcctgctgtccattcaaacaaatgttatatggataagattattcatcaaaatgcataactttcctgttttaccacgtttaataagaagtcattggaaaaactatgccaatttgttgaccgtactgtttgttgttcccatcccaggaaatacttaggcaaagcgcagatcatgatattggaccagccattgctcatttcttaaattgttttattggcaatgttttggcaccttccacaaaaggtagtgttgacagtacggatacaaaaacccaaaaggtatgctattccacgtgtaagaaactcatgtcatcacttgtattctaactgcaactaatggctattcttttggattttcaaattggtagggtcatgagaagactcaaaatcaaaaatctgccgagggacagaaatcaagcctttctgcttcttcaaagaacattgtgccaacattttcccatctaacatctgatgggatttggtctaacattaaggagtttgcgaaacataaatatctggtagtggctattgcttcttttgtttccgtagttttctatagatgccatcaatataacactccttttatttagtttgaagtgaccgatgatgctaagactggtgctaaaagagttgcagtactccgcaatctttgccaaaaggtttgctttgttcagctctatattcattgagtttgctattctctttcagagaaatgtttaatagtttggctgcaagtagttccaacaaataattcttatgtgctcttttggtcaattgtgacataatctgcataataggtgggaataacaattgcttctcgcaaatatgacctcgatgctgcagctccattccagccttcagatatcctgaatctccaaccagttgtcaagcattctgttcctgtatgtacagatgcaaggaatcttatggaagcagggaaaatccggatggctgaggtatgtatggagaaaatccagatataattttcccgtgaaatttgtgataacatgttttgatggactcatcttatactgattaatgcttcctctgttgacaaataagtgtcattttggacagtgatatgtacaccaatgcacttctttacttgtatagaacctataaaaaatatatatcatagctaaattgttttgaaactattttgaagacaaatctaaccatatcacttttaatagttgatttgaaatgttcaaaagatgcttgtcacttatttttgtctggagggagtatcctgtttaattttctgtactcgtggattttacaaatttttatacctgcatttcagggaacattgaatgaggcctatgcactattttctgaagctttttcactacttcaacaggtatgcatcacagctatattacggcaaaaacgtggatatttgatttctgacatttatttatgacctttaacagattactggtcccatgcataaggatgccgcaaactgttgccggtaacacattagcttatttgtttaggcatctggcattttctagatttctctttttgtttttatgtacataagtcatccataataaaatctttggattttaatttgttttccctttgactgaaggtaccttgctatggttttgtaccatgctggcgatataccaggagcaattgtgcagcaacatagagaacttatcataaatgagcgatgccttggtctagatcatcctgatacagcccacaggcatgttgttcaatttcaatttttctatagaattttgatcttgtccttgttgtgaagctaaatttcacgttattgatacaaaactgaccgcccatcctagatcccaacatctactagaaatctttaaaccaactagagaatgaatgtatctttgtcatatgtgatattaatttacaacatcattttctttctttcaatttgtgcagttaatatcttttatattaactaaccttgtgtgttattttctttttcagctacggtaacatggctttgttctatcatgggcttaatcaaactgaacttgctctgcgtcacatgtctcgcacgttgcttttgctaagtttagcatcaggtcctaatcatccagatgttgcagcgactcttataaatgttgcaatgatgtaccaggatgctgggaatatgagtactgctcttaggtatcttcaggaagcactcacaaagaacgagaggcttctaggaccagatcatattcaaacagctatctgctatcatgcccttgccattgcattcagttgtatgggtgcattcaaactttcaattcaggtcagttcaccagaaagatgattggtaaaaagaatactttgaaaacattgatctcatgtattgattctgatggcagcatgaaaagaagacctatgatatactggtgaaacaattggggagtgatgattcaaggactaaggatgcagaaagttggttaaatacatttaagtcgcgagaacagcaggtataagtttaaactgtatttggatttgtgatacttttaacaagcatgcaacatgttttatgtatggcatagtattgtagttttgtattttcttaagaaaatgtatacggctattttttatttggtcctgtatctcttgtacatctaatatactccctccgtttcacaatgtaagtcattctagcatttcccacatttatactgatgttaatgaaatatgaatgtgggaaatgctaaaatgacttacattgtgaaacggaggaagtaccaagtaatgcaatgcaaaacctttgtgtaagaaaatcttccattctgctttgcatacctttatcttcatgctggatccggttttgcattgtccatcgaagacgtaactctcattttgctgtacaggtgaatgcccagaagcaaaaaggtcagcagggtactaacccacctgctaatcctattgagttgttgaaggtaagtttagttgctgcaatcttgaagtctttaccgttttgcctttgatacaaccctacaattccaggagaatagatagccgtagactcgtagttcctttttagcttgtcataggaagtacagagtgaaaacctccttttgagaatctggcaacattagtgttgcatcagatgatgttgattgaattgactggcagtatgattgaattgacattctcttgttttagttatggaagctttttgccccaatatttgtccctatattgtttgtttgctattctgtacatggattaatccctggcacgcttggtcgtttgaaggtgatggtacattgccacttttttttgggtttctccttgtcactgttaacgaagtatatgtatatggctattagacatctcagtattttgtatttggttcttttgacatccagtttttaccttatgatttgacaggcaaatcctgatttggtgagagcactgaaggcagctgcgaaacaacctggtgaaggatcagcaaatgtcaaccgatcacttaatgctgcagtagttggtgaaggtgttcctcgagtaagaggagttgatgagcgggctgctcgggcaactgcagaagttcggaagaaagctgctgccagaggccttaatgtgcgaagcgggcaggcgcctgattacatgtctaatctatctcaaattctcaactatctgggctcggcgaaggcgcctactgcttctggtagcactccagccactgccgctgctacttccgctactgccagcactcaaaatgcatctgaaggtcagcaatcgaatggacccccacaaaacggcactgcagggaataccaacgggccatcgtctaaaaagtccggtggttccacaccagtaggattagggacttccttggagttgaagaagcagaaatcaaagcagaagtcatagaaagtaacatcagtggtaggtttatttccaacaattttggaattctagggtgctttgagttttttacccacatagaattgtcacgccagcatggtggcagagtaattttgtttgttttttttgaaggggttcttaggatgagttcaataataacaaacgagaatgaagtgaaacaattgttgtgacattgatagactactgatgatgagataaaatgactaagcattctgccttcacaccagaaagctgagtcaagttcgttcgttcataaaattatgtcgtttttgctggaatcgtatttcggtactgcctagcttagttggcagaaaaagaatgtccatgatttggtattgcctatttcttcatgctttttggattgtaggaccattatccagcattggactgtgtcagaataacagtttcatcttcttgaaggtaagaggtagtacaacgattttgccttcttcaaggagatgcagtacgcaggcaaaatgtgctacgctaatttcgtttttgtgtacatttgctactgaataccatatacactaaaataatatatacatgcaagtaaggagttacttttttaagtgtcacgtagcaaaaattatattttattaaagatcatgttttttttttttgtcgtgtatcaagatttggccacttcaaagaagagatgatgacgtacagtatctcataccagaagtttttttttttacttcctccgtttcacaatataagttattatagcatttttcacatttatattgatagtaataaatctaaacatatgaatacgggaaatgccagaatgacttacattgtgaaacggagggagtagcaaattttgtcacttcaaaaaagggatgatgagggacggtatcccatacctaaagggctggaacaagatagttacatttgctgctgaacactatcagcattaaataatagagagtacaatttattttgagtgccatgtaacaaaaatcatattttgttagcatgtgttcggtttggggatcaagtgggatgtgttaggtccatcctagttttttttaggatgggatggtttcatttatgtgttaatgatcttttttttttagtttcagaggatgtggcccacatgtcaagaggaagtggattagattgatccacttttgagggatggagctaaccagatctagagggaattcctttaacggatcattccacttgttccaagccaaacactatgaaaaacgagttctttataatccaacccatcatatccctccaactaaacgcatcatcaatgatcatgatttgaaaggaccttgatgtcgcctagagggggtgggggaggggttgaataggcgttcctaaaaaattaccacaacttcatagcatattagatagatgagaactttcggttcaaatcggaacttttggtatgggattgaaagttccgatctcaaccgaaaggttcagcggataacggaataaaacactagctatggacttgtagcacgaataaacaaaatgtatatgaatcaaaaggtgacaaataagatatctaagcaagatataaggtcaccaactatattaattaagcatgcaagtagatcaggcaaaaacaagctcaagcacaatatgagagatggcaagaacgagcaaaccaagagaggagacacgttgatttgtttcctgaagttcggatccacggatcctacgtctctgttgaggggccacaagggccgggtctatttcaaccctttcctcacgaggttgcacaaatgcactcattggtttcactcttgattttcttctcttgcggaggcgaaagcgaagccttcacaaactttccgtggtacaccacaaccttgggtgctcaccggcgacgcctagccgtctaggagaccttagtccccaagagtaacaaacacaatcgaagatttgcttgctatgaactcgagtgctcaaagtatggagtgaagctcactagctcttaacttctcaatctctcaatccaactctcttcccttctcaaatccccctcacaaaaaggcaccacaaaggatgggaaatggggatagctatttgggtttggatgtatctaatgttgcccaagaacagcagccactcataggaggggtggaggagtttatatacccgagcccctcaaaaactagccgttggaggcaaaagactggaattttcgaaacttacgaaaatttacataagctaaactcagttttgcaaccatttttggaacttccgataattttcggaacttccgaaaagcacagagtaaaacgactataacttttcgctcaggagtccgttttttatgatcttggactctatggaaagctcactcagaggacgacccaactcaaccaaaaacaacgcctaaagccactcaaaagataggttaaagcttgggtttctcttaagcttgggtcactttgagcaccgagacatacataaacacatcgacgttgcatccctcttaatagtacggcattcctaaactcaaatgtaaataggaagagaattataccaataggaatgccttctttccatctttctttcattgtctttagggacgccaatgccataccgtttcaccatatattcttcaaatgattaatgtggttacttcaaatggtccatcatgacaaagccgtcactcgtccttcaccaccggatttggttcttcggcgccaagccccttgcttgcccttcaccgctgcatggtccatcgcgaccgagcatcgcttacccttcaccgtcttgccatagtagccacttcgtatcccacatcttcaatatcttcactttgtcattcttggtatcgttaggtgtaatgatatcacttgagcatcaacacctttgtaatccttgggacctatttctttcattcaactcaataaaattattagtcccaatgatccggttgtcaacatccacatgttgaccaaccgatcgcatgtataaaaggatataaataaatgatgagtatcaatcaacaccacaagtgtcatatctcaaacatatgctcacatgtaaagatctcaattaaatgaaatttaataacttggatcaattacatgcataactaaagtataggatttgctcccccaagatgtatgcatacaaaatgtttgtgtcaatcaagagtatgcataaaaagaaggaaacattaggagctaatcctatataagaatagaaggcatttgtcaaatataggcattaaaataaaggtataccttcatcatcttcatgttctcaatataaagagactaaacaagagaaaagactcaaacaaaacattagtctcacatgcatatgtcaatcacgtggaaatattatatatgaacatatcaatatgtatatggagagaaagagtgatacacatagcttgatcttcatacatttcatccttgtgatttaggtccaccatcaatgaatgattctatctcaactcatatgaagtccgggaatcacctctcacacactccactttcatatccacatgagactgggcaaagaaatgcttataaaaacattagtctcacataattggatttgtcattaatcatcaaaaccaaattaatggctcgaactttcatgatttttgggtgtccataacaaattttgccatcttcaaagaatagatgttgactgttgagggacttcccataccttaaaagggtggaacgagatggttgatattataatgatgtcaacatatctgatttggtcttacatgtggtatttgagtggtaccagatttgatatttaagtatcagacatggtactctagaaaacaaacgtgctacctatgtattatggcctgatacctagcatcgctagaggcgaacgccgtagtacatgcagagagaaatgatctcatggagtggcctggcacaaagctcaagtcacccaatatgcatgcagagcgccttgtcacctatcgagcagggtgcgccaccacgcgcctttcctccctcgagttcaccatggtcatcacagccaaggaagaaactactgtcgcttccacgaacactcgaacataacaatgtggctcgatggggccgacctggatagagcatggttacacgggaagtctttgaggcaaaccgtcgggcaggcagcatagggcacggtgatgatgcgtgggaaggcgacggagacgtgtccatgaagagatcgctatagtggaggtatgcctgcgagcaacacggggaagaagaacgtatcacttcgttgcataatttatcctgtctatatgtcccactttcttaagattttcgggtgaatttcactttgggccctctttttttttcactttggaccatttctagggcatgtttggatagcttaggattacaaaaagcaactagttggtattccctccgtttcataatgtaagtcatttgtagcatttctcatattcatattgatgttaatgaatctagacatatatatctatctagattcattaacatcaatatgaatatgaaaaatgctagaatgactcacattgtgaaacggaggaagtagctagcttccgagaatctaaaaaactaggttttctagtttctagcttctggttttctagtttctagcttctagttcattttttaaattatgcaactatagcttatcagaatctagacgaaaaactaaactatttgagaagcttttgattctgggagaagctgtagctatgagaagcttcccaaacgagctagttcagggccagtttggtttgaggcctaaattaggcttgctaattttttggcaacctcaacaataattgtgtatgtttggattgaagccaaattttggcatgcctatataacataggccatttcaatagccaaattagttaatttggcttcaatccaaacacatgttggccttacctgtcatgccaaattttggtaaggccaacattggtcacaaaccaaactggccctcaatcttttcactttggactagctaagtttatgtttatttcactttagatcacccccaaacctccactttaacacatcaacgacctccaggatgttgactgtggcacgctaatgaaatcctccacctaggatagacatgtctagagaaaagagtcggcatggtcaaagtgtaacaaactaaagttagataatctaaagtgaaaagattgaattaagggtggtccaatgtgaaactaaaaggtggcccaaagtgcaccgcactctagattttctgatttcaaacgggaggaccagtatcccagtatgaaaatttcagtatcacatgatgttcgaggctaggaaataattattgtgatttatgatcatgagaaagcaagcaaaaccagatgtttcaagcatcgtgaaggcgtttattgtgatcgatgatcacgataaagcaagcaaaaatatttattccgagactgttgtataggtctctctcgagcacaacaatgccaaggatttgcaaaggagctagtacatcaacaaaacagacatgaaagtaagcatcagcttcaaaattcaccgagctgacggttttgcaggacttgggctacacgtacagaacttcagtcaatgagcgggcttattctcgactgtgtagggatagtactctttgccattgtccactctggtagtgttgccgccaacgtccagcgcagcagatgtaaaagccaggcaagaaccagctatgagcgcagaagggatgctccttcctgccaattgggcatttccagattaacagacatgagtctttctagccaatatactgaactataaaattactaattgattggtgaaataaagacaagactattacaaatacgatcattacatgctggcttcgtagataaccattgattgatatgcagaggtaaaaacaaagttaacagttcgtgagatgtctgagtactacccctttagtaaaactgatacacatggaacagctgttcaggtacaaagcaagaacatactacgcacagcagaaaaatatcatggggcacctgttaagaatcccctataaaaattttcattgggcatcaagtgtttgtaaaatctggattagtcctacttaggttctttgtttgcaataaaaatacaaccaatagagcatccgaatagaaaatgatcaagccaatgacatcataatatcattctaaagcacattgtcagctgatactagccaatgacatcataatatcattctgaagcccatgacaccacagctttgtctactttaccacaagaaaatgctttttttttgggttgaatggtaaacatatgccattattcaaagttgtctctaacttgtttcataacagttatctcgtgatgctaatgagttccataagcctaactggctgttagatctagtctagcatcatctagaagaaattattgcataagataaatatcttattaacctcatagcaacctcaatgcaagattatcaggcaaacaaaagtacttttatggtgaggattagctcatgctcctgaaagcatagcctgtttagaatccatcttatgtttaaaaaaagggagcaaaaatagtgtcaaatatttctaacatatgtttgacccgtatctgtccacacaataactcttactgtgtagtcaccagaagccaattgatataggagcacaaactatgccatcatccaaatttaggatgaaccaatccaaaatgctccaggtatctaatggtggttccttgatcaatacaccttaggttagtcacatgtttgtccacatattttctgtgcataagcatgtgactagcaacctatatctctaccacacccaccaaaaaatggtcagcctagtatagcagctaactcaagcagtcaacatttttgaacgaacgtgttcaatcctagatggaaatgattctcatggaactattgtgcatataaactgtgtttaatcctaaaagttttgcgcttacgtgtagaccttagtgatacaggaaccagcgcgacgatatttttcaataagttaacatgaccaaggtaaaagggttcctatatcttaaggtaatagtgttgatgatctatggaacacgaagtaaatattattgaatcatccaatttcaatctaagtagaaaagtccataatgtaaataatctagctaccagttagggtttaatccgcctgaaaacacacagaacacagacactagcaagtgtgaatgaatgcaaacgtgaatgtgttgaacagggcgagcagcatcagctaacctttgtagccgaatatggtggcgccggcgacgaaggcgccgacggccccgttgacgtagtcgttcttcttgcgctggctcagcacgagctgctcgacgccgatgtagaggcccccgacggcggcgaacgtggccccgtagctgccgcacatcttgagcgtccggatgagccccgggagcgcgacgtggcgctcgacccggggcacgtcgtgccatgtcgcgacgaccgtgccccagatggtccccgcggccagccccgtcgccgcggccttcaccgtcttcgtcaccggcgtgtcctcctccaaccccatccctcccttcccaacaccaacccgcccgctcctctcctctccactccctgcacgaacagtaacgtgagccaaaccccctagaaacgggatcgagatctggtcgatctgagccggagcgacgcccgcggcgagcggcggggacaggaggcggggcgatcgagcggaggcgacagcgcgtggcttacctggggggaaccctccgcggcgcttgccggcggcgaaggatcaaaaaattgttgggattttcgggggcggaggtagtgaggtaaaaatgggggaatcgcggcgtggttggagaggagaggagagagggggtgggaggggggacggggcggcgtggtctcactcggctcggcctcggcggcgctcgcggctcgcccgctcgcccgctcggccgcaacgttggcgcgggcttgagccttgggcctcctccctacgtgggctgcccacttcggctcgcgcgtggcttcacggcctcacgggcctttcactcgtgtcacgggcctcacagccatgactgattcgtacacttcaatgaaactgagtttgtatgagcataagctaaaatatgcagtagaaaccatattgaaaacctaggtattattataggatataaaaatagacgtctcaaatttatccatatcattataagtaaaaataaactcacgatgacatgcacaaatcttaaacgttcatttctttttcctacaatagttttaggttttcacaacatatctatccgtataagttgtgtgcctcaaaattacgtacttttatccatttgattttaagatctgtgcttaactctatctttttctttctttatgcttaactctctgatctctcacgcggaggtaactgtcaaatatgtatgcggagtgttccactgttttggcatggaaatactatgaactttggaatagtagtatggcagtcaatcatggtggtttttgcagcacgtggagtcccatatctatttggctccttccttgggtagccgtcaccccgctctcccccgagatgcagagttgcccaatgatgccgcgccggggcccgaaaccggtggagacgcagacgcgggaggtggcggtggcggcccccggcagccgaagtcgccagcgatccatcatgatgtcgcgcccgcgaccgcgcgacagcatcacccagacacacaccccgtattccccgttccggctgccaccgctcgcggccacgtcccgcgccgcgccgcgcacgtccctgccactcactcccgttccgagagaccgccgtgccgaagtgccaacccaccgcgggcggggcatggtgatctcgccgtggttttcccaaccgtctacgcggcgcggtggcgtccgtggcgtgcggcctctcttccagtcacgagcggtaaaaagtggcgcggctttgccgaaaaggccccagccgcttggcttgcctgccgcccgctcagctcccgcgtcccgaccggagacgacacgagggcgggtcaaggcgaccagacgaatcggcgcctctgatgaatcgcgctctgctttcctctgcgctgattctacagtgaaacctgcatcgatgccacgtctccgtgccaaacctcgccgtgtcttcggcgtggtttagttcccaactttttcttcaaacttctaacttttttatcacatcgaaacttttctacacatataaacttctaacttttccatcacatcattctaattttaaccaaacttttaattttagcatgaactaaacacacccttctagctctagatgattatggtgcgcgctcattgcagcctgatgccactgctgggcatggcaaagcgaaatgaccgacgagatgcttattatacgttggatctgtcctcaggatcagcacatgactggtaaggttagtttggtgctaccgtggtggtggcccattaaccacgtttccaagaccagacagtgcttgctttaaaaatactcttagccactgaaaccattagcttagttttgacttctacacttaacgccctcggtttatttctcaggtttagtactcagccgacacaaaaacgtttgtaaatacggcgctatcaaacagtgatacaattcagatgagtttataccaaaaatattctatttttgatgcaaaaatttggtttcgaagtactcctgatgcaacccaaccccgctctacatatataatggtagaccaaattcggttttacacttgtacatatatacataagcaactgtactgtgctgtttttctcaagtatgaatgtgaaatatgacagtatccaaatggagataaaaatgtttagaaatacagctctaattaaaaaacaaacagactggattttcactactcagaagataaggtaagaacaaacctatccagcgttgccaggctaggaacaccgtctatttagcaactaaactgagctgctctaagaggcaaagagaatcaagattgcaggaatttctgctaatatcaccagctgttgagagctctgctacaagcaggccaaaatagtattcagcttggaagagcagctgaacacctgttggtgtacagtactatcagttcatttgttttgcctcaacattggcaaaaccctgagcaatcagtacataattttgcttacatttcgcagcattgaggaactactgaagagaagacgatgagaaaaaaaaaatgaagtctactgaatactgaaaaattgtgtagatggactcacttgcattctagccctgcctccgctgctcgcctgggcttgtttttgcgccggcttccaatctgcctgaatccattagtcctagttgattcatcactgcttgatcgaacactggaattactctcttccaggacaagattggagctttctttcagctgcctgcctctcttgttaccagcagcagatgcagtggtgttcttgtctagccttgatgccttcagcttaacatcatcaccttctacttcttcgccatcaattacattgtctacaaaattttccacatctacttgatcaatcttatcggcgaagcgcttttgtggccttcccctcctctttcttgcaggcatagcttcttcagcgccgcttcctttgtcttcatggctccggacaatcgttagcttctttcctctgcctcttcctctacccatctatccaacttagcagtgacaagatttattcagacaatcactgaagctgcaggctctactgaagttgctctatgtttttctctagttgctatttggaaggaaagtactcaatatttcaccgagatacctcgcgatggcgacaatccaatcaagaagataggctagaaatctgcagtcgtaataccaagaacaacatgctgttacatctaactagttcatgatgaaatgggttcttggggtgcagaagcaataaagtttgaggtctattgagatccatatcaataaagaagttgcaaatccagatcaagcaacataaatatccagatgaaaactatacaaaacagcaagcaatacgcatctatcaagataagtttaacaaaaggattttttttttcgatagagaacaagaaacataaaacaaggaccgattcaatatcggaaccattctttccacggatgacaagcaagaaactcaccttccatatagctggcgtccactccaagcagcatcatgcatcccatttcttcatgtttggtagccaaaaaagatggaatttttcgcaggtgctacaggaaaagaaacgctgggtatccaatggatcggcggtaatattcggtttgcgatgccagaagtacccgcggatcgggaggtttcagcaaagattgggatgtggtgttcaggaagcaggagaggactcagggctctacaaatgaacaactagtgctctggggtctgggagttctggatggttgggctccaatagcttctggggtagcagcagcagctgcactggctggggtttgtgtgtgtgagagagagagagagatttggttcttctcatgaagcttttttaatactacctacgtttcaaaataagtgtagtcgtgaatatccatcttatttgaaaaatttatgaaaaaatttaaaaaattttgttacacataaagtactattcatattttatcatctaatagcaataaaaatactaatcataaatttttttcaaacaagacgaacggtgaatagtgcaaaactgcacttattatgggacgaagggagtactgctactcctgtactagtactactactgaggagtcatttgctgtttgtttatgcttttatttacagcttaccaaccgttgaaaaatactgagagagagtgtgtgttcttggcttcttgccattttccagattaaaaaagcaaagacagaaggatccctagccctagggaagcggtttacttttaccatgatgggatttttgttccatgtttctggatgtttaaacacctaggacagccagtagtaactcaacacggcaacacctgacaccctgacgtccaaggtcattttgctttcaaagcgatgccacagttctcgattggctccagcttccaggcgagcaatgctcctgtactgtacaggtgtttatttcagatagagatcaatattttgttcatggcctttacctaagaaaacttcgtgtttataattcatttgaacaggtcaacacagtttttgttcatctctactccgtactgtgcttcctagtgcaagtcatgcagatgccctcatacttctcaaacagtgctaagttaaaaagtttagcagtatagtatttcagagtaaagaatgatcaggtctcttctatttactgcaataccatgaagagacaaatcttagcacacttcagctgctgcagcaagtggctgtattaaattataccgtatcctgacacatgctatacttttttattgtattatctcttttactttgaatttgaattcatctttttatacagtttcttatcaaggtagccaaccaggaggttgtactgatcgctagtgcaatagcactactgtatctctgtattactgtactgtgtatcttgagatgattctctcaagcatttatacagaagacgtacatgttcctcttgctgtcaggtcatcattatataccttctcccaattaaccgtccttcaattctcaccgctaacttgcaaacgaggcatgcttgttttgacaagagcttgttgaacaaacggaatttatgaacgctgctagtactcatttgaacaaacggagtacattataaaagatatagtctatcaattatattattaaattatattattaagacagttttcaaaggagaaaccacgttcgctgtgggcaggggtggatccacagtctaacgaccggggtgatctgacaccgatgacatccagcgaatgcacggtgatgctcaaattctaccagctgtgaccccggcataagatggtaaatgaccccagccatcgtcttcacctggcacgtagtacgtgaaactaaaacaatttacttggtggtgttacgatcctagttgattaatgattcttttattagcatgcacaaagcccgagtcaattttcttttgtttcctaagcctcattgtaattaattgtttcgtcgttgtgcttttgcttcgtcagttaagcagttagtactagctaatttcagatttatacctctttgtatgatgaaaggaaatgctcttagcctatttcaattatcattcattcgttgctggtgatcgataaaaaacacaagaacaactttaaaaaagattttgcattaatcgagagaacaaaaaaatgatctacctagtcttttagttaaatcaaaattatagcggtgttcatttagatacaggaattctgctctcgaatatcataaaagtgtagagttgttattaggctacgttcattcacaagccaaagagaggagatcactcgtttttcatgcatacgttttttagactgctgaacggtgtatattttttcaaaaaaattctttatttttttaaaaaaaaatcatattaatacattttctaaatttaaaataactaatacttaattaattttgtgctaatgataaactcattttgcatgtcttctttaatcttcttcttttccattctgtcaaaagctttaagttgatgaccccggtggcctttaatcctgactccgcccctgtctgtgggggctaaaaattcccacattaatcggagaaaaagaaaaggagagtccaggtagaactacaattcaaaaatagctgaaattcggaattaaaaataagcaatattaaaagaagtgtccatataagaacccaatacgagattaatcgaaattcacaataaaaataaaataaaatccgaaattagaaaataaaaggagagtccaagtagaaatataatttaaaaataactgaaattcgtaattgaaaaataaggaatattgagataggagtccatataagaacccaatacgaattagttaatattcggaataaaaataaaaataaaatctgaaattagaaaaagaaaagaagagttcaagtaggaatacaatttaaaatcaactgaaattcggaattaaaaataagcaatattgaaaatataaattaaaaataagcaatattgaaaatatatgaacccaatacgagattaattaaaattcataataaaaaataaaataatatccaaaattagaaaaataaaagagatttcaagtaggaatacaattttgaaacaactggaattcaaaaaataaaaaataaaaatattaaaagaacactatactgtattaattaaattttgaaaaaaaataaattctgaaattaaaaaagaaaaaagaattcaattaggaatacaatttataaataacaaaaattgatgataaaaaataaagactattggaaaaaaaagactatctaaaacacatgacgagataaattaattaacatgcctataaaagagtagagtggtagcggttgatacggcatataaaaactgttagtaaaacaccaaattgaatcctaatgattattaaaagaagggacgacaggtaggacgtgaagcaaacggataaggctgttgccgagacttctagaaagtaaaaaaaaacccattgataatcatattcgattttaaaaatcttaatgataacaaaaacgagaagtagagtgcggcgtgtataggagtacagttacagagccgtcgacagttggtgagacttctagaaaataaaaaatgaattccaacgatagttatgttctatttttagaatcctaatgacaataaagaataggcggcggatgggccgtagagaagtatagtggcattgtttgacgggacttctaaaaattataaaaaatgaaacccaatgagacaataaagtctaaaaactataaggtccaatttttaaaggttcggaacttctaaaaagtaaaaaaaaaacaatgataatcatgttcgattttataatctcaatgacaataaagaagggaggcagcgggcgagccataaaggagtataatggcaaagccactgacagtttggcgggacttatagaaagtaaaaaaatgatcccgaacgataattatattcgatttgtaaaatcccaatgataataaagagaaaagacagtggacggcccgtagaggagtataatggcagcgttcgacgggacttctagaaattataaaaacgaaacccaacgagataataaactcaaataagatccaaattttaaaggttttaaggagaatgaataaaaatagtggtagaccgagcaagcaaataaagaagtatctgataaaagtaaggggtagcagctgatgtgacttttaaaaactatataattaaaagtatagggatagctatttaataaatcttaagtaaaataatactgaaaaagatatgattttgtttggatgctagccgcgcaattgcgcgggccatccagctagttcttttgaaatttagatatggtttggatagggggggggggtcatttgacctcttcatttcggatatttatcatcggataagttcatgactcgtgagcgtataatccagtcatcaggatacatgagatgggcaagaaaagcctgcctgtttcattagtacctctgtatcagcatgtgagtctcatcagtatcgcatcagctggggaaacattgcactgaagctgcgatgcagattttacaagtaaagcaaagcaagttaggaccacactcttgagggcactgcatgaccacaccagcacaccatttgctgacagataactaaaagtactgtagacaccaattttctgtagaagcataactatgcaagttgagttagccatctcttagctcgattcaagtctaacctatgacgagttaactggctacaagcttaaaaaacttgcaagctgcaagtcttttttctgcaccagtttttgacagaaagttaactggcacttagctcttggtaggattgcagactcaacaacagcaggagaatagcaaccttgcatatgctttcccatcttagttggctcatcagtcaggtcttaatagctgacaaaacccctcaaacaacacagccgaatctaacgtggcccgggcaaaatgtttaaagaatatactttggatcaacaggattctgaaactgttaactcggttcttcattcatcgtcacaaaggccaccaaaagcctgacaacaaaaaatggatgagatcaacagcatttatataaccaagataaagttacagttcaacaaacatataagacttcgacagacagaagtcctacctgaaccaggaaactgttgggttccattatcataaaatgagtatatattttggactggtaaatggcaaggatattgaccacttgcactcacaaggagaagcatgtacatactgaatgggcaacatctggaagaaattgatcacagtgcagggtaacaacttgatgactgaaaccatgaaatgtcatatcctgtaaatgtattgtatctgaaactcatcatcttacactaggcttcgaaagaaacacggattgaactaaaattacaacaccaagtgtacaattacaagatgagaaaatacacaccatgaatgcactgttcaatagcttcttttgtttgtcactaactcactacaatcatgacaaatttgcacacagtcactgtcaatgctatttgggcaaggatttgatgaaattaacaataaggtcaaccattcgtgcatcaaaagcagggccttccatttggaagtggccagctccttcgatcaagtgagtatcaacccgtcctgctgcattcttgagcttgttttgcagctgctttacacttgtgaagccatctttagttcccatgacgaataactttggtttctcagacttgaggatagcattgtggtgtctgccaaataggaccgaggccattagaccaaatgggtacccaatgctaacataaccaatgacctggtcaaccttatcaactgcagatcccgctattggtgctcctgcatcaggaaagtggatatagatatatgactaagcatgatctaacagctgcaagaatggttgaagaaaacttgtatgtggaatatgagtcattatcttaacacaattgttttacacataatcagttatacttgcagcactatctgttgacaacttgacataactaaatcataagaattcataaatcttaaatcataactatatgtatgactttggagtccagggaacagcgcgtgaagaggttcagtttgagtaggtctcagtagccacagctaatgaataggccagaagtaggtacacctagaagcaaccaactaaatgtaaatatgctcataaaaataggttatgatatattgcctaaagtcaggatttgctgaaaaacaatggttctagctgtaaacaagcaagagacgttgcttctgaggacactaggctaccctgacagaagggaaatttcgccattgaaacttcttgtggattactttgcatctgcacagagtcacctaaaacaaatcaatgtgactaatacccaggtaactctgtatttgtacttcaaagacactgaaataataacatgctagtatatttgatgccaaatccataagaccaaaaacctgatacttcagttctgctgcaacgcacaagctgtttctattttcttgcaggtccatttaagtggctaatcgccaattgcatattcagttagatcaatacagtttctaatgagcaaatcacttggtcgattaccataaccctcttctgtgaagcttcggtgagaatgaaacaagggcaccgacgtcatttggggaaaaagaaaaatcagcaacctaccagcggaggagccgacgaggaggacgccgcgcgggttgagattgtcagcgacccagcggcagacggcctcgacgtccccgacctcggtggagccggtgagcgaggcgcggccggtggacctcccggcgccgcgcatgtcgaaggtgacggcgcggtacccgcgccgcgcgacgccctcggcgatcccgcgcagcaggccctgcacgccgcccaggatcgtgtaggggtgcaccagcaccaccgcgacgtcctccgccgccgccgcctccgcccccgccgccggcttgaacagccgcacgctcagcttggccccgttcgccgcctccaccgtcgtccactccatcacacccacccacgcactcccagtccacccctcaccgagctgagctcagctcctccggtcctcccctacctcgatgtgatccgcttgctcgggtggctttccttcccttcttccttaactccggttggcttctggttggtctgagcagtgagcagttgccgcagttatttctgcatgggccgtgatctgggcccataaatttataatgggccgtgaattccaactggagttgtgggctatgggtctaaacgggccgtaaaaatcgtgttagaaggcattaggaataagtgcactttgcctcccttaaaagtgacccgaatctaatccatgaccctaaatcgcaaaaccggatatctcgaccccaaactattgaaaccggtgcaatttgactctcctggtggttttggaggacggttttgctgacgtggtggtgttgacctagtctatggggttgacgtggcgcttaggtggcatttgaattaaaaatgtatactccacatgttgtcattcacacacataaaaattggggaaaattggaaccatgccattataattttacaaaatttgagatatgccatcctgacccacatgtgattgactcatgtgggttctacatgtcatgtcattgagataccgatggtatatctcaaactttgcaaaattataatggcatggtttcaatttaccctaaaaattatggggagagaagagaaagagaaagaaagagagcagggaggaagaagaaagagatagaagatggcatgtggggcccacatgctagtgggccccacaatttttatgtgtgtgaatgacaaccgagtccacatatacgttttaaattcaaatgccacctaaccgccacgtcagcgaaaccgctctccaaaaccaccaaggaagtcaaattacaccggtttcaataattcgagggtcgacatatctggttttgcagtttagggttatggattagattcgggtcatttttaagagactcaaagtgaacttgttccaaaacattagacatgtcggctactacacgggcgtttgagtccttttgttgtttcgcttttcatttttctcgttgatatgcggaccctagatatggctaggtcctgagctaaccggatacagtcatacagctaatatccactgaagtgttcttggtccgttacagtgatcgacgatcgacgcattcacgcaactgtactctgtcaaacgccacatcgacttcaccggcgatattttcttatcctctctgccttttatttttctcccctaccttttgacgggtccagcaacaaagttgtttcttttgtgtctgaaagaggaagattccaacaaaccgcgataagtcggcagcaatccagcatctatcagcgacctcggtcggcaacatccaacagcagcaaaagcgtaaaacacaggagcactagctggagactggagtgctgctaacaggccaagaacgttgacgtgacacaactaattaatgaaagcgacaatgctgcacaattcacttgatctggaggcacgcatgcataaggtgacctggatccagtgataacttatcacttctggctgtatccatgttgatcttttgctgcctctctttggttggactacagagactagagaagtagagagagtagtacactgtacaccagagacgacgacctctcccaatcgacgtacgagagagaaagaaaaagcatacgtacgctttgactgccgcatgcgtgcatgcgtcgctgcactgctcgaccgacgaccgtctcggtgtctcactcgctatgtcagcgaaagcaatagcactgtgagcggcggtcacgcatgtctgcaaaaggaggggagccgcgacgttcgcggcttcgcccgaatgcctggattttgtgcaagattcgttgcacgatcgcgccgtcaggcaatcgagatcgatcggacggcggccgcctcgatcggtgcatgcatgcgttacgtagtttggcaagagcactgccgcatgcatatgcagcggcaggcagagtgtgtgtggccgatttcgctttggactctacggcgcgcgcggtgatcatcagtgcggtagctggctttgtccctagtgtacgtacgccgctgacgccgccgcccgcgacggcgacaggggcagctagcggcgtagcggagtgaacggcatgtgggtgggcgtgcggcgtggagggcgtcgcgcgtgtcggattcgtgagctgtgcgtcggataggcgagaatctagcgtccttataaccagtaggataatcagttgatcactagacggtgatacgtgcagtgcagtgagctggtgtagtgagtagtgtgatctcacgacacgtaccggccgcaggagagtcgtcgtagggacgtgctgcatgccagctaatactgttagaagtggcataataaggaggacgtaattaaacaacatttctttgttatgacgacagtctatagcagctgcatcgctggagcataagttatccgtaagactgtaaccggccggtcgaggcctacgtaagtcaaaggaggaggggagggagaacatccgcgaaggaagggagattttggcattttgcacaggttacagtaatttggaacgatgcagctgccagttgaatgccgcacggatttatatatgcgtctgatgttttacgtactgtcatgctgatgtggttgcgcatatatctagtaaaccaacgacaaattaaactgccaaaactctcgaaatttctgacaaggacgtggcacgcgggaggaactcgagcaacgtgcttgaatatatgatcaacaaggacatttgcatagagcgtgtactggtagtacttctcctcgtttgtaacatactcctcatgcataaaaaagcgcaaccatccatttcattttagttgtttgcatattttgtgtgcggagaatctttgagaggctacggttcggaacttcagagttcagagtacatatggttttaattttgtatccatgggactgaaaacataatcatacctccaaaattaatgtatgtcttacgtccttcgttaggtcgcaatgttgttcaatcacgtcgcgccagcaagcacagcgacccgctttaatttcttgtccttgagatccttttaggacgcttagccagttaaaacgatgcatctcgatcacaataattattttcacgtgtctctaccgtttttttgttcccgaaggaatcgtagtcctggagtactagtgaccatacgaactgcagattcgtgaaaaaaaaattgatcggtctcaccgggtgagttcaagataatagtatctagtttaaataggagtattactgtttcgtttttactgtcacaacttcagaatgtcacttcaataatataagttttcagtgttttttttaaaaaaaagacgattgtcaagatttaaagataaatagtttcttggatagttgtttaaaataggagggagtagcttataacaagcctaaatggcaaaaatggaggacaactaactaaagtgtggtacttccagctcattacgccatgtaccccttatgtactatacgacgcatttttttcgctacgaacagcagtagcattgtcctcgcgacggcgacctaaacctgatcaaccgtccatccatctgactttacttgtactgttgtacacgcactagagacgtgcgtgcgtgcattgttctgacgattaagcatacgcacggtcttacgtactcccggtgaaattcacaggcctctctctggtctactgccaagcacttcacaggatccccgttattttggggccggaaaaggcctaaagggaaacagctggcgcggcccatgcacgctgccacacaaccacagtgccatatgtgtcggccactactcgccccggccccgcaggaggaaacgaaaacggcatccaacaccgccggcccgaccccgacgcacgcccataaatacgcgccccatacaccgcccagacacacgacccgctatctagctagctagcttccccccccccccccccccccctccatttcccacacctcccagtacgcgcgtctccgtcgcgctcgcgccggccggctgcgtctgcgcgcgcggtacaagagatcgttccatcagggagcgcgggtgatcacagcagccgacgcgcgcgcgcgcgcggcagcacggcgtttcaccgatcgcgtcgttgcgcgcgatcgagctaccgcgttgttgtttgaggagatttagctaggtaaggcttgcggtgttcgccaccagcccacacaccactctgatctcgcgccggtaaatgactggacgcctgggcagcagctgcgtcgtcgtcgtcgtggaggtcgtcgcttcctttgtgacgtgcctgtcgtcgtccccgtcgccggagaagtgcgagctgccgccgctgcgcgtccgcaccggagggttcatcagcgaaggtacgcttgcacaaagagatgcgtacgtgttatgtacgtagggccggccggtggtgtggccgtgtgatatacactacatgtgccatcacgtttggagatggtagtggtaccctgtaagttatgaatagtctgatatatgactgtgcactgtgcacaagcttggtgccaccactcaagctccttgtttatcacgtaaaaaaaaggagtttcagctcgtatgggctgtgtaaacacccgactgacgtatgggcccccggaaaaggacgagggcccctttgtcggtgttaggtatcttttcttcagtcgtttcagcttttaattacttgcttagtgcatctctgacaagattgtctcgcacaggttaaagcaaaaaaggcccggaagttttcccttgataaaaaaaaacgagaaagtatccacaagggcgacgatatataacaacaaacagaaaggtaaggtatatccacgggacaatcttcaggcacaacacgagttctagttagtccagttcttcgcttggtgcacgctccagcgtaatgaacaaaatgttatatagagtaagaggcgaaatcagtcgaaactatcatcagcgtcagctttattatatagcgtgatgagccatcaattcaaacaatatcttactaaaggataattttactattcaccgaaaggtacaatatttatagcgtaaaaattttaatatagaaaacttgatatctcgagatattttctcaagtacaataaattttttctttactaaatgattttggaatttcatcggctaaccttggtgatgaacgtagctagctccgccctttatatatgtactccattctaaaatataataatttttagacttcaggatttgtcataaaatataataacttctccattaatattcttttcccaaccaatcacaatccccaccatttacttttcatacatacctccactactcatccaatcacaactctccactactcatttctaattactttcttaataatcgtatctaatcttaaaacttcttatatctgggacggaggggtattattttaaaccaagaagaaacgtttcgagcatgacattgttttcgctcggataagagtcacgcggcatacttgcttcatctgagtactattgcaagtaaagatgaactctggcctttaattgcaaagggtccaggaacatcaaaaggaaagaaagaaactaaacaactgccatctccatgtttctttttgaacgaaaggtcatcctcatgtatcgatggactttaaagtatcgaaccgaaacgatactccagctgacattaatggaagtttttttttttctacaccaaagatgtatatatgtacacaaaccattacgtatgcacctgtacctacgcacacgtgagtgcaaccccttgtctcttcatcggacccatgatgtttattgtccaacataaaccacctaattggtaggtggaaatgcaaacctagacaattattgaaaatgaaattgtagtttctggaactggcaaagctagaaaaaaaaaagagcttaggtgatcggcgttttttttttcctattgtttagttcttatttggctacttgtttcttgaaataaaattttaaatcagccattaggtgatcggcgttttgttgtttgtttggaaaattcatagagcaaggcaatggctccaactgctgtcgattcgaaaaggatttctgacatcactgaagatggatcaatggacaggcgaggaaatccggcagttaaagcaaaaactgggaattggagatcttccatcctcttgctaggtaaagctatgttttactttaattctgttattcatatatctacaaattaactgttttaataagattggtttcttgtttattgaaaaactgcttttcttggattcccaacatgacaacgttggttgttgattagattaggttatgtttcagtcttcaaagaactatgaactaatattgtcagcacatagtgtgatcacaaccttatagcttgttatttgctagtaaattcctacttcgctgtctgagttgtatgcagttcagacttcagatttccaccaactggaaccttcaagaataatccttcttgcagagcttctagccagttgagtggcagccaaacctggaggttgatccaccgttggaaagctatcaattctgtactcttcaggtttaacactacgcgttttgctcttcatccagatttactctgcatgggcaataaccaacctgactaaaaccttacttcagaagaccgattgttgtgaactgtgttaaacctttgtgttcgtattcccgaaaaaaaaaaaagttcaaccttgtgttgcattaggacacttccaaagccatgtgcagaatctacctaatcttgtttttcaatatataagctgttacaagttggatttgggatcgattggacagttaattcaggtgtgttcctgatgcagtcaactatgggctcgtgacatgcgccttcttcggcgtcggggtgaaccttgtggtgttcctgcggcgggtgctccaccaggacaacgcagaggcagccaacagcatcagcaagtggaccggcacggtctacatcttctccctcatcggcgccttcatgagcgactcctactggggccgatacatcacgtgtgcaatcttccagatgatctatgtcacggtacgatggtcaagttaattatattattattatttttaattagctcttctgttgttggaatgatcttgctgaactacgcgtcgtgtgtgttgttctgaactttctgctgatgatcagggcctggtgatactgtcactcgcgtcgtggttcttgctggtgaagcccaccggctgcggcgccgcgggggagcactgcgacgcgccgtcgagcgccggcgtcgcgctcttctacctgtcgacctacatgatcgcgttcggcaacggagggtaccagccgtccatcgccacgttcggctccgaccagttcgacgagacggaccccagggaggcccgctccaaggtggccttcttcagctacttctacctggcgctcaacgtgggctccctcttctccaacacggtgctggtgtactacgaggacgaggggaggtgggtcatggggttctgggtctcggccgcggcggcggccatggcgctcgtgctcttcttgctcggcacccccaactaccgccacttcaagccgaccggcaacccgttgacccgcatcgcgcaggtgttcgtcgccgcgttccgcaagtggcgcgccgaggtgccacgcagcgagctcctgcacgaggttgacggcgacgagtcccagattgctggcatccgaaagatcctccacagcgaccagatcaggtgaatatcttgtttgaacgatgtgccaatgcactttgatcgatttgccgtttgactcaggcatcaaacagtgttgattcgagatatataatcgggagtggattctaatccctcgaggggatatcccctcgtatacctttttcttctaaattcgatgtaaatagttgtgaaaaattctaaaattttttttgacaatgtagagtataatgatacctactagtccaccaaaattcaagttcaaattcgatctacacatcgagaaaaaaaaacaaatttagatataaacagtacgctactattcatatgctgaatttgtcttttttatatctcgacgtgtgagttgagtttggacttaagattttgtggagatgtatatatgtgttgtatgaatgttatcaaattttttcagaatttttcataaccgtttagataatttttaagcaaatgagggaatatccattcgagggattagaatagtttcctatataatcgatgtgcatttggtggcgtgttttggtgttcaggttccttgacaaggcggcgacggtcaccgaggaggactactgcacgccggagaacatgcaggatccgtggaggctgtgcacggtgacccaggtggaggaagtgaagtgcatcctgaagatgctgcccatctggctgtgcacgatcgtatactcggtggtgttcacccagatggcgtcgctgttcgtggagcagggaaccaccatgaacaccaacatcgggtcgttccacgtgcccgcggcgagcatgtcggtgttcgacatcctcagcgtgctggcgttcatcgccatctaccggcgcgtgctcgtgccggtcatgtcgcgcctgtccggcaacccgcaggggctgaccgagctgcagcggatgggcgtggggctcgtggtcggcatggcggccatggtggtcgccggcgtggtggaggtggagcggctgaagcgggtgggcgcgccggaccagccgagctccctgagcgtgctgtggcaggtgccgcagtacgcgctgatcggggcgtcggaggtgttcatgtacgtggggcagctggagttcttcaacgggcaggcccccgacggcgtgaagagcttcgggagctcgctgtgcatggcgtccatctcgctggggaactacgtgagcatcatgctggtgagcgtggtcaccagcctcaccgccggcgacaggcggcccgggtggatccccgggaacctcaactccggccacctcgacaggttctacttcctcctcgccgcgctctcgctggtcgacctcgccgtgtacgtcgcgtgcgccgtgtggtacaagggcatcaagctcgacagcaacgaggagaaggcgaacaagatcaccgtgcacgtttaggcttcgggcctgtaactcgtgacggctcctgtttagatactgggatggcaactaggcttgccgtagtaataacgacgcgtgacagaatcatgtatggcccatgcaacttctctgtcacgactaaactccaggagctatatatagccagcccatgttcgaaccatgtattattggattttgggaataagttcacttggtgaccctcaaaagtgattaaaatctaatccgtgaccctaaaccacaaaaccggatattttaacccccaaactatggaaacctgtacaatttgactccctcggtggttttggaggtcagtttcactgacgtggcggtattgaccggctctcctttacacatggcgctgacgtggcatttagaattaaaaaatatgtgtgggacccatttgtcaatgacacagaaaatagattgtgggacccacgtgtcccttctctctcccctccctcagttccctctctctcctcgccgttccctctccccctctctctctcctccgcagcaggcggagatggtggggcgacctgcgagcggcggcggcacccgggctgagctccaccgtgacgaagacgaaggagaccacagcggcggcggcgggaggcacacgcggcggggtacaacgagctcggcccggcagtgggaggacga

SEQ ID NO: 9872 - DNA, 54113 bp, Oryza sativa
ataggaatcaagtttctgtcaagtgtaaggcagataattgtccttggtacatatatgcttcaaaattgcctggtgaagacacctttaaaataaaaaagtatgtttcaaaacataactgtgggaaatcacacaatatagcacagctttactggagatggcttactaatgaatacatggaattctttagatctgacaagaaatgggatgcacatgcctttcaagattgtgtcaggcgagataccaatgtagaagtcagcataagtaaggcatatagggcaaggagggaggcctacaagaaagttatgggcgatcatgatttgcagtttaaaagaattcaagattatgctcatgctgtgctatctgctaatccgggaagtaaagtttttgttaagtgcgaagtatcacctgagccagaaataaggcctaggtttcaaaggctgttcttgtcatttcatgcttaaattactggcttcttaggtggttgtagacccttcatcggtatagatggatgtcacatcaaacccaacaatggttctcaaatactaacagcacaaggcagggatgccaacaataatcttttccctattgcctttgcagtagtggagtctgagtgcacagaatcttggacatggttcttactatgtttggagaaggccattggaaaaggagaagagtttgggggctgggtattcatgtcagatagacaaaaggtaatggctatcatatatgtctactttgcattaatacatgtcaactgtttttttaacattttgctgccatatatagggactactcaaggcagtggctgaagttttcccaggagctgagcaccgttactgccttaggcacctacatgccaatttttcccaagcaggatttagaggggaatatctgaagggtttgatggaacgagcagcatatgcatatagacaatctgagttcaatgctgctatgcaagaactaaaggttaacaatttgagtgcatgggagtggctaagcaaggttccaaccaagcattggtgtagatatatgttcagttctagagcaaagacagatcttcttcttaacaacataagtgaaacatacaattcaaagatactgggagctagagatgaacccataattaccatggttgagcacataaggataaaaatgatgggtgatttcaataataagagggaaggtgcaaaaagggacaattggcaaatcccaccaaatatattaaagaagcttgaggcagagaagagcgaggcaagatattgcaaatctgtgtgtgctggtaggggcatttggcaagtgtccgcatttggtaatcaatatgtagtggatttgaacaagcacacttgtgggtgtagaaaatgggatttaactggaatcccatgtttgcatgctgtttcagctattcaaggtttcaagcaaaggccagagagctatgttgatgacatattgacaaaggatgcatatgcgaggacatattgtgggatgatttatcccgttcctgatgagacacaatgggaaaaaactccatttccagatgtagacccacctgtggctaggacacaaccagggaggccaaaaacaaagagaactagagcatctgatgaacctagggttcaaggaaggtcggttgcaaagacaacaattagatgtagcgtctgcaaagagtttggtcataacagcagaaagcatggaaaagacaaccatagttcttcatctcaaaatgtgagtacactactaatttatcatataaagacattgtactttgctacttctcacaatttgttgtctgtttctctcggtgtaaaacacaaataactaggaggaagaagaggagcaattcccagcctattagttctagttcaagagatgatattccaacaacatccacacagccaccagtatatatggacaatgcatttggtgttggtctctaccatcatgtgccagatggggcttatatcggtcctactggaagaaagctgcaaattagaagaaaatgatctcctatttttatgcagtggtattatttacatcaaaattcttagctacaattagtgggggatgttgatcccttcttaatctcagtactatcttttttacgacaaataattttctgtacttctaactatcagatttgaattgtgatttttaaggggattctacttcaataagcatgtcttaaatattctggaatgtgtttttgacttggtgtttccattcttcatattgatgtggaatcacgaatcatgaggcagacactgttgttttgcactggtggactagaaattgttttcctgttttatattagcgtcatgtcgtcctacccgtatggctcgcggaattaagagtggatggagatgcgcgcggttttgccgccaaggtggcacaaggaaacttcgctcatgggctgagctaaaggcccacgataacgagaaattgagcgcatcagagaaagcgtgaaaaccgaatagggtgggaaattggaagagaaattaacttatgtgtagtgttttgaacaatattgagttgtaggggggagagtagaaagagcagtgacttgtaggggggtatttggattttccccttgattcatcgatgaccctggctgctggctgctttgcctcttttctagtctccttctccctagccgaatgggcccaaagctagcccacttgtctagccttctggaaggacatcacagcagcccatgtacatgacatccacccaggaccaggtgcgtgcatgcccagcccaatatatgcctcgagccacacaagtctatcgtaccagccttcctatttatcttgcacgaggcggcagggaggttagggctttttctacttctatacatgacagtgatcatcgacgagccgccgccggccccggcgccgccgcagccgaagcaatccaccacggcgcgcagatggtggatgaaggcggatccacggaaggccgcgcagcgccgtatctcccgcgagctggaggatctctggctcgacccgccggcgtactgccgccccggccctgaacccgtgacggacctcttgcactgggaggtgatcatcgacggcccgcccggcaccccctacgccggcggcacgttccccgtcgacgtctggtaccccaacgagtaccccttccaacccccgaagctcaccttcaagaccaaggtaaaatcactcgcccaatctctgagtagatcactagcttgtgttcatcgccagatatcccaattgatgcttcaatctcgtacgtacgaatgcaattcgatcgctgcaggtgtaccatccgaacatagacgacgaggggcagatggtggtggacgtgcttcacggctcctgggcttcgtctccatcctctacgacccgctgctcgactacccgatcaacgacgacatcgcggagcagtacgagaacgagtacgagctgtacgagaaggaggcgagggaatggacgcgcaggtactcctccacgcccatcgcctcgcactggctacccaaggctatgaggacgccgccggccgttcctcacattccggcaaccgcagagagaagagaagaaagcaggtcgctgcatctaaggcttcttcttcttcgctaaatcaactgcggcggcggaagaagaaatccatcgaggatgagagtttgtggaagaggatggtagggaggatagtagggtttcttcagggctggtggtctcctaattaccgtctactgtgttggtgatagtacaagtattgggaggcatgtaaactagtagtgtcaattatgagttacttcatccgtttcataatttaagtttttctagcatttctcatattcatatatatgttaataaatctagatatatatgtgtctatagattcattaacatctatataaatataagcaatgatagaaagtcttacattgtgaaacggatgtatatatacctcgaatgtgctggtatatacgcaagttacctcacctagctagacggctcgtcgattagattcatggttatatatagctgattccattaattgttcgggtgtgtcacttacagataagtgttagtgtgtgtgacattatgttgaaatcattcagcatgacgccttcgatcatcatggcattgcagtcattttttttaaataattaatatacaatatttttagtagaaatttaaatagcaccccaaccagcaatctaaagactaccttcgtttttttattaaatgacgcatttcactttttcataatgttgggtcattcactctacttaaaaaaatagtgtaaatatgctaaaatatatatcatacttaaaatttatttaatagtaaaacatgtacaacaaaataaatgatatttgcataattttttaataggacaaatggttaaacgtcatgttaaaaatcaatgacatcatctactaaaaacatagttgtattgttgacaaaatattgcccacaggatgcaattgtcacaaccaattgaaatccgataatacatttttagtgttctattaaataacattatttcttccccaaaaaaataacattatttcaaataattttgttgcaatcaacatatcaaaaattcaaaactacatattcagccctaattaagctcccaacctatgaaaatgagttaacaataatataaatattacaatcatgcatagaatggtattattttattctgtaaataactatgagatgggcattggggttgatttttgcgggtaatgtttttttcgcgggtaatatttgactcgctctttttcttagataatagaaatgtattataccctcggtttctattatatagcacacagctagctaacaagctttttaactcatgaactgaataaaaaaaacaaatagatgataaaacaaatccctaattaccataaaaagataaccttgatagacttaaggtaaattttgctatatgacatcgcgacttcgtggttttaataccatatagattacaacaagtaagcctatatatatcatatcactcatagtggaataagatatactccctccgtcctaaaatataaatatttttagcatagtgacaagtcaaacattttcaattttgactatatattaatagcaaaaaaataaaaaagatcactcatgtaaaattgatgttactagatatatcattaaacaaactatcataatatataaccatttttatttaaaacatattacttttatagctattgttggtcaaagtagcatatcagagacggtaccataatctaaaaatgtttatattttagtactatgggagtttttggttatcaactttacaagtgtagcatcattacacaataatattaattgaactaacacgggtcaacgattacgagagaagtccactcatgttcatccctaaagaatagccaatataagtgacctggcgccgtgtggtctactgctttattgacgtgctgcattttccattttaacaagatcggcggccgttacacggagccaaaattgttcatggggagcatagaaacgaagtgatgcaaaacacaccgctaagcccaacaataaaccggaatatccgctccaaactctcctaaacctccccgcggtacttatcaaccccaagatcgcctctctctctctctctctctctctctctctctctctcaccacaccgagtttccatcctgcccgtcaggcgctaggccgctagggccggcgtgcaatacatacgtggtagtagtagtaacaatgggcagcgagctgccggccgcggcgccgccgcagccgaagcgatccaccgcggcggcggcggtcgcgcgcagacggatagggcgcgagctgtggcagttctggctcgatccgccgccgtactgccggcccgggccatcccccgtgaaggaccacttccactgggaggtggtcatcgatggccccgccgccaccccctacgccggcggcgtgttccccgtcgacgtctggttcccctacgattaccccttccgtccccccaagctcttcttcaagaccaaggtaatcgcttgcgtaatctacgcgttcctcgatctgtcgcgtgatccaagattgctcatgttcatcgccagttctcgctaatttgttttgctacctttcaatctcatgaacaggtgtaccatccgaacattgacgggaaggggaggatggcgctggacatcttccaggacaactggtcaccggccttgacgatcaacaaactcctcttgtgcttcgtctccgtcctcttcgaccccctgctcgaccgcccgaccaaccgctgcatcgccaagcagtacaagcacgagtacgaggcgtacgaggagaaggccagggcttggacgcagaagcactcctcgacgccgatcgtctcgcactacccaccgtacgctgtcatcggcagcacgccgccggctgttcctcacttcccagcgactgcagccaggagaaaggctgctgcatcttcagcttcaggttcagtaagcagcagccgcattccgttgcttatgaaggatgagagtatctggagaaggacaatgaagttttttcagggttagtcttcttaattatcgtctacgtactgcacagacactgaaaacagataagggaaattagagttctttcttcctcacagatgaaatatgttatatctagaattttattttactgtattgtgaattgttgagaggtatgcatacttgtatcaaatcttcaggttatgatctgtcaccacacggtaatgacatggagctgctgactatgaggagtgataaacaaagtccttatttatctttttagtctgatgtgcagcacttaactttccactctgtttctgatgtgcaatctttttgcttgttcgcgaaacttttcattctgttttgtaaataagtgttgatatatatgtgagcactggagccagtgtgatctgtgagactgtgacgcattatgtcgaaaccattcagtatgccgttgttttggtggtgcgcctcgagccatatatatcccacaaggaatgaatcaaaattttagaaaatatgttagttccaggaaaagctttgctttgcttttgagataaccaagtgaaatggctatccaaattacttcagtaatgtgtacattgtactgttggaggttacctcatcagccatttagatgctatcagctttccgactttagatgaccatgtgtacgagcacttcctaaactaagagagattgagccgacaataattaagttaattgtcagcatgagttggtggtgactaagttatgagaagaaagttataaaagggacgaggaaagatacaaaacgtcaagcgaactactagatatagtcatatcaatctacgagatatacagtcatataccagctcaattactaggaatctaatggcgcagcatcacaaacaaacaatcctgaaaagtatcgtgaaccactttgggatccactagcggaccgagagacaccgagtgtttttggcacgcttcttcatgctagcatacacttatcgagctgttgctaaacttttcttgctcggagtggtagcaatgtattgtagcataacactaacacgtgttgtagacatctgtttgtaccgtgttttcttatttaaaaaaagttgcagcgcgtagtgtatgttagtatgtactacatccgtcccaaaataagtgtagccgtgggaatccgtgtctaacgtttgactgtccgtcttatttaaaaaagttataaaaaaatttaaaaaaagttagtcgcgcataaagttctatttatgttttattatctaataataataaaaatattaattattaaaaattttcaaataagacgaacgatcaaatattgaacgtgaatagtgtaaaacttattttgggatggagagagcagtgctatgagttcatgcaaaggcgcagcacgggcgcacggccctgtactccaggcctccggggcatggcagccggggtaaccggcccacctgcggttgcaacgtcaaacggcccacgcgacgcgagcgatgcgccgcacccaccgccgcgacacaaacactcgtgggctacgcacgcgtggccgcgcgagcgaaagagctatatagcccacgggctctacgcccgcgcagccacccacccggccgaggccgtcgttggctcgttgccgcgtagcgagcggcagcgacgccgtgagacccgtagtccccaccacacagccccaatccggcgaggaaaggaaaaccacatgtgtgtcgtgccaccgcgccaagcaaaacggtaagcgcgcggtccgattcgggcgcgcgtatgtcgcccacgcgtgtgctcctgtgctactgcaagcaaaaccgccaaataaatgcatgcccatgtaaacgaaacgtacaaacagtcacgcgaaggaaattgacacacacatacgcacacctcacacgtccatgtcgaggaaacgtgtcacgccagaacacgtcgacgtcgatacgctatagcgcagagggcacagtgcgcacatcacccgaccgggcccccaaaatcacatcaaagcccaatcctccgaaagtctaacctccacacgcaacaatgaagcttcttgtcaacaagcgcgtccgcgtctgcgtctccctctttggcgcttcgataggacacgcagcacggcgcacccccaccctccttgtacgcgcgatcgaattcgattggcgcctctcggctttttttttcccagatagcccgcacacacacacacctggttggatggaggctggcacgacggccactcgcaccggaaaatgtatgcatatgcatgcgtgccatggcgtgccgcgtcgggtggatggcgacgtgttaccggtggacgacgacgacgactcgggtgatggatacgtagccggaaaaggatcagattatcaatcgatccaacatgctcggatcgatgcagagtaccagccggtgtacgtgctttaatgaagtccaagttattagccgtcgcccggccggcggtcgatcagcaccaggtttgtttcttttagccaacgttcaaaaactgttgctgagtaactgaccattagagcagatacaatagcagactataagccagttataaatatattttaaagagataaaagaaaagagagaatagcagcaggctatagatttgtagccagctgcagcatggacttcaagatataacgtgtgtatgataagtgggaccagatattaatagtgtagtaaacaactattatatgaattggctattacattggttatacataatttaaagttagtagttggctatactattaaagttgctcttacaactccgagtataccgatgaatgtcttgcagtacttgcctgctttcagaacgtgtcaaaatactccatttggcatccattcgtgttcgtcaaaaagtagaaattaatgtagagagaatcagaccagctagggaggagtagaaccatgcttcgacgtaagaacaaaatggtttgcattggcatgcatgcctcgccatcgtcgccgggcgtcttagcccatcccgtatcttttcgcccatcgtcataacgcgcggtatacgtacttgactatacttgtgccgttgtgcggttgcgctttctgtgttgccattattgaagactgaagagagtgcaacactccagcgactaaagcctctctcactctctttattctcgtcgtaacaaccagtgcaacttgttcggcttatggatgtccaatcatacatttgcaaaagtatctgaaaattcagatagcaggaatatatatatttctttggagtatataaaccaacttgatttcattgtccaaagtactcacacacgaatacaggcttacagttttggagctcttgtacttactaaagaagaagctacaaacgcagcacacacacacccattaatttacatttacagagtaaacatttcggccagtacttgccaaagaattactacatgacaagctatatatgtcacctctactggatttgtgtagtgtatcatatttggagttctgctgttccactttcaaatactctgtaccccctggcctcgacaacataaattaattaacattacgctaatattgtttttgagttgtgttttcttatctaagcgctagagcaaacacctttaccaattcgtttttatctaccttgtgatatgttcatccccatgcttatgtaacagcttgtgtggttgaattgatgaatggcgtgctagctagtatagccaatagcaaatggattgcccattaatttacccaagtatccatgcggaccatgcctgggtgcgcgttcggcggcgctctcggcgttctcagctgcagccgccggcggcgaacccgatcctgctgctcttgacgtcgtagacgacgctgaacgtctgctgctgcgtgttcccgatgatggcggcgctcctggccggcgcgaacgccaggcacgtggtggagtcgtcgacgtcgacgaggaggttctgcgccgacagcttgagcgccgcgccgccggcgaaggacatggtgaccgccggcgcgctcacccgcgaggcctggcccttgaagcacgtgtcgaggatggagtacgccgacgcgcgggacgtccccttcatggccgccgccaccgccttgctcagcgccgagtacacgctcgtcggcaggcgcgtgatcaccgtgccggagtcgatgatcgtcggcaggctggagtacgccgacgacgacacggacagcggattcccggcgaccgtcatcccggacagcttgatgaagtagagcgagtcgtcgagcgagctggacaccatcggcgtgtacgagtattgccccgggttgtacgacccgagcgacaggtaccccgatgacgacgacgacgggaggcagtaggtgaaggagtagccaaggcttggcgcgagctggtacaggagcgagagcttgttgcgggcgaggccgatgagcccggcggatcggccgaacaacccctcgttgtcctggccacagccgtagtagaagtttggcagcgacgtcgagccgaacgagacggtgtccttgctgaggtagccgacggagaaggagctgtcgccgtagctggcctggtagatgcagacgttggaggaggagcaagccgacgggttgagcgtggcggaggggaggtcgctgcactgctgcgcggagcaccccacggaggcgtaggtgctcgacgacttggggttgaacaccgggccggactgccggtggcacgacacgaggcacggcgagcactgcagccaggtgagcgaggagcccgtgtccacgaccatcacgtactgcgtcgccggcgtgccgaggcccatgcgcgtcacgtagttgcccacgcccacggacgcgccggggctgagcggcacggacgcgagggagccggcgaggccggcgtcggcgtcggcgtccagggaggtggcgcgcgccgacggcgtcttggcgaggcgcgccgccagcgacgagatgcgcgcatcgtcgtgggtgagcaccgccgtgaacgggaggtcggccgggaccggcgccggcgagcaggggctccgcgggtggtgcagctcaaggtgcaggcccgtgctgttcaggtactggaaatctgcacaaaattcaccggcacgtccttaattcgcccgcgtcaattcatccaatttttaccgcaaccatgacaaaaaaaaactactttaaaattagagattctaaacaaattctgccgcggctataaggccatttgcaattaatgggaggtgtcatttttatgttttcaaataagccacataaacaacaatgcatttaattgatgattgaaaatacactatactccctccggtttcattttatttgacggtttggacaatgacacggtttacaaaatatatatttgaccttatattttctattataatatacacaataaataaatgcatgtttacttttattatagtgttttgaaagacaaatctacgtatgttctttaaactaaatatttttaaagttgttgatagtcaaagttataaaagtttgacatcaatcttatccaaaacattaattattatatagaaccggagggagtagctcgttaaacatggccatcagttccgttgcgccatcttgtcgtcaattttttacagtagtagccgtcttgtgactggacagtgacgtataacgagacgtacggacattatacaactagggagaagtactgggcatcagattgtataaatgtcccagctcatatgatttccgttcccaatcgagtgtggatatgtcatcacatgatccaattgtccaaacaatcatgcaacaataattcatttatttatgttacagataaggagtgtcgatcatatatatgacttgcagctgtgttgcgtgctactggggaatatataaatgtacgaacagcgtacaacccgggcacgtacccaagattgcggtcacgtatcgatcaagcattcaagctcttattgatggtaggatttgcagttggcattatctggtcataaccatattaaatcccaagacaacgctggatcgctgtaggtggtagataggctagctagttaaccagcatagtcattgtgaaattgagtgaaatattctcggtagaaggcccacgcatggaatagtagtctcagttaatttccagtgtttgtgaactagtgcaaaatggaagattctactttggcattgcttagacaatctaagagcttggacgtgctaacattagtccaacaagagaggaaacacgtcaaaaagggactgaagttgatgcatttggttggtagttaacatgatacacaagataatggagtgattgtctgatgtctataacgaggaccacaaattaacacaacacccagtcttggtgcctaagtacagaacacctacaaagcatatggtaccttgccttcccccctctattatgacgagcaaccaaagatattttttctcaagtgggaacaaccaggattgtactgctgctttggatgactggagaactaaccacttctgaagaagccagggggcgttggactggaccatcacgtacaacagtagtactacttccatatcaaaatatagcaatgtaacgtatcctagtgtctcatcatatattaagctgttatacttattttgatacggtgagagtacaatccagaggtggcccagctaactaggcaaactatttacagcagcaccgagtttctgttgagcgtgcctacatgcagccgtaatatcatcgatcggtgctggatgattcaagtcatggcaaaagaaaaagttgccaaaaaggaagccatttgcaatggcattgaaaaaccccacgtatcggtgacgttttctagccgatcgatccggtgcccatctcggcggccatcctgtccggcgcatttgtggtcgcgcgcggcgcatgataggctgatagatatggtggtttggcatcggtggtttcacgggggagaggcgaagtatggctaccgttagagcttcacatcatggccttccatgacagcagtcaatcgaaccactaaccggccatcaatttcgactgagaccatatataaattgcgatggctcagtgaacagtgtaccgtgtacggccttcgattgaaggctggctttggtcgtattggaaagagacaagtctctccaaagtattgttctctggtattggtcatcactgacatataaactcgctgaatgtgaagtccacatattatatctacttaaagtcagaacaggatgctatcgagaggactcaataggaagagttttttttttcttaggaaaatatgccatcttggacggagtttttgccgctaataatggatttgtacaaaaaaaattgtcggtcaggacaaagcattggaaaaacgcttgtgtggtgataagatcgatcgctgcacctgcgtgccgcccggcaacaattagccgtcgacaaaagtgtgtacctaacaaaactcttttcttctggtggcgacggatcattgactgtcctgtatattttaattcaaggcggcgaaaagagttggaaaagaagagaaatgatcgagccgaaaagattcgattttggttgtcatttggctcccaccctcgctgtcatttcttcatttttttcttaagttagttatagtatcgacaaagaaaattcagacttcccctgaaaatgttttcaggggaaggatactacatgaccaatacaaatttgtggttacactaccaccatatttacgtccattcaccatgttgattctagttgtactagtttaaccgaggtgctaaaacaagcaaagactccaggctagaaaaaaggaagtggtgcctcaagctgatgtgatgctattttgactgcaaactgaaattggttcttcaaatcctacttataggtgctttaattggtactcttgctctttcagtctttctactcaattggctagcgctatgtaaactcagtagtaagctgtactgttatggatatgtcaacaaagcacatatctttcatctacttgcagaaaccagacataattaacagcatgaatcaagagaaagctaactaattaagacaaggaggattattgatacccttgatctgtgacgagcacacatcggtgatgtccctgataggggtcgccactgcgaagagcagggagaaggcaagcaggtgaagaagatgcagcgccatcttatctctaaactctgaaaccacctccgtcttgcaggtggttcagtggtgcgtatgagtttatgactacaagctcagcctttttatagagattccgagtgagctatagcgcgcgctagctcttcgggcttcgtgggaatctcacgagtagctttcagttcagttgctgaagtaatctttttatccatggcgttccaagctagcttccaaccacctggttactgaaataactaacgtacgtttcagtactacgactagtacctccgtgatcaaaatcatcaaagatcttttttgacgtggatgatcaccgtagatatatatatatatatatatatatatatatatatatttcaattgaaagtcctcgttatcgacataattatgatggcataaatcaacagttcaagtagtatagtctttctcagtttatttcctgtttcatatttttgccttcttttggttctaattcggaagcttctgatgtcgcttgtgctgctactgtatcgttgccctcaataacaagaatctttagttaatcatgctgtaatgggacggtgatgcaaaagctgcttagctgcttttgttcctacggctcaaagtaagtaaggttaggtgcacacaattatggattcggctaatcaggctcaattaagctggcagttaagcgcacctatctagcaaaaatgcagtatgagccctctactgatgaacacatctgtccatcaagcaacatcgatcagtattagcgtcgacactaaggtagttttcagggcaccacattgactccggtattagacacaactacaaaagtgtgagaaagatgacgagcttttaaaggctgcatgccatattcttgagacaggttatccaactttttgtcaattttggacagaggttcacaaacagaattcaataattttgtactctttatcttaggttagcagtctttagtttgtttgtttttgatgattggtttcgtctttttaagtttctttgaacttcactcattttgagtgtgaggttataataattggctgtagctctttgagcaaaggctgggatgctctattccattatctaaaaaaaattagcatccacacctatagacatagtagctagtgcctggctttttcatctaagtccttttaaaaaacttatttattttataaataaatccaaaaaaatagacctttttcttggcgccagtaatcctacaccgaggtccaacatctctgttaacgaccaaatttggtaatatcagcatcggaaaaggagattagatcaaggtggagttgaaggcggagattgatccgagaacagagcaagaatcggctgaagtccagatcggctacgattaggatcagctgggtctgagtcggacaaggtgagccgatgcagccgattttaacattataatttggtgtgtgatatcgggttgaattgaggtgcttcaagattattgccgcacatggatagagtcctgagaagacaattgtatctattaattaggattttttatgtaactttattagagatatgtttgggcaaaagtctgccgcaaagacttatggtatcttagagtttgttagagatagtggtcgtgtccggtatggacatatcttgtaattctcgggtataaatagaccccgagccctatgtaatttttaacacacacgttcaatacaatttcggcgcatcgccacctttttgctttagttttgtttcgacgagttcttgctttcgggttgagctgcatcggtttcaatcttcaacaagaggtaaaacttgttatgacgacttgtgttctcgagattagtgcttccatctttatgacactctaatcttgtctatataattcgtcgagttatcatatatcttacataatctttggcaatatcgtcatctaacctacaatcggctaacatctgttaatagaaggcagccgattaggttaaatagcgacgttgtcctagattatgtaagatatctaccactttatgaaacacccagcggcttgattgtctagatattgttcttcttttcatacttaatgctacatcagttgagtttgatctattaagtcgtgcttagaatatcaatctctagcatgtcctctggttgccgattagggtagtatcggagtttcaaccgatcttatatgatttaaccatattcgatctatatgcttcaatgacatgttaaatccgccctttatgtcaggatcttattgcatttaagtatattaagcttttgtttggtatattatatttgttttgatatctttatataaagtagtatcagagtattagccgatacatgttagatctatctgatcggctatgctataaacatatataatcctgttattaatatatatttcgatctaagtgatttatactgtctcggcatggtgaccgatctatcccaatcacttgatttaagtatatattaatataagaactatatatcgttaatatctacagccgatcgaatagatttagttcctcactatctatttataaccgccaatcgattcatatatgacatcggctcaaagataaatgatatgtcatcggcacctagccgatcggctatcatttatagatttaaccacgaattctttgtctctatttcttgttgattacaggatcaaatcaattggcacgctcatacattcgaagacgagctttggacctgcattggagctttggacaaaggtgctaccgacggttctctaggaagtcaaggttacaactctcaaggggtccatggagttcaaggcgatggagcgcatggagttcaaggtgatggtgctcaggagttgcaagggggaaatcttaatcagaatagtgatgcggcacaagattttagccgattgtaggttagatgacgatattaccaaagattatgtaagatatatgataactcgacgaattatatagacaagattagagtgtcataaagatggaagcactaatctcgagaacacaagtcgtcataacaagttttacctcttgttgaagatcaaaaccgatgcagctcaacccgaaagcaagaactcgtcgaaacaaaattaaaacaaaaaggtggcgatacgccgaaattgtattgaacgtgtgtgttcaaaattacatagggctcggggtctatttatacccgagaattacaagatatgtccataccggacacgatcactatctctaacaaactctaagataccataagtctttgcggcagacttttgcccaaacataactctaaggaagttacataaaacatcctaattaatagatacaattgccttctcaggactctatccatgtgcggcaatcatcttgaagcacctcaattcaacccgatgtcatacgacaaattatactgtcagaatcggctgcatcggctcacctagtccgactcagatccagccgatcctaatcgtagccgatctggacttcagccgattcttgctctgttctcggatcaatctccgccttcgactccaccttgatctaatctccttttccaatgctgatattaccaaatttggtcgttaacaatctcgacaccaatgatattagtgccaacacccttacacccctatggaagctaactcactaatatgaaggggaatgacgcaaatgacattggcattgaggacctatctacactacttaaaatgacatcaagacctatttataagaaaaaaaatatttacattgtatccctttccaataaaagaaaaaacaacaggtccttggtgttgtcattgtcgtcgtcccccttcgtattggtgacttagcttcgacggggtgaagcgtcaatgctaacgttggcaccaccgagatgttggacctcggtgccaacaaccatggcaccgagaaaaggatccgttttgaaaataagtttttttacgggtctatttataaaataagcttttaaaaatgactaaaagttgaaaaatagtagtaccgctttcacaatctgtagactgcagtggttagtgactgctaatagtaagctagcttgagcaaccatccaaaataatcaagttagaacaggcccgaccaaaataacagaatttttaatctgaactagtacgtactaactactactcatacatagtctcagtccaaatcatagagaaagaagaaagggaacctacccatcgatatagtactcatcaaggaaagcataatgctatcatgttcgttggtggaaattcagttatcagagagagtgattgatcagattgagagagagaaagagattcccatgcgtgatttagtcgatcgatcgatgaatataccatctttttctccgaagcttcagcactaagcctcctccggcgatgggggcaaattataaagacaatggccttatgcacatatcctagctgaaaaccatgagagactgtctaagaatataatctctcgtcgatcaggctcgtagtaccaaccggcgagacgaccgtcaccagcaaaggaaatgaccatcttaccaaccacgtgagatgtcccgaagctaaagcgcgctcgggcaccaagaaatcatgcccacattatcgaagtagttagttagttaccaccagaaagaatcatccatggcgtccattggcagcaggtacgtatactcgtacaagtagtatagtattaggtgtagctggtatagtgcgtgtatacgccgctaatatgatggcgcggctacttattgtgttagggtctgttcactttgatgccattttcaaccatactaaattttagtaaagttgtcagaaaaaaatggctatatttagtttactgtcaaaatttggtaactataaaagaaatttggtaaggtttttttttcatcaaagtgaacagtcctaattaaccccttgtcgcgagttgagagcttgacatagcttaggcttcgtcccgcaacgggcggcggcacgccaccacatgcagcgtctttgcgttggtttggtgccgcgaagaggaggaggaggaggaggagacgacggggcgacgtcagaaaattattagatgggctacaatgcatatccggctagcccacaggtttatagcccattagttgcacttaaagagacacaattgtttgttgggctgtttcccttgccagttgcctaaatgcaagcatatcagagcccaagtttatctggtccaaggcttgtatagtatttccctctacttctataactaatataaatattcgtatttttccggtcgtcacatctaattttcgtccgtttttcgtccatacacaatccgattcagttagcaatagccatgaaaaaaattgtaaaaaaaaaaaatcggcggctgccgacgccaccaccgccaccggagggagaagagaggcggcggagggagctaccaagctatatatcccaccaaagcaaggctgctcgttcaggagcttgatgatggatatccaatttaactctcctagatggataaggattttctagccaaagtagactagtttgataagcaaagctaattttaaaagtaatttaccaaatacctaacctagcttaacaaggaaagaatgttgctagtctaggatccaaacacacccatatctctttgattaactttaagcttagcaacgatgatttgtgtctaagagtaggcagaaaaagaccgaactaaaagaccgagaccgagaccgagaaattcgttcctaggcagtgaaagaccgaattttgttcggtcaattcggttagtttcctcggttaaccgaatagaccgaaaagactgaattaacaaaaaaaaagtctaaatataacctacaatttactaaattcaatagaattaaactatagttttcacatccctactttttctaggcatgcaacctaataagagacgtgcttacggaatttttttttgtgatttttgtgttgaaaatttctattatttctttgcatatataaaaatgttgttgaatttcggtcaggaccgagaccaagtccgaatttgtcagtcctgatatttttgcgttgaaattcggtcttcacttttcaaaaaccgaaatgaccgaaaaccgagaccgaaattttcggtcagaccgaatgcccacccctacttctgactgctctctttagttataggtcattaggttatgttgtactactccgtcccagagaaaaacgaatttctagctacgaaacagacatatatgtgtccaagttcgtatgtaggattggtctttttttttttttaggatggagggggtattgtctaatgcaatttttgttgtgttctctatggaggcgttttagtcaattttgctccaattaattatgcagttataaagttctagggatttttaataaacaagttaactcttttcttttataatgaaaagaaaaatccatctcttttcagaggttttctttggggaaaaatatctatgaggatttgaatttaaacactaaagggacctgcactcctggttcgattactgggtcgaacaaaagtttagtttgttagctgcaacatttgaaatcgatcatgagacccacttagaaaatgaatctctaatcagatgcatccatcgtcccttgcaccgtcagtcacaacggctgcataccacctttttcgtcgctgagttctattctttctttgtgatcgatttttatctgacgagtaacaatcggttgttacagtgtggttttctccatttttttttcatgtatactccctccgtctaaaaaaagacaaactctgagtttccgtgtccaactttgattgtccgtcttatatgaaatttttttataatttatattttcattattgttagatgataaaacatgattaatattttatgtgtgacttgtctttttaattttttttcataatttttttaaataagacggatggttagacgttggacacgaaaaccaatatttgtctttttttttgggatgaagggagtaattagttctattttactcctacacacaggagatgctctaatgggtgaagtcatggtcccttccgttttaagaacacaatagctggcttgttagcatgtggcaccggcacgtgcactactcgcccccaggccccagggcggaagatccgggtctcactgcacgaatctggcaccaccaccaccggcaccgccacgcaccgcacaagattcacccagccgtttgcactgctttgctcgccatcgatctcgcgcggccgcgacgactgtctcgcactgtcggctctctcgtctctcccccttcctcctcttcctctcggtcccgcgcgcgtcaacttctccgctttgccgcattcctccgcgcccctcagatctccgctgactccgccgccgcccgccgacatgtcgtcccgcggcggcgaggacgacgaccacgcctcgctcctcagatcccaccccgcggccggcgccggcgccgggtccggctcatcgtcgccgtgcccatctccgcgggctgtcggtggccaccaccacaaccagcacgcggacgtcgaggcggtgggggaggccaccgtcaccgcctccccgaggcggagcggcggcgtgcgtggcctcctgcggcacctcgaccgccgcctctccgcgcgcggatccggggggcgtcgaagccagcagccgccgcagcagctcgatcgccccgagccgtccccgacgtcgtcgccgcagcagagggagagggtcggggaggagctcggggatggggcgccgccggagtgggcgctgctgctcatcggctgcctcctcgggctcgccaccggcatttgcgtcgccgcgtttaaccgtggggtgagcatttcactggttctgctcacagactggaaacttgactatcctctgcaagtagaaagcaccggagtgaggctcatcatttataggatctaaacgtagttcatggatgctagcaaatgtgaacccaagggactttgcaaatgtgattttgatccgtttatttgtgcaaactaaactagtgcaaataaattcacccaaatgatgcaaaatcagtttcatttaagtgcgcaaattcaaagcaacttaacagagcactgaaagcagtaaatgaaaagccttatgtcacatcatatctgcggttgcccaaaacgcgataaattttgttaaaatttaaaaccttccaagtgattccaatgtaagttaaggttgagatttttcagttctgccttgcatgactgattctatagacagctcctgttatggtatttttaggttcatgtcatccatgaatgggcttgggcaggtaccccaaatgaaggtgcagcttggctccgccttcagaggctagctgatacttggcacagaatactgctgatccctgtgacaggaggcgttgttgtaggaatgatgcatgggttgcttgagatatttgatcagctcaaactcgtgaaaccgcctcagaaacaaggaatcaatttccttgcggcaatctttccaactgtaaatgctgtccaggctgctgtaactctaggtactggttgctcactggggcctgaaggtcctagtgtggatattggcaaatcatgtgcaaatgggtgctcggaaatgatggagaataacagggagaggcggattgctcttgtagctgctggtgctgctgctggaattgcttcaggtatgtcattgatgattacgtacctgtttccttagtagaatatcatgacttcgatagctagcaccttacaattattatttaaggatgtattacgtaatggcaattccatgtaaattggatagcatttatagttaacatgtattgtttcggatatctttgtaaaataacttgaaatattgtatttcacgactcccatgtaactctaaaatttaacattttgattttgttcctacccttttggcctttttgttgttagcgcttgctaatatactgtttcttgtgttgtgtgttttcaggcttcaatgcagcagttgctgggtgtttctttgccattgaaactgtactgaggccactgaaagcagaaaattcacctccttttacaactgcaatgataatattggcttctgttatatcatctactgtgtcaaatgttctgcttggagaaaggccagcttttatagtgccagcgtatgagctaaaatctgctgccggtatctcccctgattctttttacctttatctttaagattgaagattcatctattaactacagtaacaaacactaccaatttttatcatgttatgatacaccacttgcaccactaccaattcttggttcatcaagccctaatatgctatctccattttgttgaggcctatagtaatatgtttcagagatgatgttatcataaagtttagcagcacttgccctacttttataagttattcacacaaacccaacttttctattatcttgacatggcttcttggttgaataattctctccttttgtattgttgtatatgaacagcataggttctaaaggatattctgtcgtctcattttctgttctgcagagctacctttatatctcatcttaggaatgctttgtggagcggtcagtgtggtatttggccggttggttgtatggttttcgaatttttttggatacttaaaagaaagatacgattttcctattgtagtataccctgctttgggtggactgggagctggcctcatagctctcaaatatcctggcattctatactggggtttcacaaatgttgaagaaatactacatactgggaaaagtgcttctgctcctggtatatggttgttaactcagcttgcagctgcaaaggtagttgcaactgccctttgcaagggatctggccttgtgggtgggctatatgcaccaagcctaatgattggggctgctgttggagctgtttttggagggtcagctggatatttgataaattctgctgtacctggtaatgctgctgttgcacagccacaagcttatgctctagtaagttgctctgttttcctttttttttttcatattgcttgaagcaatactgttatttctacatccttgtatatacaaaaactaattgtcagaactccaggttggaatggctgctacactagcttcagtctgttcagtcccactgacctcagtgctgcttctctttgaactgacaaaggactacaggattttgcttcctctcatggtaagtatgactgtttatgtagtgtgcccattgttttgttttgatatagtctttctcttttgtcacatcatgatgtctagaagaggacataaatgttgtgattttatgtttcactattgcattatcaaaactaatgcacttattttttattgtccaacagggagcagttgggttagcaatctgggttccttctgtagtaaaccaatcaaaggatggtgaaccatctaggtttagaacacccaggcgtggttattcttcactttcttcagaagatagaaatagtaaaagctggaggcgaggtgacagtgtaaatgatcttgagctcactagcttacggactgataactatgacacctataatgaggaaatgcttctagatgatttgaaggtttgtaggcctctaattcttattgttaacggtctagctgatgcaatggtgcgttcaattttcaatagaagtacatgttattatgttaattctatcctaatttgtcatttgaactcttttaccaggtctcccaggccatgtcaaagagctatgttaaaattccaacatctgccatggtgacagaagctctcaagcttttgcatgataagcagcaaaattgcggccttgttgtggattgtgaagattttctcgaaggaattgttacattaggggatattcgccgtatgggatttgaattacatggggacagtttcacaagtggagaccagctcaagcccgctgtacgtttgaatggtgaaaatatgtatttccattagaatagttctacgtaaataagtaatgaattggtgtgcatcatttcacttggtctggtctaggctggacactgattttgtttaaaccattgccatttaatgcgatagcttaaaatgaattctaaattgaatgtacatgctttctatctctgaaaggtaaaaacaaaacaatttacacaggctggcaaggaatgtgtactaattaatggagatgttgcaggaaaattcttcaaccatatcattgtgtcttactcgaggattccagtacgaggggaatgaacgtggattgctaacctgctttcctgatactgatttgaccactgcaaaaaaccttatggaggccagaggaataaagcagctgcctgtcgtgaagcgtggtgtcggccatagaactgaaggaaaacgcaagcttattgctcttctacattatgattctattggtcactgcttacggttagtcataagcttatatgtgttctttcaaactttatatttttttgggtttattcagctttaactcaagataattgaattttttttccgcttgtttaattcatttgaattatactgaaatgtcaattcatttggttatgaagggaggaaattgagaactggaaggccatatatcaaataaaagaggacttccatctcatagcaaatgggcattgaacagcattacattgaccaatattacaccacatcaatcgcatgcaatttgatatccttaaggcatttttgccaaatggggatacaggaggtatacacgaagttcaacttgtacagatttgaggctcctctacaaagaattaaattgccatctgaggaaattattcaggctagctagccaattttgcaatagaggttatggtccattcttgttgcgaagcaacttctacttcacacgggaggagatgggtatgtatgaattcagttattcagaattggaaagtggcattgtaatgtatatcttgtacctgtactatttgtaactgtgtaacatcctgttgctgggaagcatcatatgcgccagcttgtagaggtgcagtcacacgagaaactagtgtaataaagtgtgcagcagaaaattttgtcaagaagccgatgttgtaggttgtagcgtcacattgtatgtaacactttatatcagcacttgaactgaatttctccctttccgtgcagttacataaagcttgcagagcaaagttgctttatcaccatcgctgtcctgagtcggagtcatgtttacagcgaccgccgtcgtggcatgttttttttacggaggctgctttctcttcctgtaaacttttcaatagaatttttttttaaaaaaaatcacactggttagcaatttaaaaaatatgcgctcggaaaataagggtataagttaataaggatagaagttgggaaaaggaaagaacacatcatccttatatgttactcctgccgtcttaaatacagcttagcactaaattatacacaacttaattatacaatataggtagaagtccatttccacttaaatccgtaatagtttgctactaccttcgttttcaaagtactccgtataagttattttgatatgatgttatacatttcaatactatgaacagattttctgttcaaatttataatcctaaaatatattatatccgatcaaaattaagatagtatatgtatattttaagatgaagacagtagcgatgaacaacatgctcatgactcaggagtcaggagtcaggacaggagtcgcagcttcttccggggtgccccgaaacggagtaacctgggcactcttttcctcatcttctctacagcaaccgcaccgtgccacgtaaatctatcggtgaccgtctcgacctccatggaccgcactggtcggtcgggaatggcacggccccaagctagcctcaggcctcagccgtgctccggcaaggcggcacccggcaccggtctagcatactagtctgtcccaaaaaaagctaaaccctggctatgaacgtggacacgcatgtgtccagattcgtaggtagaattggactttttttttaggatggagggtacgtcttttgacgatgcgctgaaacactgcagttctctgagccaagccacacgtagcctattgcgcatgcatgctatgcagacgaccttacaaaatttctactcctctccgcccaaaaaaaaaataaaaagttttatcccttcaatactttttacctgcctatcactatcactatttttttaaatgattaaggttattatagtcactctctatttcctctatttttatcttgagatgttagaattgtttttttttttttttatggagggagtaaggtccaaggctagcatctcatctcacgcaacgtcacagtcttcgcagaaacgccgcaagcgacaacgcgatacgctgctgcgtagaagcatccggctttggcctttcacatcaggcaacagcatcgctattgtatggtactgtactgtgtcacataccggtggtccatctcactagctaccgttgtccccgcccagcccgggtgcaaaagaccaaactatcgaaccgaacacctcaagccaaggagccagacggagccgggcaaggtgaaagctcagtcagtgcacgtgtattttactactcccaacttttccacggattagcaacgcgttttctcgaaccgaacaggggacaggggatgcaaaaagagactacctgcgaatctacttatatgtcaaataagtaataatctatggatttctacgttgtggctcgatttaattaccgtaactaaaaaatgcaagtgggttgattaataaatctatttatatatcaaatttagtaagtaacccgcaagttaatctacgagttattagattatccattaattttgtatataaataagttcgcgggtttgtcggttacatcccccaggcaggaggaatcccgaacgaacccgtttcatgccactgtgcgtagcaacagaacggcgcggcgcgctgattcgttgacgagtgggagataattaagccggggttttgtatccgcgcctgctcccctttggcggcttctgcgacggggaaggtgtcgccgagcgcacaacagacggggctagtggcacaaaacggcaaaactagaaaaaagaattggatttttcttttccatttacgtgcgtatatattatgccttgtcattggctcgtcgctgtcaaatatttactatcttttttttttactgtcaaatgtatatagattagtgcgcatattaaaaattcaagccgaacaagacatgttcattattgcccaaaaattaaagcactttcgatgttttgcacatgcatgtactcatcattattacttcctctatcttcaaatatatggtcttttgtcggatgtgacacatcttaatagtatatttacgaatctagataagatgtgtcacatccaatcaaagtaccctatatttggaatagatgtagtaatatatattcaaaatgcattctcaactgtgtgtctatatatatatatatatatatatatataaattcataactagcattagataaatagctatagtacattttaggatggaggaggactgtattagaaagagataactatcgggatcatgtcatctagtctctctttttctaaaacaacctcgttctttttaagctaacgaaggtatgaactatccgtgtgacgcttaataaagtacaatttctttaaaaacatgttgtctagtagatatatattttcttttgtctaaactagtacagtatttattaactttagaatctacaatgattaatttaattaatttatcggctaatgacctggaaccgggctgtcagctacagctgtggtcttcggatgtggttgttgcgtcagcgtggaggttacttggggtcttcagagacttgcaatgggctatataatgtacgtacggcattctagctactatggcatattggcagttgatgtgatgtttggccaaacatctacagtacagcctgcatgccattccacgaagtgcgactagaagtaaacggcgccagtatgccatgccacaaattgggcagagagaaaaatgtgccatatggtccgtggtcttccatcaacaaaatattggtcgtagctacactaactgacgaacttgaattcacgatcgagccgtccatgcgcatgcacgcaaatgtgaacgtaccttgattattctcactgattagttatcagaaatttagtcctgcagagagatgatcataagctgccagccctgagactgtcgatcgtatcatgattcacaagtggcatactggcattttctgcggtgatcacggattaacggcagcaacaccacatctgaaaatgacgggataccatattaaaaaatatatatgcatggtcatagttttaagatgctgaatttcacttgagcagtacgttcaattctctcgtacgaacttgaaaattctctgtttcagttaagccctatgtttacgcggacaactacgaccgcacgttataccgtcatagagcggtataccgtcataggcctcgttactgggtgagctatggtccactggactggaaggcaaatcgaggaaggaaagtgctagctactccgtatatgatacctcggcaatattatgatcgagatcccccgagatattaggatttattaatcctaaggtgttatgaaactttgaaaagaatcaatattgtcataacaatactagcatattgtagtttcttgaaactccataaacatcattatcattgaatatcactatcatggaggatgggcaaaggatttttagaggattaaatttcctaaggaatttttattattgaagcctttttcgcgaacacattattgaagcctttcattcatatgaaaagataggaaatatccatatgaatacattcttacggtccagtccaatcaataccataggaaattaaagcaagaagttagagttatttaaattttttatttaactagaaaagatgtctgtacgttgcagtgggtgaatgctattttaatcttgttattgttatacggtttggctagggtgaaattcgctatgagaattcgcttggatattttttttctagaaaatcttgagctgcaattaagagtctgaaattcataagttagcatgcaagtgtttttaaagagatttcttatacgactccttttgtattttcaaaagcaaacgaacttaaaatctgacttaaacacggatctgtatttttaaaagtgaatgaacttaaaaaccgactcaaacgcggatgacgtaccaaaataccggtaaaaacatcttcaatttttataatagtaaagatttgttcaatttttcctgtgatgtaatgaaatggcttgtcttctagtttcttatgctttcaattcagatagaatttgtaaaaacataccacttcaaatttttgttctttttcttgtttctgtatttttcttatcatgcgttctaaagggggtcttattatgtatcaattagcatcggttagtatcaagtatcaaaaagtgtggtttcatcatgtaagggatatcccctcgtttcttgcagttttataataatgaaaatgatttatatttctggcttctgtgctaaggcacacaaataaaaaagagacgataggtgatgggacaaaccctcaagggcctcaactccacattattattaactagcgttatatcaaatagattccgccaacaattctaatagaaactatttagatgatatgtaaaaaagtgagaatatattctcaaggatgagaatccatcttctcaagcaattcagatctactgtagtagtattgcagatacattactactcactgacatttgggctgtatgtccagtgctacagaggacctcactccttctcaagtatcatcatgtatcaaagagtatttcaacgaatatcattgcgtatcaacgagtaccatcgaatatcaaactattcgtcgtggtgtatcaacaagtatcatctaagctttgtttactgagtcaactgcgagtctccgtcaattagtaggtagtaacatggtttgcgtgctatggcatttcgtgcgtttgcatgcacgcatgaaagtctatcctctctctatatataagttgataggaatttaaagctgcaattatctagctgatcagcttgcctaggaagcaaggaattagccatggcttctgtttcgccgctactgcttctcctcttgtgcagctaccactctgtagttgctcatgcaggagatggacagagttacaaggttcttgagctgaattctgaggccgtctgctccgagcgaaatggtgactgtccatgcaagcgcatagtttttctgcaattttcgtgtggtttttcagtgaaattgtaatcgttttggtgcgtcaaattttgcagcgatttcgtcgtcgttgagtggaaccacggtggcgttgaaccaccggcacgggccatgctcgccggtgccgtcgtccaagaagaggccgaccgaagaggagctgctcaaacgcgaccagctccgagccgagcacatccagcggaagttcgccatgaacgccgccgtcgatggcgccggcgatctccagcagtcgaaggtgtcgtcgtccgtgccgaccaagctgggctcctccctggacacgctggagtacgtcatctccgtcgggctcggcacgccggccgtgacgcagacggtgaccatcgacaccggcagcgacgtgtcgtgggtgcagtgcaacccgtgccccaacccgccgtgctacgcgcagacgggcgcgctgttcgaccccgccaagtcgagcacctacagggcggtctcctgcgccgccgccgagtgcgcgcagctcgagcagcaaggcaacggctgcggcgccaccaactacgagtgccagtacggcgtccagtacggcgacggctcgaccaccaacggcacgtacagccgcgacacgctgacgctgtccggcgcctccgacgccgtgaagggattccagttcgggtgcagccacgtcgagtcgggattcagcgaccagaccgacgggctcatgggcctcggcggcggcgcgcagtcgctcgtgtcgcagacggcggcggcgtacgggaattccttctcgtactgcctcccgccgacatcgggctcgtccgggttcctcacgctcggcggcggcggcggcgtgtcggggttcgtgacgacgcggatgctcaggagcaggcaaatcccgacgttctacggcgcgaggctgcaggacatcgccgtgggcgggaagcagctcgggctgtcgccgtcggtgttcgccgccgggtccgtggtggactccggcacgatcatcacgcggctgccgccgacggcgtactcggcgctgtcgtcggcgttcaaggccggcatgaagcagtaccggtcggcgccggccaggagcatcctcgacacgtgcttcgacttcgccggccagacccagatctccataccgaccgtcgcgctggtgttctccggcggcgccgccatcgacctcgacccgaacgggatcatgtacggcaactgcctcgcgttcgccgccaccggcgacgacgggaccaccggcatcatcgggaacgtgcagcagcggacgttcgaggtcctgtacgacgtcggcagcagcacgctcggcttccggtccggcgcgtgttgaccggggcgggcggcgcgacgccggcgcctggcgggccgggcaacacgacacacgtagaggccaagagggtagcagtaggttgctctcatgtggtcgtctacttgtttgtggttgcgaggtaagagtcgtgacgtgtgatgatgacaagatataatgatatatattgcaattgtaatccaacaaccaaaatattatattagtccctagctctaaaaaaatattatattaggagtgaacttttcatgattttttatgaataataaagactttatactgattaattcgatcgtttgattcccaatcgacggatgcatcattagtgatccaagtgtctggccaataattagtgtgtgagaatggtcttggtgattcccaatggactacagtttgccctactgatttaccaacagaatgttagattgcacgtaactgcgtatggtggcacttgtgcaatttttattttgtttttctgtactattctttgttttggtttgattctttcgaatggatttaagagaactgatccatatgctcctccgttttttttgagatgctaccattcatcatattcaaaaaattaatataaatattattttattttgttatggcatgttttattattaaaggaattttaagtatgacttatactttacatatttacactaattttttaaggagataaatgatcaaacattattaaaaaaaattaacggcattatctattaaaagggatgtactatattaattttgtggtggagatttcgatatcgtccactctgttcaccagaacatatgtaccccatctctctatttcttactcttgagggccaatagtcttggataataatgggattttggtatgaaacatcaattctattttcttttcctttggagcaccggaaagcagctgtcaaactgatacagaattgtgccaccaaagaatccctagtagagtacacatggcatttcaaagagaaaatcatgttattctcctagaaaacatctaatggattcttcttctgctatctcatagtctacttgttgccttataggttaatgttttgttcttatttttttatgtctacaaaacgaaaatgttaattcaaaagttaattttgaggttttaatttttttaagcattgactttaaaccgttacaacacatgcatgaaagtatttctttttttttgtaaaatttattttatcatggcttgtcagccgtatatcaaacagagtttataggctggtccacgtgtatccctactaatttttttttgtgtatttgctatgaccctagtattcttgtgctttatcatcatgtgagttcataatttgtgatgttttgttcttagttttttatgcctgcatatattaagagttatgcattccaaagaggaatatcttcggtataaacatatttgaaattgtatatgctctaaattgttcaaactataactctatggcccttgactttcacacaaatatcaggtgaatgttcggctaacaaccatcaacaatacagatccagcattatctacgagattaaaaaaaaagataacgttttctctctgggccttgggccacagcagccacaatgcacaacagaacgaggtggccccacagtcccacacgtccccctaactgtccactagttttagacttttagtcgtagcacatcagttgagcaccgtgccactgaccacgacgcaccaaatcaaaccaagcgtgtcaagcgcctaacacgtgcacatggttagcccgtttaactaatttattattattactctcaaaaatcgtatatccactaacgaaagtactatgccttacaacctttgtgtatttgtgtactatgtactctcctactactagtgttatgttatgtatatgcgcctatcatcctcgtgtacgtacgtacattgtacgcgtatatctatacacctatacgccatgtacgtactaaagaagaatactgtcgtgggtgagttgttaggatggatcgatcagcaggaggcgggcatgaagccgacggtgctgccgtcgaagcgcacctcgaacgagcgctgctgcacgttcccgaggatggacgcctggctgtcgccgccggtgggcgcgaacgccaggcacccgctggtgaggatccccgacgtgccgaggtccatggccgcgccgccgccgaacgcgatcgagatcgtcggcagcgtcacggtgccgtaccgggtgaagtcgtagcaggtgtccaggatccccgtcgccggcgccgacgggtagccgtagggggccatggcggcgcggaacgcggaccgcagcgccgagtacgccgtgggcggcagccgcgtgaccaccgtgcccgtgtcgaccaccgcgcccgacgcgaacacggacgcgtcgatgctcagcggctgcccgccgacgctgatgccggcgagcatcacgatgtagtatgtcgggtcgttcgacgccgtcagcagcggcgtcgtggagaagccggcggtgctgctcggcccgcccagcgatatgtaacccacggagttctgcgtcggcggtaggcagtaggagaagacgccgccgtaggtgctcgacgcctgcgacaccagggactggccctgccggccgaggccgaggagcccgtcgacgccggcgaagaggccctgctgcgcgtggccgcagccgaagaggaaccccttgagcgcgttcgacccggtcagcgtcagcgtgtcggagctgtacacgccggtggtcgtggacccgtcgccgtagctgaccacgtagccgcactgcccgccggagcagccgttggagtacaacgccagctgcgagcacgacgccgcggcgcacggcacggcggagtaggacgacgaccgcgtcgggtcgaagagcgggtccctctggctgtagcacggcggcgaggggcacggcttgcactgcacccacgacacgtcgctgccggtgtccacctccaacgtctgcgccaccgccggcgtgccgaggctcaccgtcaccacgtactgcagcgtgccgatggagaaccccaggttagccggcaccgtcgccgccttggatcccgccagctgcatccccggcgcggcggcggcggcccccgacaccctcctctgtatgtactccgcccgccgctggtccgcgcgcagcgtgtcgaggaacgacggcggcgatcccagcgccgacgccttccccgccggggcgcacggcccgtgccggtgcgtcagccgcagcaccgccgacgtgccgttccgcggcgaggcagctgaaactcgcaacgaatcccaatctttcatcacaatccggccccaaaaaccagaagcaacagttcgatctccccgctcgctcgctgtctactactactaactacgtacctcgtccagggagttcgtcggcgcaggtggagctcaccgcgaagctggatgtggagacggtgacgtagcccctcgcggcgtcggcatggcggggcaagaatccgaggccggagaggaggatcagcgtcaagaggagagccatatgcttcgcttcgcttcgccgcgcgcgcgcgcgttggcaccgagcgggaaggggacggtgtggctaaataaggcgtggtagcaccaccagttggcgcgtcggcggcggcggcggcggtgcggtgcgagcccaacccatgacgatgaccatatgatgcggttgcgctgtgcgattggaattcttcgttcgtgttgggttggggggggggggggggtcccgtctcccaccgaaccgaagcgaagcgaaacgcgacgcgacgcgatgcgactttgcgagtctcgttttggtgcggcgccaacgaaggtgggctttctgcgcgcgtcagatgcgaacgtattattgcgttgcatggacgatggatgattggagaatggcacgtcttttttgtagtcgtacggtttagcgtatcggcgccggcaagcttgaggctcaagcttagtatagttctggtactaggaactaatcccaatcctaaaacttttttttcctgatgatataattctcataacctgtcaaattggtgtctgaaatttgaaatctgaaaatgaactctactaaagtttgcatatggttctttcagtgcctttacagtttctcaatcgattccttttagaagtagtaccttttacatgaaatgaaaaggatgctcaaagtcccaaagttgtgtcacacaactgttacgctaactgttcgtctccctgacggagacctttatctaccgctattttcatcggtggcgtaagggatctatggccgtgagcgcgacacgactgatgtgccagcaaaatacccaagttttcttctcccgtccctgccactgtttgcaccctgcgtctccccaaaattctcttctccttcgccgacatgctgcgagcctgcacactgatgctggtgtatcgcaaggctgacgacttcgcgttgcttatcgcagcgtggctctcttgagattactggtctaaccgcccggattatccgccgggtcagtcctgtcctgcaattcgtgtacagtggatggccggtctgcatatgtatatgtagtggtgcattgccgaacattggacgagtggtttgacatggattgggtgggtcctgaacgatgagcaactgagcatgcatacttaggtagttggtactcctacttggtagtgccttggtcacatgcagagcacttctcttcattctggtctactgggaatttggatagataatgttggttcgtagtggagcaggcaatacccgggtttggtgcttcttgagtccctgatgactgaaaaatcacaggagtcgcactgcatgactaaccggcagtttcatggtcgaccggtaaaacaggctttcaggcggaagtgcgtgtgccagaatttgagtggtacagtctttttcacaagtgaggagtagcaacacgctttcacaggaggttggcagccatgcatcacgatccagtgcagttgcaagcatgagcctgtttggtatagcttcagcttcagttccagctctcccttgaaattggaacttagccaaatagttctagctccacgtaaaataggagcggagttgaatgaagctttttcacaaaatgaactggagaggtggagctagatttaggcagctccacaactccactctatatctaactcctgaagttaaaactctaccagacagaccctataattgcaacttaagcagttgttcgggagttcttaaaaaaaaagccagttgcttcggcggcacatgatagagaagttaaaactctaccagacagaccctataattgcaacttaagcagttgttcgggagttcttaaaaaaaaagccagttgcttcggcggcacatgatagagaaagtaagggcctggatcattgtgtgactgtagcaaaaatatatattttatacattttgtagcaatgaatgtgaatcgttaaatcaaaatatgaacggttgattacttacagtcctttttagtaccaactgtatttgatctcaatccggtaggcataggtatctgaatttacaattttcagataacccactcttgttttatccgccaaataagccatccaaaatatacaaattgtacagacactaaaaaaaaaactcactacagaaagcaaagaagagtgacggttcacagtgatgattgtgatgcaaccactctgcatcacaactcacaactcataaccctctgaaaaatggtaccaatctctcctttccgatggccatctccctgcgcccaatctccattccgcaacgcttccggccgccggacggcgccgtcctagctccctccggcggtgccgccgccgccactcgctcgtacggtgcggaccacttggcctgcacgtaccgcgcccgcctccacggcggcaggtgcatgcccgcgccgcggatggactccgccgccgcggcgcacattgccgcggcgacccccctgaaggcctcgggagtcgcgacgagcaccggcgggagcgagaggaggaggtcctggtactcggcgctcggcctcgcgatctcgaactcgccggcgacgttgacctcgacgatgtagcgagcgcgacgccccgtcgccgacgccgccgccgtcacgtccacgtactcgtggctgcccgccggcacgctgccggttctttcccacgacgacctgcacacgccggcgtcgaaccctcgggcgcggagccgctcgacgactcgcttccggatcacgtcgccgccgttgcgaacggcatcccggacggcgcgctcggcctcggcgcggatgcgggcggccgccgcgtcggacgtcgcgtccgctagcgcctcgcgcagcgcgtccttccactcggtaggctccggctccggcgacgacgacacgccgcccctcgccgtggcgtccgcgccgcgctcgccgtcgtcgtagaactcgtgcaccagatccaccaggaggtcgtcgtcgtcgtcgtcttgatcacgccggagggacgcggcaccgctggcgaacgggccacgcagccgtgccctggccgcctcgtccagcaccgccgtcgccttcttgtacgccatcggcgacggccgcgtcgctcccatccaacacgccaatcgggcggcgcgcgatcgccgggttgcctcgatcgaaacgagcactgcacgcggcggcgcgaacaagatttgttgccgtgtgccggcaaagccgtttccttttccgttgcaggttcgggtggattggcgtcttgtacgatacgaggcggttttatatatgtttcggtgtgtggacgccggggcgtttgcgcggctaggttcgttggtttttacaacgtccaggtgcaatgaaccttgtacgtccaggtgcaatgaacctttgtacgttctgtatgtccagatgcatctcgctataaggtttcagaatcagaattggttgaggcgtacggaagcatgtgagaaactaaggccccgttggtttttcagttggacggatattttcatagaacgcgaaacgagaatacatatactagcatatgattaactccctctaggttttttatatgacattggctagtttaacatacatatatatatggaggtaactaactatcaaaattaataaataattttacttggttttttaaacaacttctacataaaaactttttatatgaaaagcatgtgctaacgaaaaacgataaagttaaagtttagagttgagaaaaagaactagcctaagaataaactattggtcatatcttttcgcttatgcttagcaaccaaaatttaaatttgtaatcttaaatttaaaactgattttgaggtttttttttcatcaaagtttatattaaacatttgcttttatatcgttaagaacgagtacatataaattatattcacaaattactttatgtttgcaaatataagagtttcattaataagccaaacgatgggccgatgctggtgttaacactatggtttgtttgaaggtgccctgatgttaacgctattggccgatgctgcgtccagatacactatgcatgacatgcgtacgtaatagaagtttcaaggttattcatgggactgaaaaagcgtgccatcatgattaacttagtctattgcatataaacccacaggtccatttgccatgattggcagtcagtgcatataaccctgatcaattgccatcatttgccagaaccattcatcaattctagagaccatctaaataacatcccattttgcatatcagatatgcctggcagtaatatccattcactaatcactacagaggagattgaacatgtcaggtcctcttatgagttatgacttgttatgagctgtccatcgggttatcacctgaagttggtgcgggcgcgccattgtcgtccataggagtgttggcctccattgctccaaaagtaaaattactaggaatattacttgggttgactcgctcgaagatggacggcacgggctgctggttgaatacgggcgcttggatgtcacctgccggttttgggaaaccaaatccaagaggacgaaatgattcagttggaaccgacgattgagcaggtgcgccaacattgggtccgaaaagcttctgttcatactcaacgagctgattctgtgaagctgtatatataacaaataggttactgttagctcatgatcaaacatttggattaaccatcaattcataatgttacttgaaaaacaaaaggcgaaatctataagaacaaaaaagcttgagtagtagctatgcataagtactagggcgctactatgctaggtaaatgagccacagaagctttcaaagcttatctatgtaaatttaagagcctgtataaggtccccgtcaagcactgatgctacatcctattttgcaaagaacatctcgccaagcacctatattaatttgaataggggttggcaaagatttttcaggcatgaaagaagaaataaattatttggtatgggatcataccatctgtcagttgcacctgtggtcgccggtctttcacccattggtaagactgtgaaagtctccatcccctagatttcatcaagtagcctattacaatagctgcagacctggaaattttgtaccagagaagtattaatcgatcattcacaacaatgctaacaacatgaatgctcacaacactgctatcacacctgttttttccagacatgcaatggacaagaacacgtgatgtctccctttcacactgttctgcaatggcagataacgaaacaaatgataaaaacaaaaacatccaccatttgtttctagtttagcactgcccaagcaaactacagcataattcctactacaggaatgcatttccattggttcaaatgtcaaaacaagcacagagactatctactggagtacgaattcaagaaaaacttgaaatttcacagggaaaaaatagagatttcattccattccaaacaaaaatgctcaaagaatagaatggattttacctaaaaacctgtttgcaccatcaaaatccaagctcctctcatcctgaatgcagtgataagtgaaagaattccggtagagattctgacaatctggcacagtctgcgatatatgagaaaaatgcttacatgattaactaactaatagaggaccagtataatactaagatatcagtttatcacaataatgtattaaaaatgaagagggctatggtaccaacatttctaagctacaaaatgtccccaacttttctttactccgcattttgtcaaatctctttgtttctcttgtaggataaatcatgtttagtgaaaagacatatgtaaagttcataaaatacaaacatggcaccacagcggcacggtcatccctgataaaaagaaatatgcagcagaactacaacttttaggcctatagggtgtaaggagaaattactcaaccaacaagaaagaatacattatgagcatacgatgcatatcatccaaaagtaggaagataattagaatatgagcgaattaattacaaaggagtagaatctacttcaatctaacatgacccaattatcaatctacccagttgtgattgtgtgtttatctttacactttctttcgatcaagtcccctaccccaatttgtctcagatatctagtttgaagaaactctttacactaattgttttccttgtttctaaaaggctaatcattcattaaaaaaggccaaccactcagggggaaaaatatgcttgatacatttggtactgaaaaggcaggtcataagtaaggctccgtctgattcaattgtttggagggatattttcagcgtacgcaaaacaagaaaactcattagcacatgcttaattaagtattaactattataaaattgaaaaatatttttttaacaacttctatatagaaactttttgccaaacgcaccatttaatagtctaaaaagcgtgctaacggataacaaggaagttgaagtttggagttgagaaaaagaactggctatgagggcatgatataccatcaaacaaatgtacaggaatctgtgacaatgcaatcaacacatcccatccttcttccttgttgcaacttttctaccagcgataggagcgaccacattgtattgaccaatggatgataaccctttccctgtcaacatcaaaccttaccaacactctacaacttcttcgagacaacaagataaacttacaaccaatagtccccaaaccctagagatacttcacaaaaaaaaaatattctcacccgcagaaggggagatcatgacatcgcgcctcaactccatcacgcagaaaaacaagtcaaaataggagcgattgggatcatgagaaaggggggcaacacattacgcacgttgaggatgtgggtgatgctgagcgtcttgaggacctcggagcgggaggcgttgttgtagctgccgaggaagaggaagtccttgaggacctcggtggggaaggccgggtccagcgtcgccgggggctccccggccatcggccccgaccggtggccgcagaccccgcaccgctccccttcctcgctgttgtggtagtgcccgcagatctcgcaggggttctccctctcccgcttcctcatctcgcctcctccgccggcctcgccgcagccgccgccgcgctcgatcggccggtggtggtggtgcggtagtccagtggcggcgcgcgcgcttggagcaaaagaaagggttcggagttgggtttttctttttttttttctttttctttctaacgcaaagcttttcggctttctgggaatttttttttaaaaaaaacttcggcatttggttgggtaaaaggaagactgagccgtcgatgtggatttggacggctgggatcgtctcggcagttatggcggtgtcgtactcgtacaaggttggtgagattgcgtatgggctgatgactcttaagctaatcattttgatgaagtatagtgctagtactccgtactggttatttttcattgctatgggataatacacaagttttagataaaacaatatacactgtgttattttagttttaggtgttgggcgattaagaatttttttcaagaaatatcaatttaagatttctgcattgggaaagggttgaattagtgcccgcctgccaggttaaataagggtcctgtttggaagattagcccagggctaattttgagagctaatatttagtcatgaattggtagactaaacattagtctagggtggcatgtgcatgtttggatccatgggctaattcaaggctaaaaggtggagagagtagaaagagaggagaggagagagagagagagaacagggccaaggtcataccaaaccggacccaatgttgcactgaacagacatgttgtaaaaccaataaaacttacgagaggctaattttacttctgacggcaagattagagctaaacagctaatataaaccgcccatatgtttgaacaccactcaggcactaaccaccagtcaacagaaagaaacgacaggtctaaaacctaacaacaagatactacaacgaacacaataaagggtgtcaaaaaagacagaaatcaccattcatctgtaccacatcgagatcatgtcgagccaggaaccggatcagcgtcgaagttttcggtggatgagtctgcagcttccttgtctgcaggagctgcttcgttcagtgaagttgccgtgttcttcgacgcgcctttcttgtcatccttaccagcagaccggccagtactcttgctctcgttcagctgattgccggttgatagccttctactcggtgtcccgtttgatgcgccaccgtttggctttgtgccagccaccttctttgcactggtcactctgtagggattgacccgtgttccgaatggcccctcacggtcgatgtttagtagctgttccgtctggcgtttttgttcctggaatgtgaaagaaatagaacagatgattttgatgccaattgcaacatctgactcatcatttgattgatcgaagcgtggataagtagcaccaccatagaatccttgttgacaagggcatttggatgcaatatccagtcgatactaaggagcttctgatagtataagaaaggaagtgtcactaacccgcattcttttcttctcttcttccctctcttgcctaagaatgacatactcatccagcattgctagcagagaaacaccgtcatacataaatggcagcccgtgattttcttcccaagctctcgtcttagccaccagagtttcaacaagggctaaaaaaaattgctgtcattagcaacgaacaggaaaaacaatatttacaggagaaaagatatagcctatcctgcattatgcccaaatgcagagcttcttgagttggattgtgtaaagcttagaattatcatttactgccaaaactatttacttatgcatcacagtaggcacctggaatcttgctgactagaatacgggccttttctgcacgtttgagattcaggtgagcacctcggcctgagttatacctgttgtcatcctgcaaaaggaatttcatgctcagtacttcatagcttcagaatataggtgggataacacgtttcactagtagtcagaacaaccatactctgctatagtcttcaagccagctttcctcctcgcatgaggatatccatctctcaactttatctaatatttcttttctgctcagagcttcctcctttgctttcagtatctgactatccatgtcagcaatcagttctgaaggttccatgttccctgactcaatcagtgcctgtattttctcatgggcaactgctgtgtctaatacaacatgagtgctagcataaatatcttccagtatggcttgcttcttaaaagctatttctttcatcttgctgtattttagctgatccaacctttcaacctcagtctgtgcctgaaatattgggtaatgaagatcaaaatcaaacgagaagtaaaaaatatatatgaagggatgctgaaggtggtccaataaaagaccaattagtatattgtgtgactcacttgatcaatcacatcaacagcaagtgcaccaggaaccatgacctcctcaacagttgctgttctattgcacgaaacatgatcaaacaagctcctttcttccaccggggtgtccataagatcccatagatcatagagttgagtggcaagctcttgaagctgaataaacagtataaatcatacatgagatccaggataagaatggctcttggttgctaagtataaaactgaaagaaagaaaatatgagttaccttctcaagtctcaaccttttgtcctcattaagagtaccaatggtcctatcaagttttgacagggtttcattgcttatgttcttgtgttcgttaccaatagagtcatctagactgctatggacttgagttattgttctaaaaaaatccatcccaagcacattgcatagatcatgtaccataccaacatgctcaagaaccttttccagcctacgactctgtgatattcatggaaacatatattatagtctctatgaaaccaaaaacacagagatcaccaagcaatataaattacttatgaaaaccaaatgaaacagacaaagtttgtaccttctctttctcaagctcttgaagctgtaactggaactctcgaagcttccgaactgtcaaatcatcctcattaatctgtggtagtgccacttgctgtcccatctccagagtaccagcaatctcaccacgtatttgctcaattcttgactgtatattagctaattcctttattctctcctttttcttcttgcccaattgttcaagtgttggagctatagcagttagttgttccttgatagtccgtgctgttttctcaggctgtacagataaaaaattgtcacttttgcatccactaatatttaagcataataatttagcaaacatgtgaagtgccatctgacttctgaactacaatgccagatcctattaaccataatcatcagtttcaagaggacttgcacaccgttactaaaaaaccaactgcatttttactgaacttctatgcaagtactaatagtgccagcaatcaacaccaaacatactctagcatggcagaactggtaagtcaagatgcaagaaacacaatgacacagaacaacacgaaagtggatcagtagtcagtatttcaacaactcatatttgaatactgaaaattttagtgaatcgtgcctgcctcattctttccagtattaattcagactgaaattagcctatgcgtactggaagaagacgcgcatatttacttacacttatatctatggatttttcaccaagggcagaagcaagcctagcaagctctgtctttgagtaatccagtgcctggagaagaagatcccttgatttggttgcctgatcaactttccgcttgtagacatccaaacactcctggtccagctgaaatagaaccttgtcgcggtcctcctcgctttcaccaacttcatcccataccgactgataattcaaaaatagaaaagaagaacctctacttgaacacaaatacacaagcaaaaaaaaaaatctctaatgagttatgacatgaacaagtatggagcagttcacacgcatacctgcagtttttgcagcaatgatccacacgaagtttcacggagcaaagcagacattctggaataggtgaatccttttgtcggagctgtatggctctataaactcttgctcaagacaaaagcaacggtgaaatgcacttcaaaacttgcaaaggccaatgcttagtcgatcccgatctgccaggctgagcatttgaattggtcagatatgattataagagacacatataactactagcattttaaatcgttctagcatcacatctcccccaccaattgacagaaatactattaaatgccaatcgcagaaacagctgatggcccaagggaaaaaacattaattactgccgcacacaacaacaacaacaaaacagctcaatacctgggagtttcaacaggccaacaacatttatctcaaacctaaacaaatccatccgtgaaacgcaaccaaaatcgataattcatatggagatagctctgcatcgagatcatctccaccgagcacgcaactggaccaaatctagaactacaaacaacgccattggtcgacaactggatgaagttcttcggaaattcctaagaacaaaaccaccggaaccatcgagactaaccaaatcaggggtcgagagacagacaagcgcattccgccgccgcgacgcgccaatcccaccacccaagccaaggccatctcttagactccactaatccacgaaactctcagctcatccacacacatcaagcaccaaaataaccagatctccgttgccacgagcggcgacggcttaccggatcacgcgaagacgaaggagtgcgacgccgaatgtggaggcccggtggcaggagagccggaggcggcgagagagctcacccgcctcgccgtcgccgtccggtggagtggcagagaggtcaccggcgccaggagtgagtagcagagcgagagtagcattcactgctgctgctgctgctgctgctgctgctgcggtggagtccacgagtccggagtggccagcgtggtgacaagcgcgacgtggcggcttcgtgaccgtccgatgggacgacgcgatcatccgatggccttgttggcagtccgacgttgaccaaacttgactcgtccagaagcggggatgcattcccaatgacctttctggttcgttctataatggcttgtttgaagttgaacaacatagcgcggcatggcatctctcccaagcattttttcccctgtattcctctctgagacttcaatactcaagagtactagtactcgtgttctttttcaggtgtttgtctgctagttcatgtagcgttgtgagcatcgaacaaattggaattcgctggttagtcaaatactgcacattagctgcatagcaaatcaagcgccttgcatcactgggagaaaggagaaagcaggagatggccattaccagaacagaacagcaggttttaacctaacattctctccgtcttttttatggattttgaacctaccattctcgtgatcgagaggagagaggactggttggttcgagacatttgatccaatctaaagcagcgatgcgtgtgacgaccgtgtgtcatcatccatcgaccataccgcgcgtccgctcctccctcctgcgccactcggtcgtgccgcgcgcgtacgattcgttcgacgacatggccatcgtctccgtcacgactgccaccgccgcagctggcgttctcattctggttgtcgccgctggagcagcagcggccgccggagcacgtcgtcaccacgtcgtcggaggtgacccggggtgggcggtggcctccgacgtcctcgcctggtccgcggacaggctcttcaccgtcggagacaccctctgtaagtccatgacgaatgcatgcgtcgatctctgttcagtattcagtttcagagaacttgctgttgttgtcagggttcgcgtactcggcggaggacggcggcgtcgcggaggtcggcggcgaggaggagttcgagtcgtgcgacgccgggagccccgtcaggatgtacacggaggggctcagccgcgtcgacctcggcggcgaagggtcgaggtacttcgtcagcgccgacccggacaagtgcggcggcgggctgaagctgcgcgtcgacgtgcgggctccggtggctggtacgacgccaccgccagggtcgtcgaggaagggcgaccgagctgccgctccggcgcccgcgccgttggcgtccagcggcggccgcggagtcgccacgtcgcggacgtgcgttatgctgtgctgcctcctgttcctggccatatgaacatggagcagtggagcacggtgtgtttcgtctgatctgtcaattgtggtgttgtattctaccatgtatatcttcgcctagcctactttcgagaataaatttaccgactttctgatcttactagttcgtaggctcgtagcgagacagtcaggctggccgtaacaacggtagttaccttggccatcctatgggtgatatcttaggctcgtagcgagacagtcagaccggccgtaacaacgttagttaccttggctatcctatgggtgatgtctcatatggcgacatatatggtgtaatattgatgatataatatttgcaattgcacaacataagtctcggaagagtagaaatgcaaataagatagatgtgtaattgcagctatcttgtgacactaacctggcacgttgcgcgtcgcaactcgcaaccagtttacatcacaactcccaagtgaacgtgtccccgtccttctcaggtcgctcgtttcaggtaaacttcagaaccggccaaaaactggaatacttgagaaatctgggcgaaacactcggttgtaagacagctcagagattcacgggtatatcaaacaatcgagaacaccagtgcaccttgcactggccccgatggtgatgaactttacggtaaaaaatcatatcattacgacagaacctatgagtcactcaaccaaatcctatgtaattacagcctttataagatcagcgcagaggaagacaagacaggtaaagaaactaaatatagctaggagtgatagccgaaggaactacggtaaggtaacaacatccttcatgcgcgctacattgattccagcaagtccagtaggaagtaggcactgcacgagttaaaagaaaccacatgtcaacagaaatgcaaaaaaagataagttggttgaagtgattaaattgtgggctttgtctggtgagcatagtttctattatgagaccagctgcccatttaattttgaatgaaaggttttaagagatgtagaggcgtagcacaaacctcatgggaaatggccggcagcacatgatgaacttatggtgactggtccaaaagaatgttgacagcatggttaatcactgaagctacgctaggcactaaccgaactacaggtggcttcatcacgatcgcgtctgtaaaaataattgaatatagggtcaggtacaaattgttgaatttctgatatgcctgtcaaaggttttaactcttagaatttgagcaaaaactagcagcactgcataatggttagataactcaaggtctcgagcacaatattcgctaacaggtgacaggtccactaggcagtaaatatgttacggatgacatcgttgaaacgcataaaacagcattcaaatgtggagtatcgctttaaagatagcatcgaccctaagtcaaataaacagggaacaaccaatataaggctattttggaatcgaggaattcatagtgaagtactccttccatcccagaatcctgtgtttcaaagaagcctttactaatactggaaaaagaattattaatacagctagcaatctagcaccataaagtataactggttagattagaacacacctgcaaatggaattggatgcaatctactatatctgaatctaattgttttcctctgttgctgctgcactgatgtccacaatttcaccttcatggccacatgcagcttcatcttttgaatgcataactccatttgatgttatctgtggggctgtagacatatcaggcatcgtactatggtcagatttgtgtttatctgtttctcccaggggatgttcttttctgccattttcagccaatccatttacttcctgtctttgatttgttggtattccagtatcagtagtcatgtcagcatcctcagttgcagaaattgattcaggcaaaggaatttcttctgtagcaacattggtgttttgatctaaagtggcatcagtagtcatttccgtatctttggttgtacatacctcggaaattacagtagacttgggcttttcttcaatggcaacgttgttgcttggacatattggtgttccagcattggtagccattgccacatcattgatcatgtgtggaacagaagttacttcagtgtggagattctcttcagtgccagcactgtcaccctggcttatttgtattccagtattggcgctcacctccacaacttccattttatgtgcttcagaggtttcttgagtactgggtttgtcctcagtggcaatgttgttggtttgatcctttggtggtatatcattatcaaccatttccacatctctgcccgaaatgagctcagagtctgcttttgacttgatatttgcttcagaagcaacaatagaagagttgtctgagcatttttccccagaaatttcatgagatttctgctcatgcaaggtatcatttgttgaatccgcactgcctgaaactaatacactggacacttcttcattaggagatttccctgattgggttccagtcttactgttagcaggcagtccactgctctgtagttcatcagggggcttttcattacgatgtgcaatgctactgcaaggacccacattccccgtcttttcactagataaggctgcatcattatttaaatttccttctggaagtctggatatagaaagcggctgtgattgtgcaacagcagcagtaacacctagagccaaaacagtactgctctgagcaacactgccagcttgcgtggagttttgattcagaagattaccatttacagccactttttggtgattttcctttacagcaatattttctgccgctccttgcgaagaaacctgcgttccagctggtggtggagtagcctttggttcgacagcagttcttgtaaccttgccatattttggtggcaaaggcttgcccttactctttgtcaggcatgttggacaatgccactcagctttaggaacacctttattaccataatgctgaaggcatttcaagtgtgctcccttctcacaagcatcacaaacaagcaaactttccatatccatgatagctactttgcatatttgacagtccaaacgagaacgcatgtactcagttgatggcggaatccagctaggatgattagctggttggtgcagaacacgttgaacactttttgctatttcactgtggttagcaaaagtaggttttggaggaacaggtgccacgcttggtgtagcatgatgacctgtaagagggtttcctgctgtagcatcaattgatgctgtctttgtgtcctgatttttcgccaccggattggaactctgtacagcgttcagattggacctagcacatgtatcatgaaatgatttgttcaagttgccataggttgctgcagggggaaatacacctaattagtttctgagctaggagaatcaaagtgaatctctttttcataatcagaattataaatgtaaagtacttttgagacacaagaaagaaattcttctaggcaagagtgtttaagaaagatataaatgatacataaagaagagcttaatagtttctatgtccaaagttgaaatcataaaaactgttgaatttcaggtttgtttctgcgcttctgaataatcaactccaggtccaggaaaagggatacttctcttggtctggaatctgaagggaatggtagtagaacatttacatatgaggctttacccaaaagctctaaacaatattccagaagaccaagaccaaagcaagcatcttacttagaattagatggaatgaggaattaataaaaaaaagagtaaatttcacaaaactacatgttttatggttcaagttgcagaaaaccacacatattttgacacttgacacttaagtacatatattttggtagtttagtttcacaaaaccacactatcgatgaatggattcacccgtgagatgacgtggttgctccatctaggatgatgacgtggtatatcctattaatttcgtgagatggctggtaataggatgtcatgtcctcgtcctat

SEQ ID NO: 9873 - DNA, 53102 bp, Oryza sativa
gccacccatcgccgcgctcgcctgccaccctcccatcgccgctccgcttgccaaccgtcggcctccctcacggaagaagagaagagaagagaagagaaaggaggaggaggaggagaagaaaagagaagggaaggaatgtgcagctgacatgtgggccccacgtactttttttattattttttttgctgactaggatgtcatgtgggccccacatactgcctagggaccttaagtgaatggttccgtatagtttaggggtggagaatttctagttttgtggttaagggacgtcaaataaatctcgatgttaagttgagggacttccggtgaacttattcctaacaaaaatatccaattttgttgggccaaattgggataggccggaatccaatccttcagacgtgaaagattgcagctcatctaaataaggcccatccttcctagtcatcgcggctaacgtttcatgcaaataatgtcttccttcatcctgtaatcacatttgcttgtgttgggagacttggagccggagggcgacggtcgctgaatattatttgggcatcagaataatttagggatcatgcatgggacaggtaaaactcaacaacaaagttcaacctgtatggtgttacgatttttctaaatctatgacaagcatgacgtccagtctatactttattgaatagaaataacttatctagattaagagctgtgatgccattagtcatggaaaacctacaacttgtctggccaaagatcataagagagcctattctatatcatcgagtttactctaattcaatgatttgtcatcgattttgcctctctctattatataccatgactctgtcagttttttctacaatatgcattgggggtgaatacttaaaaaaaaacttcaaatatccttcaaatcatagaagggttgacaatttataaacccactataagttccaaaaaatgcgaaagtttttacatagcctttttatacaatatatgtaggaaccaaagatagatgcatatgaaaaataattgtgtattgcatagcacgtgaaagatggtttacataaaagaacatcaacaaaagatacttatattagcataaaacataaacaatattttcgaaaaatgtcagtgtaaattgaaaaccttgaaatgtgcaacacacttctatattttattagaaaggcatgtgaaagctttcatattttatcgatcttctagtcgatcaatcaactatcaacccttctacatctcgaagggcatttagggcctgtttggcagggctcagctcccagattcaacttacctggagctggagtccaaccaaacggtccaaatatgttcaaagctggagcggagcgcatggaatcgctctgagaaattgaactggcgggttggagcggcattttggtcgctcctgaactccaactccaaccgcgttatagaattgcccatatattttcgatgaaattacccgcaaatgccatcgccctaccccccatccctctctcccgtaccgcttcaccccgtcttccccgacctccagctcgcgggagcgaggaggcgaagcagcagacggcgcacggtggaggaggaagcggccggcggtaacgacgcaccggctggaaatagccggcgcatgggcttcccctttcactgtcgctcccctccttcccatcccggcgcacaacggctgagggcgagcacggcggcgcatggcggctaatggggaacacgggggcgcacggtggctgagggcaagcacggtagcacaaggtggatggagacggcgcacgacgaccccaaatagcggcacggtattttctcccaaaccctagaaatttccctcacctcttcccttcagatttggttgagtagttgttatcatgcaatgagcaaatggggaagtttcagatctgaagacttgtctagtgatgaatggtaaaaatgcaatgagcgattgggatgtgtgaaatttcagagcagtgatgaactatatagtaactttttttttgtttagtgttgtaccttgtgtttacaattatatacacacttggttggaattgagcaaatcagcaaatggttatatacacacttggtttataattctttagtataaaacctagcagtggaaagaatgtccttttataggaggataattggattgggggcatacccctggctgagcaattgggagaaaaagaatagggaattcactatgaaatctttctatgatgccatgagaatacatggactgagggcctgtttagatccatttggaatggcaatttgcaaaagttttgatgacaaaagttttggcattgcaaaagtactagttggtgtttagatgcatgttaaagttttgccatttctagcactaaagtgagagagagaaagagagagggagtggtcccaaagcactttttggcacaatttgctactatggactagcaaatgctaaatgccaaattgccaacttttgctactagtgtttagatccaaattggcaaaaagtgctacaaaatggcaaaacttttgccattttgaaggatctaaacagggcctgaacttcccacacaaaagaatctagaggccctaaggcacccctgaaagtggaagtgtccatgtggctattaaaaacacagcatactaacaaaagatggtccaaaaaatggggttggaggaaaggaagctatgactttcaattctgtgatagatttgaagctatacaatatctttttatagattgtccttaattgattcatggggtgttttgctgacctcaatggaaagacaagtcacaagtgagattttcaaatcaagatttggttagagggcacccctacgaaggattcaagattgaactaccagaagtccctttttttttgccgtcatcactgttgtccttgctttcacttgttagtttttcagatatgtgataccgagatgtttcgcaaaggttcagttggatgtaaagtagcagcacaaaacttcagtgggttatgagatgtcggtatgactgagagactaatactattgttggtttttttgcttggagctgacctggacccttgcttgcaagcaaggccttgaacttattcatcgatggatgcattttaccttgtatacgcagcacggcgacagcggcggggtcagagcacggcaacgacggtggtgtgcaaggtttccagatctgtgtggaaggtatctgcactgcaacgacaggttatagcatttcattttgcaggttagcagctggtgaactgcaatctatcaagatttcacgcctgccttcagttttatctgttagctaatgacagctagtgcacctttgtgttttttctgctctgtgtattctgctggtttgtgaatagattactatgaatctcttggaaagtcattgaaaattgtctggacctttattgaaaattgtctgaacctttatcaaaaattgttgtaaattcagttcatcagtcatgttttccaagtgattatctgtgttgtgattctgcatgtggcagctgcacatattgcgatttggtttgatatcttgcaagagagaggccaatactttcaggatgagataacataaagcattcatgatgatctagctggtcatactgcacgatgatagaccatattactatatgttattttgtggtcttttgctctatcttttgatgataatgatgctacaagttgttaaacatttatattactaaggaaaaacagcatattaatccttcatgaagtaaacggcaagaatcacaagggtggtattgtccatctcctccctatcctctctttcagaattttaggagctgaccaaatgaggcaaacacttttacatcatcttcggctcttacaagaggtagctccagctggagttagagtttggagttaggatctgagagttggagctttaccaaacatgcccttaataaattgtttagaagtatcgacccaatgacatcttattaaaaaaatagcaaagttagtggtatattataaagggagataaagtcggcggtaatttgttaagacagagttaactcagtggcacgaaattaaattattttgaagaccattctcaacttatacatccattcaattactactcaatccattttccaatctcccgatggatcatcaaagttgatgttctcaacctagcattagccaacacttgattatcatataacaatcaccgttcatgcacatgttaattgccctttgaatcgaagaatggacggccggaactcgaaatcgaaagaaaattattcctccttccgtgcataaacaaactagcattattgggcaacaaatcgcaacagcctagctgaccatccagaaaggcgacccgcacattgcaaccaacttgcacgttccgcaccgcaccatcccatgttccgtgtccaccattcacaccctcgctccaacgcccccaagccccttcgcgtagcgctcgccgatctgaccgatccacgcatgcaacgcacggtggcatgttcacaaacgaggcgcgcccatccgccgtgcagccaccaacacgccacacgctgatacgcatggccgagaaaactaacgcaccaaacaagcccacgacgcgtcagcggctcaccgcccgggtgagcccacccggcgccgttcggtgcgcgtctccacgcagcggatcgggaggatatcgcggggaacccggcatggaacgaaccagccactccaccaccagcccaccacccacatggccccacccccgcggccccgcgcgcgggcgcagccaagccgccgatccaccaaccccgacccgcaccgacggcccagatcgcttacccacgccgctgcacgcgtacgcgagggttggagccgcaaaattccagcgtggaatagcagcacggcatttcctccctctctctctctccacgggaggcggagataaaaaggcacgcagccgctccaagaaaccctcgcccccacgacgctcgctctctcctctctctccctcttccgccgccgcgcttggggaaggaaggagaaagcaagccatcggcccccgcctccgcctccgaagggtgagctgctcccgtcgtttgcctctcctcctccctcctctcctccttttttgggttgtgctcggtggagacggtgatgtatatatagatccgtggatctggctgtggctcgcgcagatctgcttgtttcttccaagtagacttgttacgcctgttggtgttcgagtggtaggagcccttgggcttttccaggttcagatcgacgcctccttcctctggtatgggaggatctcctgttcatctgttgactgggtggtcggttgcttagatctgttctatttctgctttattttgtgcatgtattgtgtggtttgtagggttatggctcccctgtgcgcggatcatgtgggtttgggtttcgtttcgttcgtagaatctttggatgttcgggttggctccgaatctgtagatcggaaggtcattggtcaggtggggatggtggggcagccaaaagggttgcgtttttttactggttttctttattttcactgacgtcgactagatctggtcgtctcatgtgcctcagatgcgtgatctgaacgcacacaacccctccaaacatgactctgtttctcgatttgatctgaccgtgaccgtattacagtaacgatccatccttgtttataaacttgtacagatttactagtataatcctgtgtttcatgcatgctagttttatacttctcattacctgttggtagaatttaataatgtgctctggaattgcgattccttttgctctgcacaaaaaggaacggccctgcttggacagggaccatccttttctgcgacctatttaaagttctcatggtgcgtcgtgatggtgatgtgcactactgtgtagaacaccttatactgtttgtcatcaggagttccactgcaatttttaatacattctggatgcatttttgtagagactgtacaattgtgtaattacatgcttatatatagttttttgggcttttgttcttggtaaatatcagtttattagctctttccgtttagtttcttaagcactacctctgtttgtacaccatgatttcttctaatgaatgaaatatctcaacaataaatctttcttctgcactgtctgttcgtatgctatgatttcttttgagtgaaatatctgaactacaaatattttgagtgaaatattttgcctgtgatcctggatttctaaaccagtactgttgccttttatgatgcaggacattgttgctagttggtgatggctgagcaggctaatcaaccgactgtccttcagaagttcggtggccagttccaccttggctccagcttttctgaaggtgtacgggctcgcaacatctgcccatctgtctcatcctatgacaggcgctttaccacaaggagctacatgacccagggccttgtcaatggtggcatcaacgtcccaatgatgtcgtcctctccaatttttgctaatgctccagctgagaaaggtggcaaaaacttcatgattgatttcctcatgggtggagtgtcagccgcagtttcaaagactgctgctgctccgattgagcgtgtgaagctgcttatccagaaccaggatgaaatgatcaaggctggtaggctctcagagccatacaagggtattggggactgcttcggacgcactatcaaggatgagggttttgcttcattgtggagaggaaacactgccaatgtgatccgttacttccccacccaggtaacctgcaattttcatgatggtagccaaatttatgttttgtatattacactttggaacatctatgtaaaacacctgaacaaagcactacgttttgatgttcagtagcctgtgtagtgattctatttaccttacatgtttatcacttattaagaagtttgaatcaatcaaaatttattaagaaagaagagttcaggtgtgtttacattctgtttgctttgttgctattgcactatagttcttttcttattctgatgacttttgattttgtctcctaggctttgaactttgctttcaaggattacttcaagaggctgttcaacttcaagaaagacaaggatggttactggaagtggtttggtggcaaccttgcctctggtggtgctgctggtgcttcatctctgttttttgtgtactcccttgactatgctaggacaaggttggccaatgatgcgaaggctgccaagggaggaggtgaaaggcagttcaatggccttgtggatgtttaccgcaagactctcaagtcagatggcattgctgggttgtaccgtggatttaacatctcatgtgttggaatcattgtctaccgtggtctgtactttggaatgtatgattctctgaagccagttgtactcactgggtctctccaggtttgttcttatttctgtctcaatattagttgttttttgcccatctatggaactattctttaacatcttcattggtttgcaggacaatttctttgcaagctttgcccttgggtggctgatcaccaacggtgcaggtcttgcctcttaccccattgataccgtccgcagaaggatgatgatgacctctggagaggctgtcaagtacaagagctccatggatgctttctcccagatcctgaagaacgagggtgccaagtcactgttcaagggtgctggtgccaacatcctacgtgccattgctggtgctggtgtgctctcaggctatgaccagctgcagatcctcttctttggaaagaagtacggctcgggcggtgcctaaactggcagaaaatgatgacgaacaagtgtttattcctggtcctgcactaacgggatctggtgaattttgcctttttaacattgaaaacaataataattcttgtaggggagaacactccccgacattcgttttttggtggaagcgtttatctccaaacattgtcataggcggaggcgttaatcgcaaacagtttaccatcatagggttgagtttgagttgagtctggccggctctgttatgtctggcgattttcctaccatacattaccctcggtgaaatatcgaaagattattgagttgctgtcttttgttggtgttactattttgcaatgcttcattatttctactgtttcatcctgttatattcctgatagcattttgcattgcgtttctctacatgcatgcaatttattgctctatgaatttcacatactatacaggagcatttcatgtttgtctctgttcatgtgaaactttttgtctgttaatgtgaagtacgaagattcatttgcgtgattgaattccatcttcatgaatagattgaattacatctaggtgccagttgagctgaactgccgagaacgtatataccgatccgaacataggcaagatgcagaggacacactagctctctttccaccgctgcagcgtctaagataccctttccactgcacctcctgacgaaggctcccacgcaccgcggcgcgttcggccttgttctttttgcatctggtccatggttttttggggtgtgcacagtagaccagattcgttagggaacctccatttcattcaacaaattcctgttcttgtcttttgttctaattatgctagtaaatgttttgttatttaattaattgtgtggtagatatttttttaccttcttggcaacaactttgttccacatttgcagttgcaatagtgtaacaatgttttttttttctgaactggaatccaagatgattttgtgctgaggtgccgctcattgactatagtggttgttactaacgaagttcaatccagcacccctgaatatcaggtccatcaaactaaattaccagtcgtatttcagcaactgaatcattgaactctatttctgtccttggctgtttttgagatttcacataatatacttccatgcactaaattgctgcttgaggtcacataaaatttatgaattgcaggaacatataatttttttgttaatttcttatgtattcaaggttcaataaaaatataataagatgaattttgaaatctgtcaaacatattccaatattccattcctgcaggaacaagatgttagttatgttgatgcggactggggtcttcatagacaactctatacctcactctactttagttatcgaaggacagttcgcagtcagattcttctttcacagcagagcttatggctctcatctttggacatgttatatgcagcactttgcaacttgcaattgaacaatgccatttacttgtcagattacactactgttgtcaaggttttgcaggagaggaaggatatcatgcaagcaatcgaggacactggagcctccggccactctaccattttcagcaagttttgcagggacaggagtccaaattaggtggataccgtgatcggtgaacaaaatggcagacaaactggtgttgtgagctagagataggccagccagaagttctctttcctcagtttgtcatgatttgtaacactatacttcttctccagttagctctcagctatctgctctttcagggagatccacctccctaactcaggtccatatgtaacggggagattgttactcgcctatgaaggaattcagtaacagaatccagctttctttctgctacgaacaaatgttcaccactgtagccacttcagtatgcttagagcaattgagatactctgcacataaacgaaactagcaacttgaggtctgcaagagccaagagtgcaagtgggttacccgcgaatccacttataggttaaaataaacaaatgctgtgatcacacctccattgcgacgtttcttcaggtgacgaaaagcctgacgagtagtttaggcccccgacagggccctgtttatctgggctggttagatggctgaaataccggcaaattggcaaagtttgcctggtggacggtgtgtgcaaattgcaatgactccagccatatggtactgaaaatgagttggcatcactacatcactgcgcctcgccgcattgaaatgtggaaatgaatggagttgccctgcgcgcagatctatgattgggccgtgatggacgggcccgattcaacgggacaagccgacatcacctgggacaaaaacggactggctgggcaggtacccactcagatcttcacctacccgatcagtaacacacagaaagcagaagcaggtagtaaacccagaccattctcacatccatggctcagtagatgtggatctccattttgacttcgaacgctagctgctttgccagtttgccactgaagaattgagacagacagccagacaggatagttaataccactttttaaaaaaatggattaattactggaccaaccccaatgatcatccagacatcatctgtgcaaagcatatatgcaaagaaaagaagagaaattggtggtggcatactggcatcgccttaactaacgcgctacagttgtaccactgccgctgcgcgcaggtcgtgacgctcacgtcgtcgccactagtccactccctcgcttcgcatctcgcctctggtgatgagagcggacagagccgagctgagggaattaaaacccccttatcctctctctgcccccgggctgccattgctggatccaaccatctgcccccgccacgcctcgtctcgcgctagccgtctcgcgtgcgtgcgcgcgcgtcgcgccgcgccctcgttttggagccttgcgccccgctactttccccttgtcccgaacccggaatccgcctcggcgagcgtccttgctttgcttctttggtatctgtgctcccgtttgctttgccttgccacgctccttcctcctcctcattgtctcctcccgtggttcggctcattctgttcttgggttgacgcgggctgcgtgcgtgcgtgcgtgcgtgcggaggcgatgtcgtcggcggtggatgccatctcctgttccaagggcatcgcggccccgccgacggaggaggcgacgaaggagcgggtggcggtggtgggcaagaacggcggcgtggagcacggcggcgacgccgcgacgatgaacgggaagcagtgcggcgaggcgccgcattgccgcaaggagagcaacgaggaggaggaggatgacgaggagaaggcccccaaggccatcgacctcggcccgcgtgtcagcatcaaggaccagctcgagaaagacaaggtaccactactcattcccgccattgctcgaattcttgcaagcacccgccattttatacaacgcatccaattcttcatgcgtttctgcgtgttcttgcttaattgcaggacgacgagagcctgaggcggtggaaggagcagctgctcggcagcgtggatttgaactccgtaggaggtaaaaattcctcgaaccaaatccatttctactaaacgtttttagctgcgtcgtctcgtcgtcctcgcgatctcgtttaatggcgccggccggcacatgcaacagcgttgcatgtgagcctgagcaccgccttgtgcccttgtcaaagatggtcccgtgataatgcacctgtgtacctgtccgtgcttagcccccgttctatgggccacgactagattcatccatcgtctatagtattcatccatgcatgcaccgcccccgtgagctccgtgttgcattctactccgtacatttgtgatttgtacgtagaaaatacggtagaacagcaaaagaaaaagtgaaatatgttgggcttggctggacgggtccggcgttttcaatgcaccggttagatggtcctgttaataactcctgtactttgccgtgcatgttcggcttgtctgataatgaatctggtccgggctcctaattgaagcttgaactaatgctttcatctgatcatgacattgacaatgccttctgatcttaatactggggaacagtgcatttctgttgttagtttatatgctagggtgttggtgcttttaagatcaaatggattttgaatagtggcctaaaaagacacatttttgcatcgcataattctagcgaaccttggctttttgtctatgctttttagactagtgttgaataaaccatgattcatatggttgtggttgtttaaccaaataatccgaggatgatggctagctgcttcacggtcggttttaggatgatcattcattcggcatctgcttgtcttccattagaattttaaactcaaaactacggccaatcatttggcctacacgtcctggccattaggatgcaataatgtcccaaaaagaactgacccaataatgaggtctgaagtctgaacctgtcacgcttgattttatcggtgcagagacgttggagcctgacgtgaagatcatgagcctggccatcctctcgcccggccggccggacatcttcctgccgctgccggtggagcccaacgccaagggcgtctggttcaccctcaaggagggctccctctacaagctcaagttcaccttctccgtcagcaacaacatcgtctccggcctccgctacaccaatgccgtctggaagaccggcatcaaaggtatacccaaacacgaaaaacatttaattaggtctccaatagatgaacaattaattactactaaaattttataaaatccgatggatttagcgcgtttgaatttgtgcaaacgcactcatggttttggttcctcccgttggggcgtgcagttgacagccacaaggagatgctcggcacgttcagcccccagccggagccgtacacgtacgtgacgccggaggagaccacgccgtccggcatgtttgcgaggggatcctactcggccaggacgaaggtacgcatgacgcgaattttctttgtcagatatcagctgcttcaggaaacctgcaaggttcagtcgctcagcaatgtgttgttaatttattcttgcagttcctcgacgacgaccggaaatgttacctggagatcaactacaccttcgacatacgccgagagtggccggcgttgagctaatgatcagctgagccgtttttccggtggtggtcgccgagtagaagggtgaggcgccggccggccggcattcatgctgtgtgttactgtcgtcaccgttgggagcagaagtggacattttttttttcgtctcgtttgcgtcttatccactcatttttttttttggtttgattcaccctagggttcttttgtatattgttgccctgtctgtcccggttgtttgctgtgttaacgccgtgttagacgtacgctttgtcagttcaagttgatgttatgctatgtgttatgtcagtgtgcgtgtttgagcttctgtcactctgtcagggtcctgtttcgatcgaactgcctgtttgagttcagagcaacgcagctgcatttcttgtaaacactgggactgtatctgacgcttcccttacaaatttcccattctgtgtgcttctctctgcaattacacgaaagacatatacccataggccatagacatcactatacatacacaaatcaataaatatactccctaatacatactcaaagacagaaaccaatgagaattcctatactaaaatcccattaaaaacatagctgtgagtatataatattcgtggcaaccagagaccaagacttaaatagtgggtggtagtcatgcaccctccaccacgaacatcaccgatacttcctctccatgtataattgtctaaacttgttttaccagtgttatgccttgtatattagagtgggtaacttcgcggatcagaggtctgaggattcccgtataatttagggtgcaagcaagcaagcagtagctggactatttatcatgggtccccactccaactcctcggcggattcatcacgcaagatgcatgtggtcaaagctttacttacatatagttgcagcgattggctaagggatgcaaagttgcaaacatgtgggttccttccgttcacctgattaaagaggaattaatagcaacacaagttagcaactcgagtaagcgggccagaaagcaggctggagcggtgatttcaggcagcccacccaacgttccaaccaaacctaccgttcgtgtgggccacttttccggcccgcgcagaggacgatccagccggcaatgctggattggcccgtcaccttccccccttttcgcgcagcgcgcgtggcccatgttttggataggtagacttcgcggcccaagctggtgggtcaaattcagaagatatagtcggccctgctcctcggcgaccacgtccgagaggagcccgaggcaagcaaaagcaacaggatctggcggcttcacgtcatcacgtgaccagagtaaaactttcacgcttggaaagcggtgagcacgttcagaccccgtcgtctcgtcggtcgcatgtgaccggggcgagagacgagagaattcgcaagcaaaaccatcggggacgtctctctatcaacagcggtggatttcgccgttttcctgggcatgcgtgatcggtctcaactccgtgttttccttttttttttcccccgtacgccgtcacatcgccggcgatcggatccgcgccaaataacaagcaaccgatgtgcgcactggcgaaggattcgtccagctttccccccgcggcgcgctgtgtttgtcgtgctatcgctttggatgccgatggaaataacgtgcgtggaatttagccgtccttgttgagttattgtgtgttggcgcgctgcaagcctggcgatctggcgctttcggaaaacggcattaaccaggaagctggaacgacagtgcaggacagtggaggagctccggtgtcagctcggctccgtacgaactcgtcgatgcttcccagggtcttcgattcgatgcatcacgttgtcgaaccgttcggccagaaaatgccatacttcggatgtgtttagtttcaaagttttttttaaaacttctaacttttcatcacatcaaacctttcatacacacgtaactttttataacttttcagtcacatcgtctccaatttcaaccaaactctaaactttgggccaatctaaacacaacctgattaattcaatactggattactagtacttcggtttagagaatgagctcttctctgcattgaatcatcctggagacctgaatatttcgatagctttgcggataaatgcgcgctgtgtgcagtacgtgtgcccaaggtacgcgcacgcgtgtctgcgtgacgggttcacgttcggcgggagcacggattgggggggggggggggggggtatgtgttgtacaggtaagaggtgtttggtttgttctggctgtgaacagtggcacgtcggaacacgccaaagaagaggcccgtggcgacgacgctttcggcaggggataaaaaccccacgaaaaattatggcaagggcaacaagatttgtcggcatgagcagcaagatccgctcgagctccgggtaaacaggtgccggacaaattttggttttcttggttgctttttgagaacatgagcacacgaaagctggttgactcgaataagaaaattacacgagagagtttcttctcgaggaaaagttggaggatctttaattgtatttttagataatgtattcacaaaaggatctttaatttgtattcatatagctggtgctccattgctcctactttctagggagataggtgtgttcttttgagttcaatgtaatggaacatacaaacaataatttaactattattacaagattaaaaagaatggatttgaaatagcatcttataatgataactatatatgtaaaaagtttttaaaaaaatcctcctatttaggaactcgacctatgtgcatttttgttcaattttgagaaaagaaaaatacaccgataatatgtaaaacggacactcatattgttaaagtctcgcaatcgaaacctcttccaatgtaaagcattcaatgtcttctattacgtatcatctattttgcacaaccctttaaagtccaaataagttagaccttggttccaatcgtttaagatgtggtaagcccaaagaaaacaaacaataaaatgttttttttaaaaaaaaaactccatatctgtgttatttctttcattatagcccctcgtagagcccaggtgctatttccttttccttttctttttctttgaaaaaaaaacaacgaatgtgctaattcttaaccctgaggaaacctaaaatcggagacataccagcgaataaacaaacaaaacaaacaaacgaaaccgacccacctgacctcctgtcctcgtctccaccacttcccctcccctctcccgcccccacgaaatctgggaggagccacgacgccattgccaacccttcttctcttttccccccaccgcaaggaaagcacttccggcgagcgtcgacgacgacgaatcgtcgcgagaaattcggaaggtacccctaccctcgtccccccccccttccccccgtcgcctcgccgcgccgccacgcgcccatccacgcggcgtgcgcgagggcgcggacgatctccacgttcctgttttttttttctttgtttttcgaggggggtttggttgcggccgttttgatctgagatcttgttgcagtcgataggggaggtcggggaggaggggggagatgtcggggttcgtcggcgtcgtggtctccgacccgtcgctgcagggccagttcacgcaggtggagctccgatcgctcaaggccaaggtgacctaaaattatccccggtttcttcagttcgttgtataggaagccgcagttcgcctctcattcggggtggaattgatgggttttttttttttgtcggggtggcagtttctatctctgaagagagactccggaggacatgccacgacgaagaacctcccgggactgatgaagaagctgagggggctcaatgaggtgatctccgaggaggagatcgccgcccacttgtcccagtcttaccctgacgccgaccaggagattgagttcgagtcattcctacgggtacaactcggttattttctgaattcctgttggtactgacgagaggaatagagcgtcattgcattgttgatttgattggaatgggattatgtgtggtgtgtttgtaggaatacctgaatctgcagtcaagggtgagcgccaaagaaggcggaggtggtggtggcggcggtggcaagaccgcgtcatctttcctcaagtccagtaccactacattgctgcacaatctcaaccaggcggagaagtcgtcttatgtggcgcacatcaacacctaccttcgtgaagacccgtttctgaagaagtatttaccaatcgagcctaccgacaaccagctgttcgatcttgtcagggacggtgttctgctatggtgagagatggtctttacagctaaccaaagggtgcatatccatttactcgttgaacagaaactgcccttgagtcatagctgatatttgctcatttatggatcatttgctcagtaaattgatcaatttagctgtacctgggaccattgatgagagagcaataaataagaaaagagttcttaacccatgggagaggaatgaaaatcacaccctgtgcctcaactctgccaaggccattggatgtacagttgtaaacattggtacacaagatttggtggagggaagggtatgcaacgcattccctactttaaattctttttagtaattcatggtgcattgtagtctatgcaaattatttttaccactaattttcattcaggactacattgaaatactttaatgccctgtaggtgctaggtagtttgggtacaaagtatgctgtcaattagtcattgtcaccactaatttgctgcataccattttatccttcgctgtataacctgctaattggttccacctcatatttccttgctcatttgctgtatgtgttattctttgatatgcttgtccatgtgtcagatgttttcagccgccttccctttgtgacttcttctatttaattcaagaaattcactaaaagttaagttgtggttaacatgcttcttttttgcagcctcatttaattcttggattgatatctcaaatcataaaggtaaatgttgcactgagttttgcattttgatgtttgacatactatggttaaactcctgcctcatcatataaagatctttttgcacttatcatcagattcaacttttggctgatctgaatctcaagaagacaccccagctggtggaattgtttgatgacagcaaggtaaataaacattctgtccttctattaatttaattcacatgttcttagaacaaaattcattttactgattattatgcaggatatagatgaagtgttgagcttgtcaccagaaaagatgctacttcggtggatgaaccatcatctgaaaaaagctggctacaagaaaaccgtcagcaatttctctacagatgtgaaggtgcatatgacatagaacaaagtgacattataattaattgattatgtgcagtttgataaaagaagctgcccttgtgctaatccactgtttggcttgcaacatctttgcatttgggtttcattgactaagcaacagatggctttgaaaattatttatgactcactcttatgctgtaaatcccctttctaaatgcgtatgtgggaaaagtgaatcaaactacattcatttaattaatattacttcaatctccaatgttcacatacgttagttctgtacaggatggtgaagcatatgcttaccttctaaaagctcttgctccagagcattcccctgaaaccacattagagacaaaggatcctagtgagagggctaaattggtacttgaacaagcagagaagttggattgcaaaagatacttgactcctaaggatatcactgagggttctgccaatttgaatcttgcatttgtggcacaaatattccagcatcggtaagtagtatgtttcttgtttctccaaaggcattaacttttcttttttttatcataaagctagctaaggtattttccccatgttgcagtatattcactttaaaagtttcttagctagctgccaatgaattggtcatctgcttatcacttgaatgctattgttccatgatgcacaggaatggtctaactagtgacaccagacaagttactctcaatcagactgcatcacgtgatgatgttctattatcgagagaagaaaggtcctttcggatgtggatcaacagtcttggggttgactcttacgtgaacaatgtttttgaagatgttcgccatgggtatgagattatttgaatgagcatttgtgtctgtctccaaatgaattgggcacttacatcctttctcatgcagatgggtacttcttgaagtactggacaaagtttctccaggatctgtcaattggaagctggcctcgaaacctccaattaaactaccattcaggaaattggagaattgcaatcaagtggtaaaaatcggaaaggagttaaagttttccttagtaaatttagctgggaatgatattgttcagggtaacaagaaattgattgttggtgagtgtgactgaatcaagtctttttagtggtttctgattgatgttatctgtttagcacacaattgaagccatatctgttgtttttcagcacttctgtggcaattgatgagatttaatatgcttcaattgttgaatagactgagatcccactcccaaggatcccaaggaaaagaaattactgatgctgatatactaaaatgggcaaacagcaaagtgaaagcatcaggaagaacatctcaaatggaaagcttcaaggtgttattaatttctgtttaattagttttaatttgttgttagataactccagttaataaattttcttatcttctctcaggacaagagcttatcaaatggacggtttttccttgaacttcttagtgcagtacaaccgagggttgtcaactggaaagttgttacaaagggggaagatggtctgttcatatgcacgtttgaattactatttgatgataatttctgactgtttatatatgtatccttttggaaaaccgtagcattggctgattcactatttcctttcaattctgcagatgaggaaaagaagctaaatgctacatataccattagtgttgcaaggaaaatcggatgttccgtgtttctgctgccagaggacatcattgaggtaagggatgctaataagcatgaaattgagcgtgcaacttttaccatcacagatggaattaaatgctttaccttcagcaatttatctagcatctgggctaaatgctttactgtctacattatttgttgtctgtgatcctcttctcttttatcttgaaaaatgatggttattatctgttgactaatcgtactcttatgtttctgtttcaggtaaatcagaagatgatcctaacgcttacggctagcatcatgtattggagtctacagaagcaaccacagtcacaatctgaaacgtcagaacaatcagagccatctagtatggcttcggatgcagcttctgatattgcttcggaggacgctgcttcaataacagctgcatctgagggagaagaggtgaattcgctatctgatagtatgtccaatttgaccacatatgatgctatttcaaatgccccgccagcagaaaatggaaatggtgtggcaggatgatgatgattacacgggctgttcttctgtcctgatagcggttttattatggtggaactagtaccgtcatggtgtccaacgtttgctgccagaagtgatttttttcctgcttctgttccaagcctacttttgaggtagcatgatagatacagatacagatagatagagttgccgtttgttcatttaattttgctctatacatacgacagggaaaaaactatacataggtcactagttgggcatttcttgtactcttagtatactttgatttcaatgtcttcactttgtttcccggacctgtcaaaatgtactggcatcgtttgtaatctgctgctgctctggaccattcatgagctgtatataacataatattgtggagagatctggtttcccaagaatccctgttcattgtttacagtactcttttcaccaatctatctctatgctctactagcagatttgggccgtgtttagatccaaagtttttcttcaaactaccaactttttcatcacatcaaaactttcctacatacataaacttccaacttttccgtcacattgttccaatttgaacaaaactttcaattttagcgtgaactaaacacagttcgggtatgacacctgttttaatcacatcaaaactttcctacacacataaacttccaacttttccgtcacattgttccaatttgaaccaaactttcaattttagcgtgaactaaacacagttcgggtatgacacctgttttaatcagtctttgggtgtgtttagttgacgccaaaattggaagtttagttgaaattggaagatgtgatggaaaagttaaaagtttatgtgggtagaaaagttttgatgtgatggaaaagttttgaagtttgaagaaaaaatttggaactaaacaatgcctttgttccgttggagaatgctgaaagtgatcaaccatgaatatttcagttctcttttcacattggcgatgctgcctcatcatgcaacgaagagcaccagttccacgtttgaggttcatagaaccgacgaaaaccacttggttttcacgacatttcgtggttttgagctggcttgagttgacaaaccactctgttgactgttggagtatcaatttgaatcttaaaattttgacaatttatctgaattccatctcttttcaaacaattttcgccaaaactgacaaaaccaacactgagcgattttcggtcagcaaacggttttgtgaaccttatgcatctgagaactgagggagtggtagaatttgctgcgttttcgattattttttttaaagaaaaaattgctgctgctgttgctgctctctctatctcttatctctctctcaaataagagcagtgtgcagcgtacgtcttgcaaaaaatgagagcagtgtgcagtgtacgtcttgcgaaaagatgcctttagcccctacataaataaatacgcatacagggccagccatcagatgctttggagggctccatgccatttctgctctttcttaagacgacgcagctgccttgctgccggtgcctggacaccatcgcccacagctccctccctctatctctctctctctctctctctctctaacaccaccacacatctcctcctttcttcttctccatgcaaaccgacgcttcatcgaggagctcctcgccttcgccatggccgccttcctactccgatccatctcgcagaacggagatgatgagcagcagctgctggtggtggtggtgacacctgacacggcaatgcggcggcggtcgagggattaaaccggcctaaaacgtatccattccgcggcatacaagggcaggccaggcatctgatttcctacctacattactactactagtctactactgctactactacatattatcatttcctagctagctattagttcacttctcgatcgttttggtgttagcttaagctttcttgatttcttttgctgccttagctttttcttttttttcctttgcggcgacattgttgcagagggcgctgtgaaatgtgaataacctctcgcgttttggatgatgagtcgtcgctcgcgttggtcgattgatctctgtatcgtttttcctgtggtgagaattgaggttggtgatctgcaaaagctagaacagcgtgatgatttctatgtttcttttttcgtgcgccaattactcgatcttcttgcttagttatagctgtaaatattccatgacaggagtgtggtcagtggtgcacagtagctaactgaaatcctaatgcccgtctcgttcgcatgctgctgaaacagtacgcagcatcgcgtacaggctctcggcaagtaccacgagtcaaggcgggtacagtttgccctttggcatttgggtagcatagcaggacaacatatttacacaagagcttttcgagctcctttcgaaagaacaaaaagttttaaactgtgtggtgacatagtaagaacaaagaacacagcatctctgactctgcatgataccaaaatctacgatcaaattcttgtagcatgggttgggaatatcttgtctctgctgcggcatatatatctgctactctaaccatgcattccggatgctgtcctttgcccaaggggcaagaaatgcctctttcattcctaactagttgtgccatatccctgcatcttcaacactttcatattccttcactggaattgcatattcatcctacatgcatgccacaatgctaccacaccaggaggaatcacactgccacttgcgatcatcatctgttcatttaattcttcccctgttcgtccttgaagccccgcgcgctagctagctcatcacacagcagcatgcatttagccatttactgccatcgcctggagaactctcaaaggcgttaatggcctgcctagctgcgtgtcagcgtctgtgtgtgcgtgccactgtggcactgtcactgtgcgagagcgatcactcccccagcctcgctgctgcctgcaagagcatttttctcaccggtactacgcgtcctacacatacatgcacaatatattctactagtacttgggctgtttgatagtttgatactacggtggatgggagtcctaccaaaaccaaaaaaacttagcgcacgatccgcacatgcagtcgtcgctgtctgattttcccataaattgtggtcggattattagtacttgcgcagacagggcagggaccagcctcatttgcctcgctctctctgcaatctgcattgccattgccattgccttgcactgcggctgcgctgctgcccagtcctcctcgagtccagccagcccaccaccgcatgcagacgctgcagcagcattaggagatgaccacacgggcttactagacgagcacaacctacgagctgcagtctgccggctgacgcgtggggcccggcccatttgtctggcgtgccacgccacagtgctgcctcccttctgactagtactgtggtgactactgatggatgatgtggtgagtaggagagtaatatactgtacctaaggagtgctcctccgtaaaaagttctagttataaatttggatatgtggctgtgtgttcaaatttatagctacagttcatcttttttagggtagagtagtactccgtaagagtagaggtggcaatgggtcggatcagacaatagacggaacattaacacgtccggcctaagacttgatatcccttgtctaggggtgaaaacggtttgagtatttttttatatccagacacatttgttttaaagtggttcggaaaattttctatatataagacgcatttgtgtttagattagttctatatatgttgagtatatataagtacatgttgagattagagaccaaatgaaataggaatgcgtcaaaatcagcaatagacacatatatcaggtctgacatgggttactcactggcataatataaaacccatatgcgctcaaaagaattttggatatcggatcaaacatgtccacgggtaacaaaataaacctacgctcatcgggtgggatacccgtgggtatcggactagaattgccatccctacccagtaaattgctaccactagttccttaattttggatgcgcggacacatgctggcctaaaacaatgcaactatgcaaggctagagcttagagtttagcaccctgcccatgttctttagcttttcaaaagctccccattggtgctcgagtttgtgctctccttgttttttccccttcaaaacggattcacgaacgctcatggttcagagttcagactagcagtaggcacaggactgtacattggatgatgccttttgagtagttgaggctgagagcggagatggtacccaatggcggccgatacgagtgatcgcggtaggggttgtcgtcgtcgtcgtcgtcgctggcgctccgctcgctcgcacgcccgcctgtcgttttgctcgcgtgcgtgcgtgcgtgcttgcctcgatcgatcggtcggtcggtcggtctgtcgcctcggcacgcaggcgcagccgcgcgcagcgaccgcgtcgtgcgttcccttgtttgggatctcgccaaccacccgcatcacaacgcggctcgcatcacgcccgagacacgcacacacgggcgagagacgccgcgcttgccgggttggttgcctggtttgactccgtttttttttcttttttttggtttgatcggcagcacagcgcctcccggcctcaaaattactgtagtaccacgagatcgatctcgacccgtctcgtcgtcgtcggctagaagtaaaaattctggatccatccatgccaaacaagtaaaaatctggatccatgcgaaacaagtagtcgaggttgaatcggatggatgtgctcagacagaggcattgccagattggctgcttgcctgctgcaaggtactcaacagtggcaggatggcagggagctacgctacgcatggtccaggtggtctggtcgcgaataggaatggtggaatgcgattatggctgtgtttagttcactgtgaagttggaagtttggttgaaaattgaaacgatgtgattgaaagtttgtgtgtttatgataggttgatgtgatgaaaaaagttggaagtttggatacaaactttggatctaaacacagcctagatcaaacgcggaccgccggtttgtttttctggttttgaaataggtgagccggagttctcatgagtcatgatccagccgaaccagggccgtgctgtcaaatttgtagaccctgtacaaggctctaagtgaggcctaaatcaagtaccaaatatagctaaaataatatatatactgcaaaacaaatgtgatatatcaagaatagtatattttttaactcttgttttgtataattagaaactgtcaaactgaaaacggagaatgtttgttgatgttgctggcttgctgcctagtgccttgcttgttggttgcttgctaagttgctattcgctagttgaatgaaaatgtgaaattggatgagccggctggcggcctggtgctcggaggagacgagacgtcgagactcgagacaaattgaataagtcacagatacgaaaacgaaagagaatacaaaacgttgtggggcctcggggctcgaagttgagaatacgaagcgccacgcacgcgaagtcgccacgcggagatacgcgcggactcgaacggggttctggcgctctagcctcatacaaatacatgtgccttctttggttgggctgattttttgaggccctagaaatttgcaggccctgtacggtcgcacgggccgcacacccctgtgcacggccctgagccaaacgttgagtgctccactccgttactacgatacgatgctcgtaaaaatatctagatgagatttcagtagcgcgaagtaaacataacttaactaaatatatttctttgtgatgaaaatataagtactcgcatttacgactaattattattttagtggtaagtgacataccatcgatagtgagatgttcgtgctgatttcgttaatctcaagctatgcctgagatgcgggtgtacgtatgtgtcatcatgaggtgagtgtgaacgtgttataacttataagcgtctgtatttgtagttttttttataagaaaaaaagatttcaatagtaaccagagtccacttagatgaactttctgctgctgggctgcgccgacgtgttcatgacttcaggggctatcccaccgaggaacggtgagcacgcgaaaagagagaaggaattatgttgctactaccgcgataacaccacacttatcacgataacggattggttatcaacaaatttcacagaaatttcatcaaaatctatcgaattatggcttgacttttacgctattcgtcgtcgtcgataaccggccaaccgggcaataactgggccggctaccattgacaacgcaaaccaaaggaaacaagccggccttatgcgatggtaagcccacacgagagaacagccaggtagggattatagcccaacgctcccatcacgacccactacctttggcccatgggagattgcgaatcgcggacgaaaaaagtgcaccgaagttccctcaatttgtcatcgagttacaaaatcgtcctccaaccgtaaaatcggatacaacgcatccctcaacttataaaaccagtgcaaactagaaccctcgatagttttgactctagttttgtctgacgtgacagctgacttagtatagtacccatgtgggccccatacgtcagggtgaccacgtcatcatcatctctttcctctcttctctcccttccttctctctctctctttcccagttttctcctcatacgggccaggcggtggggtgatgtgggaaagggcagctggcgacgggcggtgcggtggcgcgacatcggcaacactagagaaggggcaacgcggcggcgacggcgggtcgggagcaggcaggcgccgcggcggtgggcatggaggtggagtggttgcgggacggggtggaagaagaggaggtcatcgaggctctagcacacgcgcaggcggcgcacaccggggatgggagtgcgatggcgttgcggtagagcgagcatgaggcgtgcgcacggagccaaacatctacgcagtccatgtggaacgagtgcgcgcagagcggtagcgtgcggagctcgtcgccgtcggcaaactcgagcaggcacacggtgcagacgcgtgcggcggtgtcgtctcctccgcctcccccgccgccgtagccgtgcaccgccatcaccgacgacagcaacttgatggcggcgccgttgaatcgatcttggtgcaggcctttcatggcttcgggttcgaccgtcgaggtcctccagctcctccattgcttgtctgttgcctctaagaagctcaccaacggctaccacggtgcctgtttccacctctgtgcccatcactgcggcgcccgcctgcgcccaacccgtcgccggccgccctttcctgcctcgcccctccagctgacccacacgaggggtgcggggaggccggcgagctcgtgccgctctgagcccgtgtgtcgccacctggggaagctaagatccccgggagccaccgtcgccagccgcaccaccctttagccgcgcgcgccaccgtgggcgccaaccctagtgccatgcctgtgtgaaagcagagagcgagagggaggaaggaaggagaaacatagaaagtgaagaggggaaagagagtaggtgctgacatggacacaccgacatgtggggtccacgtgggttccatgctggctcagctaccatatcggataaaaccgggatcaaacccatagaaggatctaaagttgacggttttgtaagttaagggatgtcgtatatctagttttgtggttaggacacaattttataactcgttgacaagttgagggacctttggtgcgtactttttccaatcgcggacgggaagtgatgcgtgcgcagccagtgtacggccggccaaggtcgcgtgggtgatggaacccaaggtcagcggtttcacgcgcatgaacgctaccatccggcgaagcgcacacgcacggcgggttccgcggccgcggccgcgcgcgctagctcgccgtggcttcgcgcggctgctacgcgggcgatttctacccccattcacaacagtcaacaaccgcatggcgcgcggtgagtccgaaactgacttgcactgttgcacaagcggcgcacgcgtccaggttggtcaacaacgcgtgcaaggcattgttgatttcaggctttcagctacagcatgttgacacacattggcctcgtggggatcaggcccgaacattctggcctctgttagagcagatacaatagcaggctataagctagctacaaatatattttaagaagataaatgaggagagagaagtgtagcgggctacagatttatagccagctgtaatacggactccaatacataatgtgtgtatgacaggtgggaccagttattgatagtgtagtatgtaactattgtatgaatatgtattagattggctatagatgaattggagccagtagttggctatactattgaacttgctcttatcatcaaggacgtgtgttttttttccacgaatgtgcagaaattttgcacgtcaatatattagaaaagagtagcatacaacggtaatacgcggagacggttgttggggataggaggtcatgtacagtatgacactaataagcaagtactccctccgttcccttttgatcatcgtattgcaaaaaaaataataattccattttgattgtcgcattacggtggggaggagatgaaaatcccgggaaggacgttaatgacacttcctaacgaacactacatgcatctgattggttaggctatacggcatgtagaactgattaggagccgctgcatgcatcgatttaatacgctcacaactgattggccagccacacggcatgtaaaattgatggcgttacattcacggatacgaaacgctaatgtatgtttttgatgctgattaagtgctccacatgattgtcttggtattgatgcacaaatcatatatgaagatcgattaggaatggagcgagtatgacactaataagcagactgcgacaagcgaaactaagcaaagttacgtgcctgcctcctgacaagataggcgtaagcatagtgagagaatttttcaccacgcatacaactcaagcgcaatttcaattcaacaagcaagcatatttcatttgccaggccgactggccgagtatttgggctgtacgggcggcggccgagcaagtcagcctaggacgatatgccaggaggctaggacgaaaggaaatggctgaaagatgcggggagccaaggacatgaaaggactgaaagatgggggcgtgtgatgtgactcgtgtgctcacgtttttctttcacaagctcaaagaaagctgaaccaaatagaccaaaagaccaaaagacgaacaaatctgtgactctcgcacagtatagagacaaggaactaagtaatatcttactaggtgacctatctgcttacgtctatttttctcccacatctatacccatgcaattgagatcctctgtggtactgcatgtgcagtactgcttactgacatctgggcccgaggggctgtggggcccacatgtcagtgagcagtactgcatgtactgcacatgcagtactgcagaggacctgcatccataccaatgctactaaattggagtagcactttgcgggagcttgcaccagtgttcacaatctttattaattccaaacgatttttgtgaattttgaacatctcgagcatgcttagatatcgaatgggggttttgttttgactttttaaaattcatttggaaactgtgaaaatcaacgtatcgatacagctcgaaattcgctaaccaatcaagattataaatcatagcttccatattaaccagaaagatcattgttgattggattgatcgagcttatattctacgaagtatgtcatattaaataaaacatgtaattggaaatgtcatatactctttcttttttggttttttccaacatttgaaaattataaaatttaaaattagtaatgaagcaatacatgttatgtaatcagcaacccgataaacaaatattcctatgtctctggttagattcttgcaaacaaagtagacaacaacatagaaatagaaaataaaacaaaagactatgacaaaaaagagtcgcatagatagaactgaagccttcgcatcactcttgtgcgagtggctcgggagcgaaaccctagccgcccgtgccgccacctcccacccaaccttgacacctcgcctccgtcggagttcgccgtcggaaagtcgagcgaccagctgggaaggcggagcagccagctgagaaggcggctgcagagacaagaagacctgacgaggcccgtcctcggcgtgggaggatgaagtggtgcacggcggtagccggaccctggcggccagacacggaaagggcaagtcggatctgatgcccctcaaggcagatgcatggacgactgtggagggcggccgcggaagcgaaggtggtggtaatggtgccagatctggtgctcccatatccaatttcggcagcgatgcaatgtctcagcgcggtaacgctgcatcgacgaagggcaattgccaatgtttggaggaaggtggagacgacaacggggatggggagaagcaggcagcgactgctgggtgtggggctcccaaaggaagactggcttagtacgaggcgcatggccggcggtgggtggccaacgaggcgcatgcagagcatggcacagaggcttgtggtggagctcccgaggggaagttgtcgtggcacggaggagcacgaccggcagcgagaggccagcaaggcacgaggagagtgcgctgcggaggcggtgaggctgacgcggaggctggagcggtgtggcggcgagcctgtcggggtgggagcatgccaggcctagggtgatgcggcggcgaggctactgcggtatgaggacagacgcaacaacgatgcgatcaggcgactcgttggagagacatgggtagcttggtcgaggatgaagtggtccttgaaggctacggcgagctcctttccaagcgttagtacccttgcagtggcggcttgccgtcgcaagatggccacgttggacgggctagtacaggggagaggggatccattcttctctctcaccatcttcttctccaacccacccatgtggatggatctggagcgcaccggaggtcgagatcctactttgatagccggccggcgacaaggcgtcggcgtggtggctgtgcgttgaagaggattagctagtggtgattgtcaaaactaacaggcactcaataacctgggagagtagggaaaatatgggcgaagatctagccttcaggatggctatggcgacgcctgcgggcgccgcgttctccttgggtccttgttgcgttttttttcctctcccagtggtttttttaggtgaaaaccatatcctgattctctaggatgggcagcggcggcattcttggcgccgtttccttcttggaggcgtcgttagaagatccattccttaggggtgttgtgtgcgtgttttatttttttagcagcaagatcgatcagacgtagacgcgtggtttggttgtatttttctttttcttgactatagtcttctaggactatagacttgtattttatttctactatatcaatacaaacgttgcactatcttgtgcgggttgttttaacaaaaaaaaaagactatgaccaaccctaactccatgaaaaatcatggtagacaaacccttaaatgacttaatagatctaattgctaaagactttattcaacacaaaccttaagagcttattaaaattagacgagagacggatcccctccctcatcgcatctggtgaggatgatggaggcaaagaaggagggtgattggagtgatggagagaacccatgtagatcttaatgtgagacgttgaagtatggactcaggaagcactttctgcaacaactcatcttaatttctatgtaattccctatagtttataaacaagttcggaataaataagtagagtttaatctcatttaccttcgcaattattgtaaaagtacgttgtaatatccaacaactacgaaaattaggtaaattacacacctcaccttccattcaatccgtacatttatacccccccgctccccaattcatgtggttctttttttttttgaaactccaattcatgtggttctggtttggctatccaacatcgcacttccccgtggcgaatgacgtggtaacttaataaaatactcatctctttcttcctctctagctccatactctacacattcaaattatgaataaatgtgacagtgtagagtatatatttttcaggttttttacacattgagggggaaaagagataaatgtgagcgttaatatagtattagtgctgttcataagttggatttatcttttttcttttgttcatagtgagcgttagtgcgttacacattgatgagcagtgatgactgtcgactgatgaagcacatgttatgcatgagctagcgtgaaacaagacgacgcgcgtcgacgagaccacccggccccgaccaaggctgagagaaacaagtcacagaaattgtacgtacttgtaatggacttattaaccgccaacacaacctgctggccctataaattgacaagtactcgtgctcttcagctgcaaagagccacagcgaacaaaagccatatattgtaacgaattactacctagctagttaacctggtctctccagagcaagctacccgttagtcttgatcagctagctctagctagtagttagccatgaaggtagagcaggacctccacatgagccggggcgacggcgagaccagctacgccgccaactcaaggcttcaagtatgcagtccctttctactgtgaaatccgtgtgatcaaacaaatcacatgcatgcaattacttcctccgtttcacagtgtaagactttatagcattgctcacattcatatagattttaatgaatctagatatatatgtatgtctagatttattaacatttatatgaatgtaaataatactagaaagtcttacattatgaaataaaggaagtaaccaacacaactaatgttgcacacgtctggtataccgaatgaagctaatgcatgcttgattttgcttgacatgttgttcaggagaaggccatcctgaagacgaggccgctgcttcacaaggccgtcgaggaagctcacgcgtcgctctccggcctctcccgcgcgcctgcaggcggcaagatggtggtggccgacctcggctgctcgtcggggcccaacactctcctcgtcgtctccgaggtgctcagcgcggtggccaaccgctcatcatgcgaccacaagtcctcgctggtggcggacgtccagttcttcctcaacgacctccccggcaacgacttcaacctcgtgttccagtccctcgagctgttcaagaagctcgccgagatggagtttgggaaggctctgcctccctactacattgccggcttgccgggctctttctacaccaggctcttccccgaccgctccgtccacctcttccactcctcctactgcctcatgtggcgctccaaggtaattaaacacagtgcaaaaattaggaaaagaaaatgatgatcgagctagctatacgtaactcatttcccgtaacgagttgagagaaactcctgcgttcgattcttactgacatgagaacatacatccaggtgcctgacaagctagcgagcggtgaggtgctgaacgcgggcaacatgtacatctgggagaccacgccgccgtcggtggtcaagctgtaccagaggcagttccaggaggacttctcgcagttcctggcgctacgccacgacgagctcgtctccggcggccagatggtgctgacgttcctgggcaggaagaacagggacgtgctccgcggcgaagtgagctacatgtatgggcttcttgcccaagctctccagtccctagtccaagaggtatatatacaaacacattgaaccagtcactctatgtagtactgagacgaacacatttgattgatcttgttgctaatatgcagggacgtgtggaggaggagaagctggacagcttcaacctgccgttctactcgccatcggtggacgaagtgaaggcagtgatcaggcagagcgggctgttcgacataagccacatccagctcttcgaatccaactgggatccacaggacgacagtgacgacgacgacgtggcgacgctggacagcgttcggagcggcgtcaacgtcgccaggtgcatcagggccgtgctcgagcccctcatcgctcgtcatttcgggaggtgcatagtggacgacctgttcgacatgtacgcgcggaacgtagcacagcacctcgagcaggtgaagaccaagtaccctgtcattgtgctctccttgaaggcaagacgctgaacctatccgttcgtcggctcgtggtacacgatgttgcattttataagtagcgtgccagtgtgtgttgttggggaccgattgatcacccagctgctctgcaaattgggtctgccatagcctttgtctagctttgagtcgtttgtcgttgtaagttaaatgcgacgtgtgcgtgagtcagtaaaagtaaaatgaactagcccacgcgaatacgcgggcatgtatcttaagttgtgtttatatgggtagaaaattaatctaattatttctatcttgattgaaaagtatgatttctctaaaattttacttatcaatcacttggattttttttccaagctatatgttaactttatactttgtactctctccgtcttatattataaatcgtttgtttttttttctagtcaaacttctttaagtttgaccgctgacatgtagggagaggagaatgaagagttcgctgctaacatgtaggctccactcgtcatgttagcaaaaaccggccactataccatcgaaggactaaagttgacacggtattatgagttgagggatgagttatacttggtatttcggtttagagacaaattataacctggatgataaattgagggatctaaagtgaacttattcgaaagtaaaaaccagtgaagaaatttgagggctgccagatccttagatggaagcctgcgccggtgagccctggagccgtgggcttgaatgttgatggtgcattactttcccaaaaattgatgctgtgttttaacgttatttattagatatattaatggtttattagtgagagttcgaaaacaaatgcatggagaaaacgttagaaaccatgtgttagtcagtcactcaccgttgttgcagcaaacaaaaactaccagtggtggctcgagtcaacaacaacgcggcgaggacaaaacatttatcggctcctgaaacttcggccatggtggtgcgcagatcagcaggtatccagatgcaatgatctaaatgatgcatcgcgcgtgcgcccgcgcgcggttgattccgtcgcattcggtgggggctcgtctagatcacgtttctggagagctccagggtctctttcggtggattcgactgttggtgaattgtgtcggcgactcggcgtcacggccgcactgctttggctaataagcgcactcctccaactcaggccgaattcagttctaaacttttttttttaactttcaactttaacttttctatcacgttaaaacttttctatacatataaatttttaacttttccatcacattgttttaattccaatcaaacttttaattttaacgttaactaaacacgcccaacacgccctgatctacgaaaccatccatccgttccaaatcgcacaaaaaaagcaaagtcatgtggtgaagccgctgtacctgtacgcgaagcaatgaaagcacacgcccccgtcttttcccaaagacgcgagctcgccgctgcgcagcatccagattccagatagtactattggcaaagcacaggtttggggcgccatgggctcctaccactacacctccacctcccacttcttcttcgccggcggcggcgagggggagtactccagctacaagggtactggtagcaccgacacccacaggcccaccaccgtgcggatcccggttaccaccccgggcccggagcggccgccggacgacgcggcggcggccaggatccaggccgcgttccgggggcacctggtgaggaggcacgccgcggccgtccgcggcgccgacgacgaggcgacgcggctggagcggctgctccggaggcaggagacagtggacgccgtccgcggcgacgagcgcgagcgggcgcggttctcggaggcgctcatggccgtgctgctccgcctcgacgccgtcccggggtactacccggccgtgcgggaggcgcgccgcgccgtgacccgccgcgtggtggggctgcaggaggtgttcgacgccgtgctcgccgcgcccgacgccgccgacacgtgcggggtccccgccagcctggatcaggtcctcgaggggatctggggagagtcgccggctgcgccgccaccgccgccgccgccgccgccgccagcggcggtggaggtggaggaggaggtggtgaggagtccgtgctggaggagatttttcgggggagtgtagcaagtggtgtaaactgtcaaaagtgtatgcaaccgaatttgttgggaaatatgccggaaatatgttggtgtgtacctataaagtattaaagtggtgtagtataatgctatgaacaatcacgtaacatagtaaataacggattaacaacatgcttgttttgaatcttacatatctgaacatttgcaatctacttctatccagaagaactggctaattgggtaggtttatttgtccagtctgtagttctgacacatttgcaatctgaactcttctcttcagctctggaagaaaaagggaatcagctagggccgagtttagtttcaaactttttattcaaactttcaaattttccatcacatcaaaactttcccacacacaaatttccaacttcgtgtcacatcgttataattttatccaaatttccaactttgatgtgaactaaacacacccttatcctccctgctgagtgctggttctgtatttctgacaaaaattgttggatattattccactctcatcgtacatttcgttgatgttctggcgaagttcaaagttctcaaaaaaattgtccagtcagtagtgtaccgtatttgaatggtagtcaggaggtagggacgagtccattttcgaggatgggccttaatctcggcccacacctcacaactaccgtccgcgaggagcgagcccaagtaaagtccctgaactccttttccagttctctctctaagtctaacccaagtacccaactcatctttatgtgcctcaatgaaatgtacgattagagtggattgatgtccaacagattttgtcagaactacaaaccagcgagaaataaaccgagctgattccctttgttctatagctagctggaagagacaactacccaattggccagttcaacgggtaatttctccgttcttcagttaatccatatatcctggaattgtctcacgttcatcaacaaccacccagtacattcctttttccctgtcactatacccatccaggcaaccagctaccaccaaagtaatcttgggtatgttttctctcgttccctgaagttgttttgatccgcatcatttccagtgttccaccagtccacttgtgttgtgccatctctgtttctacggactttctccgttttacaatgtaagtcattctagcattttccatattcatattgatgtaaataaatttagatagatatatatgtctagattcattaacatcaatataaatatgagaaatggtagaatgatttacattgtgcaacggatggagtagttgttaatgtacttcccaaaaggaaaattcatcatcattgagaaagtatattcggaaaaaaattcatcatcattgagaaagcatattcagtgcaattgctttcctttctttttctatcgaatcaagaactgttgatccagcgtaggtaaatggagtaccaattatacatcatcttgcactgagcatcagtgctgtacagtactatataacaagagagaaaattgaagagtagtactagtgtttgtggtccgatgtgttcttacgtttcagatcgtgtggtcctttgccttttgagacgatgacactagcgtaaagatgtaccggaagctagagggagaatcaagcctgtggcgcagcaatggagccgcgaggcatcggtgacgcaacggagcgcgacttatcgccttttcgaagaaagcacaggaggaatgcgacgttcaactgcatatgtatggatggatagattgcagcttctttgataagcaaacgcttggaagcttgtcctggattcacatacaaatgcaggggcctgctgccgatgctgccgggtgaggacgtgaggtagagcagctgcacactgtaggcagattcagattcagattcagatgcgatagcagaagcgcagaactgaacatacgcacaagagtggtccagtccatgcagcttcagaccgtgcatcagtgcatcatgattgtgttcgttgttggggagattatctgccctgctaattggcgattagtggaggcattcgagacaagttggcctataaaattttcatccatgtcagtcagtaactcatcagggtaatcatcatggaatgaaatcagtagagtagatagatgaagggaatcaaacatctctggttaggctaggcatcagtttaatgcctagggtcaaacaaaccaaacagcacggcagagcaagctaaataaaagaaaatttttaaggagtgcttagagaagtaaccggagttgacacggtacagttggccctccaagtcgtagtagtttcgtatcatcaactgataagcacaggattagtcagtcagcgaagcaaccttgcatctatgcatggcttaattatgctagctcctctgccaactgatccaggactccctctactaggacatcaatcatcacatagatgtactgtacgtagttaaatataattagcaggagattgatgatgcatgtgtaacgtgttgattggataagggaggtcatcagccaatataatgcatgaaatcgatgatcaacatggcccggccggtcagaatgatgagctcatgcgcatacaagtaaatacgttatcctgctaaatttgttgctggtatccggctatccgcatctttgagaaattgtctacgttcgagattgataaacaattaagattaagggcctgtttagatctcttggcaaaattttacgctctgccacatcgaatgttgggacgcatgaatagagtattaaatataaacgaaaaaataataattacacagattgtgcataaattgcgagacggatcttttaagcctaaccgcgccatgatttgacaatgtagcgctacagtaaccatttcctaatgacggattaattaggcttaataaattcatctcgtggttttacaggcgaattctgtaatttattttgttattagactacgtttaatacttcaaatgtgtatatccgatgtgacacgctaaaactttacacccctccatctaaacacaacctaagtaacgatacggaaatagactatgattaattgagttttaattattatgaatttgaatataaatttatttgctattttagaacaacttctatatagaggtccttattgattgactatatttttctaacaaactaaaactgtttattaaggaataaaattaatttatggttaaaatttatatatgtgttcttagtgacttaaaagtcaatataaaaaaagaactacgttaaatgtatttaaaatcaacttcaatttttttttaaaaaaattaaatttaaatttaaattttggctctgagcaactaatgggacttagaaagtttgtagtttgaaaaacatgctaacaaaaaatcaatgtagaattacaacttaattaggcgtgtgttttgttacttgtatatgggtagtaacatacacgtccctcgtgtaattgataaagtattacatacgcagtattttacattgtactgtatatataatcgcattttaggggagacaatggaacacacaatgacacaacgtgacaaccagagggagcaaggaaagcaggatagctttacaaggaaaggaaaaggaaagcggccgcggacgccagccgccattccaatccaccctatagaagtgcctccaactgcagtgccaggtgggccccgagaaccgggcccacatgtcatcgaggttctgaggataaaaggcaggtagcaaaacgatggagccaatcatcatagctgtcgctttctttctaccactactgcaaaatcctaaaaaatcgtcccatatcggggaaagcctagcgggtgcagccttcgcccgtttgtccttttatagatatcgggtgaaaaactgaaaacccaactcatttagcactccagttatttttatccttatccactagattgatcccatcaactgtcatcgttttctcggccgtagaccatgttgagctctctgcccgtcctttttctacggtgctaattaagtttagactacaaaacatgattctaacaatttaatattatttaggagtaatatgaagtactctatcaatttcataatgtaagtcattctatcatttcccacattcacattgattgttaataaatctagacatataggatcccacattcatattaatatgaacgtagaaaatattagaatgacttacattgtgaaacggaggaagtagttttgaagtactaaagaaatttatttgcttttcttaacaacttaggagtataaaacaatttgtccattcgtactttttctaaaacactataattcatattgagttttagaatatgattttaaaattaattttaggggagggttttacttagcaactttcatcttattcatgataagaaaaaaaaaactcaagattccaggcttctattggatatgttgcatcacattggttgcaaacgaaaaattgtttgcgttactaatgaagcctacttaaacacggaaaataaaacacgtgattatagtaagattaattaagtaacgcaaacaattaatatgatttttaaattgaaaaatagattaatataatttttaaagcaactttcagatataaaacttttaaaaaagtacaccgtttaataggttaaacaactgaaagggttgagaaagagaagaaaagaacacagcctaaatatagcaggttaaggctaccggaagatttcaatctaaaaaaacattatcaatgcagtttagttttctcatgttcatcaatttaaatacctaacaatacataatttgcagtattatattgacaaatgggcccacttgtgcaacatatatgcttttttcccccgaaaccgcggttttcgcttggttaaggtctaacgggtcaatcaacaaccgtgtcttcttaacgggttggacaccctatccaattaacactcctccccacccatttctatccccattcaccaccgatccccaccaccaccaccaccccgacggctcgaccctacgaccgtggccgcagtctgcagcgagctccggcgccctccctcccctaggtatccccgtcgatcggcggccgcctcccccggctacgatcgccgccgctccgacgaccaccggcgtggtccggcgaccaactccggtgagctccctgctcctcctcagtctcatctaatctcatattcatatggtttccccaacctccgtggccgtcggggccaccatcggcgcggggccgccgacccgagtccaccaccggaagccgccgccgccgccgccgcgctctttctcgtagccgctcccctcaccgtaacttttcttcccgttgcacccggtcgccggccgtcttccgacccgtggccggcggcaccagcaccgcctcgccgccacggcgatcctctaaaccccgatctcccccgaccccaccccgaaaccctaatcctaacctcgccggaggcagggcaggagacatgtgtggtttccatttttggcacttcccaattctttgctagtcttcgctagacgctagtgatgcttcactgcatagcgagaattctgaatggaataatgaagctttaggttagaaatctagttgggacttcaaaagattgtgcgaataccaaacagggaaaaggtcaaatccttgtcctcgttctctgcctccaaacgcggttatgggcttggcgcttactagggattgccggggaagtgggctgttgaaacgatgctacgcgttagagaactgtgggcaagactggctgttggggagaaggggtggaggtgaggcgatgcaacgatatggcaacagatttaaatgaatgggggaattgaatcttttattggtggtactgatagcgtgtgattagatttgaatagttgcaagaactatgggcaagacttggctgttggggaaaaggggtggaggtgaggcgatgcaacgatgtggcaacggatttaaatgaattggggaattgaatcttttattggcggtactgatagcgtgtgattagatttgaatagttgcaatacaaactatggttgccatggtatggtcaatgtggctgggagtggaacagttttgatatcaacttgggggaagaaaagaaaaaaagaaggcatatatttctcttggggtgatgagaattgctataacaactgacaagtgaaagcaacaaacattaccccccatggaaggtatccgtgacacgattgatcaatctacaagtctgcaaatgtaagcatgttaacaaacctggtaatatcccaagacgacgacgaagatgacgactaaccaagtggagaagttaaagtgcttggatgaattagttgaggaaaaataggcaatcaatcaatcaactgcatattgaaccttaataaatggtcacaaaagccccagaagaggaaaacaaccgcaggggtagagaaggaatgagcagtcaaccagcaatagtggaagcgctaagtattgatttctattcactttctcctctagactattggtggttgagagtgatatgtgagggagggaagccaacaaggtgaacaaagaggaggaaggggaaagaaactagaggagaggcaattgaaatctttctttctcttttgcttgccctcttttgaatcaaagttcacagctttcacttgtcaactgcagcgcttctcgcttcatgatgaaatctattcccttcttcgtttctttttttgcccctcaagttaagataaaattttgcttcctttttgctctcaggcacattaaccatatgtgccatgtgttgtttgtacttcaactcttcaaatgtaaaaatgctctatcagttctgccaatcttgtttaattcgtgcattgcaaacgtaacaaagtaaaaagattcagttttccccatttgtttatttcaatctgttataggtagggataatcctaatgctaaaattagctcatgataccctctgatatgcaggcatcccttcggcaaatgtggtgatggaccgaccacaagatcctttcaactcacgaggtatcatgacatgtactccaccttccaggtaaacggtgttttgctctggtaaactggatcttaatcgctgtccctatatgcatttgtcttgttccagggattgcagttccccctgcagtcaagatgaggaacatggctggaaacaacagtccatggatagaccctctgccaccaccgatgaatgcgcgcaatgggctggcaaatgccagcctcttctccacctctttgccagtccttcctcatgaaaaaagtatgccactttcactcataagacatgtcatgctctagtctgtgcatgtcatgctggaaatagcttgctgtccaaacaactgatgtgctcattggtgcagtagggtgtttattttttattttttggctatagtactgtagttacataggtatgactgagggattttaattgtgatgtgtgcaaagcaaagttggaagagggaatgacactagggaccgagatacgagggaaggctgcaaatggaattagttgtgtccaaatgccaaatatgtggtttcacaccaccatttattgtaaaaaattcccatctttaacatgccaaaaatcacatgaatccaaccttttcttctgtaatgtaatgtagcactggctcatatccatatattattatgaatatagcttgaaaagggggcaccacctttgctttggaggcctagaaattactacattaatatgagaaaaaaatctaagccgttagatcattgtgggaccaaattataaccatgtagattgatagcaatagtcgtataaaaagtaccattgtgtatatatagaatccgaagaaaagagttgtatattgaatccagacctacttttaatatctgctgtatataaagtataattacatacatgaaaataggagctaagagctctatagcaaatccaatttaactaccccgtgcaaaattgtgtagggaatttccctagtttgtattgatattcctgataatgtgtgtttccctctttcagtcaactttcttgattctgcacgtggcaccccattgatggatgatgcttctgcaaaactaaaagagctcgatgatgaccctgaagggaaggactacaagtttgactttgatctccgccaaatcgatgatttattgcctaatgaagatgatcttttcgcgggtatcacaaatgagattgagcctgctgggcagacaaattctatggaagaactggaggaatttgatgtatttggcagtggagggggcatggagctggacacagaccctgtggagagcatcacagctggtttggggaatacaagtatagctgatgggcttagaggcaatggggtcaaccattttggtccgtcaaatagtgccagcactgtggccggggagcatccatacggggagcacccttctagaacattgtttgtgaggaacatcaatagcaatgttgacgacacagaattgcgctcactttttgaggtaataactgcaatgtttgttagctttatataattattgccatctgagattgatttgttagtgttacttatcagtaggtataccttgcaactgaacaactttatgtgctgtctaatcaactcatagtcagtgttatgtctgcacttctcttataatgtatctcagttgatctttacaatatccattattgtatttcagcaatatggggatatccgaacactttatactgcaacgaaacatagaggttttgtgatgatatcttattttgatatccgagctgcacgtggtgcgatgcgtggattgcagaacaagcctctgaggaggagaaagttggacattcatttctccatcccgaaggtttattatgttatggttcactttcaaatgcttagtccctttaccataaagtacttagcagtttgccatgttgattttgtaggagaatccatcagataaagatttaaaccagggaactctggttatttttaacttggatccctcagtttccaatgaagaagttcgccagatttttggaacatatggggaagtaaaggaggttaggatgttacttccaatttttccctttgaaatatgtttttgcttgaaaattgcatgttcttacgttcttcgtatactttgtttctgttttttggaattcaatctgatggtgttagtttctatccacagataagagagacaccaaataaaaagcatcataagtttattgagttctatgatgtaagagcagcagaagctgctcttcggtcactgaataaaagcgagatagctggaaaacgcataaagttggaaccaagtcgtcctggtggaacgcgcagaaagtatgattatgcgttttctttccctatccatttatctgtcatagtcttgagttgttgtttgcactttgcagtagaaccctactgaatttatacaccaattttgggatgatctattgatgctgcagttatgttgatttatctgctgtatgcaaatattttaatgtatcaaattgcactatttaactgaccaaggcatgcctgttaaggcttttcgttacatcctcgtgatgctattagcaatctgattgttttaatccagttttatcatttcatcagcagtagaatacctcagattcatcctcagttgattggctttcatttatttcaacgaaatacttgcagttttgaaagtaattagcttgttgtacaccctgtctccctgatttatttaatgggcagtgcactatttcctgaaggtatattttcaagcttgtggatatgctcatttagtcctaggattaatttaagaaaaatgcttaatgacattgaaagttcacacgtaataccattgagagtttgcaccgtttctttttaataccatttccgtctacttaactaatgtttccattaactcagactaaaaataacccttgtgaaccacactcacctcaaccatggagaaagctccaactgcaccactgattgttgtcattggacaccgtttcccatcatctgattcccacagtgggccaccaattcagagattcactcagacacatgcatagtagtagtgatcacgatttcatgagagagggagagggagaggcagggcacatggtggtggccattggcgatgaaatgattgtagatagtggtgcggcaggcaagtgtgggttcagtggttaggaggtcacccagggtgctgtatatgccgcgcaaaacaaatcacgctcatcgccaagggagtggatggacaaacagacaggttgagcggacaggtcttgtctctttcgtggctagagctgctctgctttccgtctcttgcatttgatctagcatcgtcattttcaattgcctctcctgctaggaaaataaacaaaaacggaaaaaaacagaaaaaaggcaaatggaggacaaaaatggtataataaatgatcaaatggtacattgcaaattttcagcgctattaaagtttattatgagctttagtggtacaaatttgaacttgagaattgtttatgccatggaaccaatctttcctactgtttgagttttggaaggcatgttttttcagttatcgtgcaaaccaattatcattgacagaatgtttcactttgttaacactgatctgatttattctcattttcttctggtttagcttgatgcagcagcttggtcatgatatagaccaggatgaacccagaagctacaggattcctcatgttggttcacctattgccagctctcctccaggtactcggactggatctactttagggacatttaatatgcttctgtctatttgtttacaacttatgaatgttaaatcatctcctgtcaggggcatgggctcaatacagtagtccaactgataacaatttgttgcaagcattcaatgcgtcaccaactggaaatggcatgagtcctattgggatgcctccttccttgatatcgaatgctgtgaagattgctccaatcgggaaggatagcaactggtctaaatatgacaaagtattctcaaacaacaaccagccccacggtgctgcatttcagcattcccattcataccaagatcacaaaagtgaacatatgagttcaagtcctgggactttaacagggcctgagtttctatggggtagtccaaagccttattctgaacatgctcaatcccctatttggcgtccaccagcaattggtcatgcaataccatctaatacccgttctcaggggcagggattattgtatggtggccgtcaggcttcactttttgggtctcaagatcagcttcatcatcatcatgttggctctgccccttcaggtgctccatttgagagccactttggatttttacctgaatcaccagagacgtcttatatgaatcaagtcaggtttgggaacattgggaatattggtagtggccgaaacggaactggcctcatgctgaacatggctgctcgtgcttctgtaaaccctgtttctgctttgagtggaaacatgtcagacaataactctagtagctttagaccaatactatcacctagattgggacaatcattttacgggaatcccacatatcaagggcctggttcttttggacttgacaattccatcgaacgtggtcgtaaccgccgagttgacagcagtgtgtttcaagctgatagcaagaagcaataccagcttgatttggagaagatccgtaaaggcgatgatactcgaactacattgatgattaaaaatattccgaacaagtatgtatgtggcttgatattgcattttcttttctgatcttacattactacatagttgctcagctcctaaattgttaggtacacttctaagatgctgctggctgcaattgatgagtttcataaaggaacctatgactttttctacctgccaattgatttcaaggtactagatttgtattgtattgtactgctgtttgcagtgacttgttttgatgcccagcagaatttaattatattttccccacgcagaacaaatgcaatgttggctacgcgttcattaacatgatatcacctgtgcacattgtatcgttctaccaggtatgtccatttcttttattgactcttgcatgctacacagttctttaattgatatccatcaacatgaagttcgtggtttatgtttatgtaagtttctcctaaatatgtctagctgagttgcacaacaacctaagattactggtagacttattcggaacaatttgtaatgatctgtttctgaatatgtgctgtaatttgcaggcgttcaatggcaagaaatgggaaaaattcaacagtgagaaagtagcctccttggcctacgctaggatccagggaaggactgcactcatttcacatttccagaattcaagtttaatgaacgaggataagagatgccgccccattctttttcattctaatgggccagatgctggaaatcaggtaagcttgtttaaaatgtcgacacacatttgtccgcttgttcttatgttcaaacagtatatcgaacaaggtaatggtgatttaactagcaaactgcatcttaggttataagcgtgtttctaacaccatgcatgaataccaggaaccatttcccatcaacggcatatgtatccatatgccactggaagatggagcaattgcaacaggggatccctttggaaatgaagaggacaacaatcagaacgagaggacagcaggagaagagttatgaccattgctttggagtcgccgataaatcttaactgcctagagaagagttttccttcccaaagtgtatagaagtgagaaagattggttagctgcgaaagtttgtggtgtggcatggcgcatctactagttttttttgtggcaaacgatgtcgccccctgaagaacaaaaaagtgacttggagttgagagttgggagtctgctaggtctctctctccatgtcttcctttcaagtttcaaccccctctgtacagatagatgtcgggagttgataattggtcgcatttgatttggtgtaaaaagagagtggtaccggtcaaactgtacagttttaaacattttaatcctctatgttttaggagacttgttaactctatgttttatcctgtgtgaactgagactccaaacagggttccaccttcctgtctacaaaccaaaaatcttgttatgtgcctgctttctgatccttcttccctgtcttgtgaattgtgatactgtgcaagcagagaagcacaacccaggcaagaaaggaaagtgatggctcctttgaaactggaacgtagatattttaaagaattcatgccgaaaacgatttaaatctaagtacaattctttcacaaatcatggcgaaatgagtacacaaggcgatttgaagcgaaaaggaaattcagcccagcctccaaaagcccactagcccatcctgcactcctatctcccaatggcccacacagaagcccatccaaccatccaacggtatccataccgcctcctaacccgcagcccgcatccacgccgtccatccggtctccactactccacccccggacccaccaacccaactccgccacccaccaaccgaaaatccccccacccccgaaaaaaaaagaaaagaaaagaaaaggagaaaaaaaaaaactcccgtgctcggctgcgttctactactagcctacccctatctctctctctctctctctctctctctcttctcgctagtcttcccccaaaaactccacccttccgcggcctcgcccatctcaccgccaccatctatcggctccctcctttctcgtctccaaactcaactctaattgagcgcgaaaacgtggacgcgtttgaattgggcgtctccctcggcttccaggaccttctagaaccttctcgaggctcccccggcctcgcgcggtcgcggctctgcctcccgctctctctcctagggttttccccctcctggtcgcgcggcgggggcggcggccatgggggacgccgcggcggcgtcgcccccggcttccctggggaagcggcggcgcaggggaggagcgggcggaggggacggcgaggggctgcggcgggtggcggagatcgtgatggtgctggccgccgctggggaggtgaggggtgggagggagccgacggccgcggagcgggcgctcgccgcggaggcgagggagaggctggctgcggtcgtcacggagggggcggtgcggcccaaggatctgttccccggggaggccgtgcgcgccctcgtcgaggatctcggcctcaacagggccagggatcccgccgccatggggttccgcccgcccaaggcttccatcgccgacaggctgatgctcactaagcgcaaggtttggtaactctcattcttttttcgcttcattcagctttatagctttacgatgaactagcaccattgacgaaaactggaacgatttggtctatactctatgctgcgttggggagaatgctcgtgatattattgaattgttagcttagctatatcatgtgaatgctactctcttgatggtttatattgattgattttctagaaaacagctcatgtactggtaagcttctgttactcctgtttaactttggtctgatatggtttgtttgccttcctagtgttgctggcttgttgcccactaagataatttactttgcttccccgtgttttgagtatatattcgtgttaagtgatggaggaaatcctttatatgccaatcaaaattcatgagtttccttatgggaaaatcggttccataacaccggaagatcctgagttcacaaatataccatataaattcatcggtacacttcaatactatccaaagttttccatggttgggcatataccactctgttgcctcttttccgtttaatgatttttcttctgtcaataatccgacgaaaaagatggttttgtccttacaatggatatgtctatcctgtgctggattgacactacatagtgaagcagcccactggcctggcatccaccgtacttgcgttcgcctctgcagcatgctggaggggtggtagcaggggcagaccgactgcaacactgtgtgcccgtgccaggggagagcatgcgcgtgcttctacagccacattccagtattcctggtggccggtgttgtcccttctactgctagccatcggggctgctgtccagcacaccaatatgcagaagaatcctcctaggggtggccgccgcgggtatttcttgacccactttagttcaactaaaatgaactaagtttcacttttagagagtctaaagtgaaatttagttcatttagtaggactagaatgggccaaagaatacccatgggtcaacccacacccatccctaaatccttatgcgaagcttagtgagaagtgaaggggagagagagcgagggtagttttgccacagattacggtaaagtgcctccaactcaagaaatggtaaaaaaactaaacaacacaaactttggatggtattaaagtgcaccactaattttcagcgatatactatttctgaagtcaggttcttctgatgccgcgaaaccaattctttccttatatgccactgtaaatttgctatgaaattacccatgttccccctcctttccttcttcaacctcatgggagttgattgcatggtggggtcatccatcagcgagatgttgcgaaggatagcgtcaatttcctgtggctgctacagctgtccagcgagatgtagtcatgtcagagcttgctgatattacaagtgactgcgtggttggatcttaatcaatctactccctccgttttacaatgtaagactttctagcattgcccacattcatatag

SEQ ID NO: 9874 - DNA, 131738 bp, Oryza sativa
tggtccctagccgaagccggcgtgctaattccggaagttggtatgtcagtcccggtcagatccattccaggcttcagcgcaagtatggcaaggaagtcgctggccattaaatgaaggttgaaatgggcgtccaccgaaaaaggggcgagcagagcaggaaacgtgcgctctgcttgtcagaggtcacttctggctgtagactagccctcattgtaaaagcatgtttcctttcttaggtggcgagaggcccttgtggtgacccctgaccagagaaaaaggaggcccaggcctagaaagaaaggagagagaaaaaaaagaggagaagagaggggacgaacggggctagagcctgaactctctctcgctctccggctctctgtattccttcactcacagatccaccagaacacaggagtagggtgttacgcttctcagcggcccgaacctgtctacgtcgcccgtgtctcgcgcatttcttctctcgctgacgttcctcagatcgagggcgaagaacctcacttagcgcccccggccgaaccggcaaaggggggcctgcgcggtctcccggtgaggagccccacgctccgtcatctggcgcgccaggtagggggcgcgcgtgtctttctaagccctcgtcctctttcgtgtgcgccaagcttcgcccgctcagcccaatggccgaacgggcagtggcgcacagcctctctccgaacgctagcggtgacgatggggagcagaacccgcgccgtcgggctcgcaccccaccgtccccctctcgccgaaatcttgggcggggggaggcgctcagggaggttggaggatccgcgacttcgccgcccgcgggcgacgggggaggacggcgaggcggggcgcgtcgctgcctcgtctactgcgatggcggcacgccccagggcgcgctccaggctgcgggcgcgctcctgcgtcacccgcccgtcgtccccgatccaaagactccagcccgacgttggctggatgacgtggccgaattggtcatgacggcgcagcagcgactaggcgccggcgggcggtcctccgccaccgaggcctctggcgctgccgccgccggctccaagtcgtcgaggcggagggcgcggcgagcggtggccgttgcccgccgttcgtccgccattccctcgtcaacgcctccaacccaagaagatgtgagtggggggccggatgcccgcctcgatatcgagcgccggcgcgacgctcgtcacgccgcccacgcaacggagggcgcttcctcgtccggagcgccacttcggtccgggcacgggggccagccccccgtgtccccggttggcggtgccggctgtcgaacctttgtggcgagccttcggaacgtccgttggcccccaaggttccggcccaccatcaccgaaaaatacgacggaagcgtcaaccccgccgagtttctccagatctacatgaccgggatcgaggccgccgggggtgacgacagggtcatggcgaatttcttccccatggccctgaagggtcggcgcgggattggctaatgaacttgccacccgcgtcggtccactcttgggaggatttgtgccagcagttcaccacgaacttccagggcatatatccgcgcccaggcgaagaagcggacttgcatgcggtacagcgaagggacgatgagtctcttcgctcgtacattcagcggttctgtcaagtccgcaacaccataccgtgcatccccgcacacgcggtgatctacgcgttcagggggggcatgcggcacaaccgcatgctcgagaagatcgcctccaaggagccccagaccaccgcgcagctttttgagctcgcggaccgtgtggctcgcaaggaggaggcctggacctggaactcctccgtttctggtgtggcagctccggccgcccccgggtccgccgctcggtcagggcggcgggacaggaggaggaagaaggggtcggcccgttccgacgacgagggtcacgtcctcgccgtcgagggcgattcgcgggccccccgaaaggggaggcctgcgagcgacaaaaagaaggaggccggcgctcccagcagggagcgcccgaccggcaagtggtgtaccgtgcacaacacctccctccacgacctcgcggactgccgcgcggtcaaaagtttggctgagcggacgaggaagtgggaggaggagaagaggcaggagcgccgtgagggcaagaccccggcggctcccgccggcaaccggcgaggtgaggccaagcagaaggccaccgccgaggacatcgacgatggcgacgatgacctagggttccaggagcctgaggccaccgtcgccaccgtcgatgggggagcgtgcgctcacgcttctcgccggagcctcaaggccatgaagcgagagcttctggccacggcccctacccatgaggcgacgcggcgggcgcggtggtcggaggttgccctcaccttcgaccagaccgaccacccgccgtgcgttgcccggggaggacagatcgcgatggtggtttcccccaccgtttgcaatgtgaagttggggcgtgtcctcatagacgggggtgcagccctcaacatcctttcccccgcagcctttgacgccatcaaggccccggggatggtgctccggccgtcccagccgatcatcggtgtgacgccggggcacacctggccgctgggtcatatcgacctcccggtcaccttcggtggttccgccaacttccgcacggagcgggtggacttcgatgtggcggacctcagtctgccctacaacgcggtcctgggcaagcccgcgttggtgaagttcacggcagcggtccactacgcctacctccagatgaagatgtcgggccccggtggccccctcaccgtccatggcgacctcaaagtcgcgcttgcttgtatggagcagcgcgcggaccaccttgccgcggcgtccaagcccgcgggtggcgacgagaggctcagcacctccgtctcggccgccccaaggcagcggatggtcacgtgcgatgaggtcccggtcaaggaggttgccctgggcgacggcccgtccaagaccacacgaatcagtggtcttctggacgacaaataggaagacgcgctcgtctccttcctgcgggcaaacgccgacgtcttcgcctggagaccggcggacatgcccggggtccccagggaggtgattgagcaccgtctcgccgtgcggccgggcgcaaggccggtccgacagaaagtgcggcggcaggccccggaacgtcaagccttcatccgcgaggaggtggcgcgacttctggaggccggattcatccgtgaggtcatccatccggagtggctggcgaacccggtcgtcgttcccaaggcgaacggcaagcttcggatgtgcatcgactacaccgaccttaacaaggcatgtcctaaggacccttaccccctgccacgcatagatcagattgtcgactccaccgcggggtgcgaccttttgtgttttctagatgcatactctggttatcatcagattcgcatggctagggaggatgaggaaaaaactgcattcattatccccataggaacttattgttatacgacaatgcctttcgggttaaagaatgcaggtcctacttttcaacgtactactcaaatttctttgggtagccagataggacgcaatgttgaggcctatgttgatgacttggttgtgaagacgcgcaaccaagagaccttactctcggatctagcggaaactttcgaaagtctccgctccgcccgcataaagctgaaccccgataagtgcgtgttcggcgtgcctgcgggcaagcttctcgggttcttggtctctacccgaggcatcgaggccaaccccgagaagatacgagctatagagcggatgcgcccccccagcaagcttagggatgtgcagtgcgtcaccggctgcatggccgccctaagtcggttaatatcgaggctgggagagaaggcgctacccctatttaagcttctcaaacgctccaggccgtttacctggacagaggaggctgagcgggccttcactcagttgaaagcgtacctcagttctcccccagtcctagtcgccccggagccagatgagccgttgctactctacctggcggcaaccccgcaggtggtcagcgcggcgttggtcgtggagcgcgacgaggacaaccctcgccccgcacatcccagtcctgtgtcgactcgacccgggagagagcagggaggagaggcccccgagccgaacggcggcccgaggcccccgacggccggagctggccctccgcctgcttgtccgacggtgccaggcgcccccgacccccaggatggccccggggccactgcgggaaggccgcgcctgtcgccctctgaccccgaggttgtcggcacagaagccgagtgcgccccgcgtggcctctcggacgaagagcgccctggagatgcggcccctggcgaagaggatcggccccgccgaaaggtgcagcggcccgtctacttcgttagcgaggccctccgggacgccaagacccgataccctcaggcccagaagatgctttacgctattctgatggcttcgaggaagttgcgccattacttccaggcgcatcgggtcacagtggttacgtcttaccccctcggccaaatcttgcataaccgagagggtactggacgggtggtgagatgggcaatcgaactctctgaattcgatttgcgctttgaaccacgccacgcgatcaagagccaggccctcgccgactttgtggcggagtggaccccagctcccgagcccgtctccgcccccgaggccagctcgggcccctcgcagctgcctcacaccgcctactgggtgatgcagttcgacggctccctgtctcttcagggcgccggtgcgggggtcacgttgacctcgccgagcggagacgtcctcagatacctggtccgcctcgactttcgggcgaccaacaatatggcggagtacgagggacttcttgcgggactcagagtggcagctggactggggatccgccgcctcctggtgttaggcgactcctcaacatcctcaagaagcacggcgactcgtggatcgaggagctgccagcggtgctctgggcgaaccgaaccatgccaagccgagcaaccggggaaacgcctttcttcctcatctacggcgcggaggcggtcctcccatctgagctcaccctgaggtcccctcgggtcaccatgtattgcgaggctgatcaagatcagcttcgccgagacaacctcgactatttagaagaacgaaggcggcgcgcggccctccgagccgcgcgctaccagcagagcctgcggcgctaccatcagcgccacgtccgggcccgatcactctgcgtcgacgacctcgtcctaccccgcgtccaaacgcgtgctggactgagcaagctctcaccaatgtgggagggtccgtatcgagtgatcggcgtcccccgggcgggctccgttcggctggccacgggcgacggcacagagctgcctaacccgtggaacatcgaacaccttcgtcgcttctacccctagtgggggtcgggcgtcatgtctcgggctcgggccaaccccgcaccccccctgggcgtgcaggattggccgggggctaccacatgcatatacttaccttttttctcttccgaatttcaataaaagcattttcgacttcttgaggactgtgtctgtgccatcgtttccttttgaagaatcttggcttgaattagcacgctcgtgctcgaccctgccctcggcggcccgggccggctaaaatcgccaaacggggcccagaaccgagccgtgccccggggcgtggtgacctccgggggggaatcggcaaaggcccacaatcgggtcatccataaccctcggtcaccgcgctcccggcctggccagtctcgacacgaggatctccccaggcactggctccgacccgcgccgtttgaggctgggacctgggcacgagcccttgttcaagccaagacaaagaaggaccgcggcaagaaccatcctcgtctcatacacacaacaaacagaactgacgtggaaatttcctctttacttgattacagattaaatcagtctatacaagaagggggcccgaaagcctcggaagaagaagcaaaagttattaagattggcgggggcctgggggctcactccgacgcgcccgggacgtcggcctcgtcgtcgctgtcgtccgcaccgtcgtcaccgccctcctcgtcggagtcgagcgcgaacgcgagccgaggggccgtaccctcgaagctgtggacgatatggtcggtggcgtcccggaccttcgcgcgcgcgccgtcctcggttcctggagggaactcttccagcgctgcccacggggaaaagtcagggtccctggcctggtggcttgccagtacgagctccaccgccccccgggcgaggtccctcgaggatgacatgatcgtctcctcgagctccttggggagccgctcgagggccccggtcatctctgagaggcgctgggcgaggcccccctggttggcggcgtacttcgcgtgccgcccgccccagaggcccgcctgccgcccggcgcggtctagacgggagacggcgtcccgaagcatgccgggccctacttcgctcgccaaacggagggcctcgacctccccggcggacgagtccagcgcgccctgcagctcggcgatggtgtgttcggcggctgcgaggcgggcggctaggtcgccgtggcccgcggccgccccgccgctgtgcgctctcacgtccagctccttcgcccgcgcctcgagctcagcggcccgctgatccagtgctgccctctcggcgcggacgccttccagattgcgacgcgcctgctcctcccgcactgcctcgcggaggaacaggctgtccgccagccgctgcgccacggcctcggcctcctcgagagctcgcccccactcggtgagcgcgtcctcgcggaagcggagtgcggactcctcttcggcgcaggcggcctcgtgcgccgccagtgttgcctcccgggtggcgacggcggcctcgcggtccgccaggtctctctccttcgcgtccagggcgcgggcgcgctcctccagcgccgtggcgcgagcctcaagggcctcttcgcgctgccgggacgccgcctcgttctccgccacccgccgttcccgggcagcggcggcgtcaaggactccccgggcggcgtcgagcttctcctctagctccgccgcccggctcccgtattggaggcggaggtcgtcccgcgcctcgtcgagcacggcggtggcgatgagggcagtctcccgctcctcctccacctccctggcgatctccgccagctccctacgacgggcctcgagctgtgaggtgtgccggcggtgcgccttgcggcccgcctccaccatggcctccaccgagcgccgcccctcctcgacgcgcgcccacgccgcgtcgagctccgcccgctccgcctgcagggcctccatctgggcacttaacccgtccagcaccgtgctgttcgcggcgaccaaggcctgcaggaagggctccgcactcagtggggcagcggaagacagaggggagagtcgcctcggtgtgggcgccgcgcggctcggcccgccgatcgacgtgccggactcgggggcgccccccgaagctggctcgtcccaagcgtcgcccgaggggtcaggcctgagcggcgcgcccacggcttcgtcgtgggtggcctcggaagtcgtcgtcgcctcgggtggagtcgggtcaggggtttggcaggccgcctggcgtgcgcgcgccgcctctgcctcccggacggactccccggcccggcggagtctggcctcctcccgagcggcctactcagcctggcgaacccggacggcctcctgggcagcctcctcggcttcccggaagcggtccacggcttctcgccggtcagcttcccgcctccggacctccgcggtcgccgtctcctcggcctcagaccggccggacttggaatggcggggggggggggggggcgacgggatctcgctgaggcagaagaaaaaccagaagacaaaaagaaacgggtgagtgaaaactcgccttgggagatgggaggatgaatacggccgcggtgggcatggggacgaacctgcggggaggtcggctaaatgaccacctcgggggcgagatgaggttcccccggcatggcacgatcccccccatcttgcggagccgtttcttctttcgctccccctcgggctgcggcgtcggcgcggcaccctccgagcgcctgctgctggcacgcaccgccccgcccccttggggaggagatgggggaggggtaccctcctgcttcctcttcccccgggcgtcggcagggtggctgccccccgggcccccgtcgcggggcccagaagcacgaccccctcccggggtagattgttcccccctgcggctcccacctgcgccatcgtggcctcggggggcccgctcccccgacgccccgacctcctgcatgatggtcaggatgttggcgcgctctggatcgcagcagagggggaggaccccttgggggatgagggatgcctccacggagctgagattcagcacccgttggaccaccatcctgaaatcctcagggtcccagtcccatttgcgcccctggtgggtcctcatgatgtcctcgggcccggtgtactcccaggcgccccgggcgcgccgctggagcggcgcgatccggcgacgaaggtagtcgccgaacaccatggcccccgtgagcccctgggatcgcagacccgccaggcggtcaagaacggcgtcgtagccgtctcccagatctaccgccgcccgccagctggaggcctgcgccggaggctggttcggaagtcggaggcgcgcttcgtcggcgaggggggtgtagaaccaatcgctcttccaatcgtcccactttttgcgaaggacgcagggaatgtagcggttcagcacctgcccccgcggctggaagtagcagccaccgactaccgtcggcggcgacaccggctgtacggtgaagaaccaccggaacagccggagagatgggcgcaccccgacaaacatctcgcacaggtgcgcgaagatggccaacgtcattatcgcgttgggggtgaggtgcgccatctggagatcataaaactccagaatatccatgaaaaaaatagagaatggcgggaccagccccgccattgcgaaagagaggaagaagacggaccgccccgggtagtgcggcgccgggcgtccctcgcccagcgtgaccacctcccggccggtggcagattccggcatgaatcggcgcggcagcccggcctgcctctcgctcacgatgcgggaaggcggcagcacgctaccctcgagcggtgcggagccccgtgccatgacgccggcggaggaggagcttgagagcgagcgagtatggcaagggtagggcgcaggaaacggagagtcagagcacaagtggcaaaggcaaggggaagagtggtgagaggaaggaaacaaatcccttccttggcgtctttgtacccttgccaacgctatgcccggctcctggcttcccgcgcccactacctcgccccctcgtttctcgcgcccacgcctccactaaccccacttgcccgtttgcggcgcacgcggcagatgtgcggccgtggcgtttgagatggggcagatcgtgcgcgcattaactgcgctcgccaaccgcgaaaaacgccatcatcgtgtccccaggcgaaacaaaccggctcgtcccgattcgcgcgctgctcgagtaatgtagcggtcttgaagaggccgctcattattgtcgatcggtttttcccttgccgatgcgcgcgatttgcgaccgttgggtttccgcccgcctgtggggaccggccccacctgtcaccgggcctaaggagtggcatcacgcccgagcgcctccctcgaggggggcggtcgccctggcgtaacgccgggggctactgtcggtgacatggggccgggggtatcgtgactagaggcttgggtagccgcggtcacccacgtggcctgaccccctcggggggggggtcgggcccgacggtgacgtggccacccctccctctgtctccccgaggggtcgggccgctcccgtttcggccccgagggctggggtgccccgaccccctgtggttttggcgccacgtgtgtgggttaggtgagcacagcgggctcacctaaccgcatttatagcaggttggacgagtgcgccacgccgcatttaatgcggcgcagcgcacgcttatccggtccgtgaccagtcgcggtgtgtgaccggtcacagaccggtcagatcgcgggttaggtggcaacaggcagcctgtcacacgcctcgccccgtcccgtcggaatgatgagagcttcgtggctctcgtccctagccggagccggcgtgctaactcctggagttggtatgtcagtcccggtcagatccattcctggcttcagcgcaagtatggcaaggaagtcgctggccattaaataaaggttgaaatgggcgtccaccgaaaaaggggcgagcagagcaggagacgtgcgctctgcttgtcagaggtcacttccggctgtagactagccctcattgtaaaagcatgtttcctttcttaggtggcgagaggcccttgtggtgacccctgaccagagaaaaaggaggcccaggcctagaaagaaaggagagagaaaaaaaagaggagaagagagggggcgaacggggctagagcctgaactctctctcgctctccggctctctgtattccttcactcacagatccaccagaacacaggagtagggtgttacgcttctcagcggcccgaacctgtctacgtcgcccgtgtctcgcgcatttcttctctcgctgacgttcctcagatcgagggcgaagaacctcacttagcgcccccggccgaaccggcaaaggggggcctgcgcggtctcccggtgaggagccccacgctccgtcacatgcacacaagtatttataacccacatgcaatatcttgatttgctattggctagaaaatattggggatgatgcatgcattgagtttgttgatagaataaatatagtatgagagagttattagtttgtcttggtcttgatatagctatgaaatatatagattaatttggaatggagggagcataaggttgccacatatcttgcgttagacaaatctaactaagttaggtggattagtcatacttaagacaagattctttcttcactatataggcttcgcatgccattgagataaaaagatgtggcaatagtggcttatgctaactaaagtgtatcttcaattttgttagccaaaccttaggtaagttggccaaaatattattccatccgtgtattttaatgtatgacgccgttgactttttaatcaacgtttgacaactcgtcttattcaaaatttttatgcaaatataaaaatacttatgtcatgcttaaagaacatttgatgataaatcaaatcacaataaaataaattataattacataaaatttttaaataagacgaaatgtcaaacgtttgtcaaaaaggtcaacggcgtcatacattaaaatacggaggaagacaagcttggtaataatttgaagtactgaactaattagcagtccagttatcttggtgtatgttcttgcgtgccttgttgattatgagaaggaaaatattgagacaatgtgttgtttcttttcctttggcgttgaaacatgtcgtctcggtgtactgttgattatgagaatgaaaatattgagacaacgttgtttgctctagataaacttaattgtctgttcatgttttaacgagctcagacgaatcgagctggagcctcgcagaggttgagcctgtgttaagctcgaaggtcagccttggctcgtgcgagctcggcttgttatagcagccggacccggttggtaaatgcatgggcatccggccgttgatctttttgaaagtgtttttgacccattctaccatttgaagctccatggcaagtatggtcaagctgagctgctaggcagatgtacaaaagcgtttttgactcatttctgttttaggcaatgattccattacgtctctcgctgcaacaagccagatgatgggccagtcgctcatttgggccggatgaaatgcatgtgacccgctagcagctaggcggaggcagtcactcattcgggaaggtagtagtagcgttgcttgtaagccatggaccatggtcacagcctcaggatgacaatgcatgtgaatatgtgatgtaaccgctagcagccttttccccgagacaatgccggaccgcggaccgcggaccgccgcacccctcaatcgacgcacttttgatgaggaatgcatgtgatggtagccatccatttttcctatggagggttcagatttgaagctgcattctcactcacccgataggcacagacatttgtgttcgtgcatagccgagttcttagcgggcatttgtagggaaaaaagaaaatctcaatttggtttcttttgaatggccaggtcactttgagattcctttatgctaaagcacctccgctttatccatcttccccctcttctctacgagccattgccgatatcgtacttcttggtgagccattctcctgctcttctgctcccgttttggccgaaactttttggcaacattgctcagactcacttcttttcttggggtttagtgtctgcttctttctctctcaggtagtagcgaagaagaataagaccctgtttagatgggattaaaaatatttttaagtctctatcacatcgaatgtttggacactaattataaatattacgtaggttattaataaaaacccattcataatcttggactaattcgtgagacgaatctattgagcctaattaatccatgattagcctatgtgatgctacatattaataaaactcatctataatcttggactaattcatgagacgaatccattgaacctaattaatccatgattagcctatgtgatgctacagtaaatattctctaattatggattaattaggcttaaaaaatttatctcgcgaattagctttcatttatgtaattagttttgtaagtagtctatatttaatactctaaattagtgtctaaatacagagactaaaattaagtctctggatccaaacaccacctaagtcattccttacgaagaagtgcttttcatagctctgaagatctgaataattttagcactgaaactttgtattagtttcaacaatgtgcagaaggaacatgacagtttgttaaacaaaagtacgaatttcaaaagtaaaaccccatactccagcaaaacagaagagaaatggaagccccaatctttttttttatatcgaagtagtagtaacaagttagcaacagatcaaataaaagtactgttagattgcgcaaatattacacagagaagagtttgtgaagtgcaactcaccagcaatattcaatagctctcagcatattgcacattaaggccttgtttatatcttaccctaaaattttacaccatattacattgaaagtttaaacacccacctcataaaactattaaatataggctaaaaaacaattaattgtacagattgcggctactttgcgagacgaatcttttaaacataattgctccatgatttgacaatgtggtgctactaataacatgtgctaatgcaagattaattaggcttaataaattcgtctcgcggtttactgacggatactgtaattagttttgttattagtgccggaacaccctttacgacatcatatataatacccgatgtgatatgccaaaactttaccccctagatttaaacactccctactgaaaacaacgtgtaacgcgctatggtgtgagaattctatttacaaattttgcatcacaaacgaatgaccaaacaaattctaggcctcacgaattcacgatcgaaacagccaatgaagcactgaaaaactacatatttcagatccaatagcaatttggaccatcaaatgacgtttctgatttgggggtttgttttgcagatttttcagaatttggagctgctgacgaacttggaggtggactagaaggacaagatcaaggagaaaccggagaagatcaaactcaagcagctgccttaccttgtctgcatcattgtcgaggcttgtgcttgcatcactttgcattaacgatgaaatttcatgttgaattagagggtaggtctaatcggcgatcgatcgcgattcggtcgccatgcacgaccacgtttccatgcagagcaaccgctttagccgatagcaatcatttcccattccgtatctctccaccgagccttgagtggttcatcctaatagtgtgatggtccagcccaaaaaatttatacatacactttatatgcaaaataattaatatataaaacttcatgtatagacatattatatgtgtacaaattttgtaagtacatgcgtacaaactttttatgtacaaattttgcacatataaatttgaaacaaattcaacggtgtgttaaattagtctcgagaaaaatatatatatagaattttattacatcagaaaaaactatacatagcaattttgtacgtatatattttacatatatgtgcatttaaactttgcacgtgtaaagtttatatctataaactttgtatatgtaaatttaaaacaaattttaaagtgatatatgtgggtttgaggcccatgtgcatgctggcagcccactctaaagaaaaagcccagctaaaaacaaggcccacacatcagtccagaaaggattaagtctattttgccttcctcatttcttgctcctgttaaaatcatattcctcaattgtacaaccagcgagtaatgtgactatgaaccgcgccaccgcaaggtctggcacctggaacgatggtgtatattgcatccaatcccataaaaaaacaacttatggggaagtgggacagagagtattttcgtagatctttcaaaaacacgtgtataaataaaaaagtttaaaaataatgtaacttttaaatttttattcgataagcaaccgcataagcaaaccgatgggggtgttatataatccaaacggaggatgtattaaatacatgttaacagaatgaaaaactaaacctgttttttttactagacttcccactaaaacacgtttcacaagaacagacaacactaagcgagtagggcacagggcaacgcaagcatcaaaaaataaacagttctgcgggtcaggcataaagaaaccaatagagtatccggaatctgaaatctgaggaagcataaagaaaccaatagggtatccggaatctgtaatctgaggaagcatatcaccacacagctgctacaatttgaaagcttgagaggttttaacagccctggattgcccctagaaaggaatcacaattttgtggcagccacctacaatccacaagctggcctccaaaagattttccatcagccaaatgaaaacgggtgaagaagcatcattgaggcatgacgagtcatagagcatgcgaatatccacgcacaaactgcaagtatataattaacaaaaaaaaactaaattgatgaaaacgaacaaaaagatcagaacaagatgtcctgacatattgtgatgcactagaaacttacgtaaccactgtctatctgttagcttgcgccttcatcttttatgtgcattgctaagggcttttctcttttttcgaagctctgatagactgacgctatcaacgtgtggttttactcttttttgaagctccggcactagtatcaactggtggcttccttttctctaataaaacattcttttggtccataaaaggctgcaaaatgtccttgattgcctacacaaaaaccaagagattgtaaataagagaaatttgtgatgttattgattgcaaaagatttcaaaatactgcaccttgctttttatctgtgtttgaatcttctgaacatgttgtataatagattgcaccttataggcccggacagcacctctattgtcgaagcagatcccaaccaaaagaccatcaacagtaaagacaggggacccaaatgaggcacaaggaagtagcacaatcatgagtaaaatccgcctttcttacaaacctaattaaacatttcataagagcctataaatataatttaatcatttaataggactaattaagcatttcataagaaccaacaaatctaatataatcatttaatactccctccgtttcacaatgtaagtcattctagcatttcccacattcatattgatgttaatgaaacagaggaagtaagacagatgaaattagataaaaataaggattttagctcaccggaccgatccaggagataaaaggtacttttggattctgatatcccaaggtgtaaacatcctcattaatcaacggtccagattcacagattttcacagcagctaatggattagtgcattttggtttgcttagcatgaaagagacaactatcagcaattgatacatcggtaaagttaatcgccacactctccatgttcaagccaggaaaaacagcagcatagagcccttcagaaccataacaaaatgtccccttgtctgttatgacgtagcatgatagcttcttcttcgcaataactattcctggagcaaataaagtcggttttcctgcactcatagctattatcctaacgaaacacatttgaaccttggcttggagattatcaaaagtatcctggtaatgaaacatcatattaaaaaaaagccattaggatcatttgatatctacctcctataaagaaacaagcatacaaccatatacaagaatttgaaaacttgagatcatgtacaatgggaggtatataaagaacttgaggttatgtgaatgattggtgcttataaatatggtgcctaaaagaaggatgtgtccatatcatcgagaactcatatataatttatattgtctactgcaaaattcttttctcaagtgtagattattatttttttgataagggcatgcccatttctattgaagtacagaaaacatggtaggaagaagggagaagtttaggagacaagacattacaaaagtcaatactcctacggtaagtagtttccacacacacacacacacacacagagccagcggaccagatccttccctcgacacactagaactactagaacagcagtactgagccttcactaactggagcgtagcctagggactgcatctacaggattgcagcatcgtgcagactcctacttgatacaaaagcaaagagaacccagccatactaacaatatagccatattaacaatactacaagtaaacaggacacgatcaatcactactggtaccacaagtgctcagacaactaccttttcctattattttatacataaacaactgccaagcatcacacacaaaaaatatgaacaacacaaatctgattctatttactatataagcactccatgtaagcacttgcgcaattaagcatttataacaacagaaccaagaaaccaccacgggctgctgcaggcaggggttcagccaacttatttcgagaaaccaaagagagagcaagttcagtacaacattagttttgcctagtgccttagaccatgcaaaacatcaattaatcgtaatgtatagaaaaagtgagtgaccgattcaagcacatacgaacagaaaagaaaaaagaaaagaggaggggaaaaaagcaagctcaccttaggcagcattttgcaaatgggggaaacaatacccaagtaaagggtgaatcggtgtagcaggtagccaggccaccgggtggaggtgcctaggaagagagatcgtcgcagtagcttatgaagtagtggcgtaacaagaaattttcgtccggtggtcctgcttcacaagttcacatcacataccaaaattttgtatcaccgcaaatcccatgagtacaaattcaggtaaaaggcgaacaaatataccaataatatcttataacatcagtaatcaactaatttaactagcaagttcaaaatgtgcacatattacaatacagatagttcaaaatgtgtactccccactcctcttcatgtctttaccaatcctacaaactaaaataagtccgcggcacatcacaaatttagcaatggcaaatgcttccttgatcaaacacagtgagaataatgaagatatgagctagaggtataacctgtaggagcaggagacggcagccgggagccgcggcgcggagggtagagaagccgcgaacggcggtcgacagcgacgggcaggggatgagggtcaggcgacagtgcgagagggagccagtcagacggggttcccgagctcccggagctggcgaccggtggcggtgcggcagatggacgccttcgctcggcggtggtctgtggctgtgccgatgcggcgccgcggcggggaccggtggtgtgcgcccccgtcctccggcctacgcggctcgggacaagcggacggcggcggcggcaccgagacccagtgctcagtggcgacgaggagaggcagagagaggctgcgaggagaggcgaggcaacggcggcggcgcggtcacgcgcgtgcgagggagcagcgcagcgccgccgcgaagcgcattgccttaccgagacctaagcgcagcgcccgcttctccttctgcttattgggcctgagtagctgggccaaaatcggggctagtcccgaaccaaccgggagcgtttgccatttggaaaaagtatatataagatccctcatcttgtcaccgaattacaacatcgtccctcaactgaaaaaccagatatatatgatccctcaacttacaaaaccggatcaccctgagtcataacttacaaaaacagattactctgggtcattaggtggttgacaccagttttgtcctacgtggctgccggtgggtgaactcctcaagcgggggagtgaggccccctttgttaattcgggcggggggtagcgggtgagaattgagggtttggatggatgtgtgctgtagagggggtcggggcccctcaagagcaatgagataaaaggagtttatacaagttcgggccaatgagaagcgtaacactctactcctgtgtatgatgatttttttgagctttgaaagtctctgaatctcggatgtacaaactagagttggtatgcaaaagctaatcttttgatccccccaccaaggacatgggcctccttttatagcctaaggaggcaccacaggagtttaccggattacttaggggagaaggcgaaaaggaatttatcggaggatgaactcctcgagcgggggaccgtgaggctcctcctttgttagttcggcctagggcagtggatgaaaattgaggagctggaagtatttgaagaaatgagggggtcgggccctcgagaggggtgagacaaaagagatttagataggttcgggccgctaaggagcataataccctactcatgtgtatgataatttttctaagattacaaagtctctgaatctctagcgaggaagctaagactcagcttcccttcagaatttttaggtttcaaccacctccttcgtaggcctggacctccttttgtaccttaaggggttaccacatatgccataagagctacctagagaggagggaaaatgttctctacattaaatgcatgtcttgtgccttagctcggaagccatatgcacattgccttggtggtgagcccattagaacaggccacctgacacggggggtgccctcgtcatctcccatttaagggatggagacttctgggctcctgttacaccgggaaacgggatcctttctttgaccagagcgggcggaccgactccagctggaatgagaggctgaaagcctctcgtcattatgatgagacggggcacttcaaggctgtaggctgcttgacagacggacagtgcgcaggtgcactacccctagtcccatcggttattcgatcggtcacggaccggtcagacgcgctgcatgccgccataaatgcgggtaggtgggctcttgggggcggccacctaacgcatcgcacgtggcgacccgcggagggggtcgaggaagcccgacccccggtcgcggaggggggcggccgcccccctaccccgggcccgaccccgctcgggagagggccacgtgggcactaggggcagcctccttcctctagttttgataccctcgggcaaggaggggcagctgtcactccaccccgggcccgaccctcctcggggaagtgctacgtgggtttaggggcggcctcctccctccaaacatgatacccccgggcctatatcatcgacataattgattatgctaaagagcacgttttattctattgacatgacgaccacatcctcgaccgccacaacatgggcccatcaaatcgagccgctagacacgagggagcattgtgtcattcgccaattaatggatgaagactcttaattgggctcctgtttacaccgggaaacaggaggtcggctttagaccagagcagatgaaccagctctgggcggatctaggggctagaaaaaaaaaccccaccatcacgatgtgatgaggcggggtaacttgccgccgcctgtcacctgttcattgactgggcggggcaaaccgtctgccgcatgtcactttgtcagtggctaggcatggcaagccacacgcacatcggctgccatatggggcccaccacatcaggccggctgacatgggggacgcctgcgtcattcatcatttaatggatggggacttagagtgcaggcttgcaccgggaatacaaactcgggcctggccacaccggatgggatgagtggctaagagcccctcatcattacgatggaacggggcataacccgctgcacgccgcctgacatgcggtcagggcatgagcgctctgcagtcgtcccatccatcattcggccggtcatggaccggtcactgaccagtcacaggccggtctggcgctcggcacggcgtggaacgcccgctgcaactgccttaaatgcggttaggtggacgctgtgaggcacccacctaaccatatacacgtggcggctcgacccctcgggcttggaggggatggccgccgcccatccttgggcccgaccccctgggaggagtgccacgtggacactgggggcagcctcttccctccaatctttgtacaccctggcccatatcaccgatagtggtggccatacctgggtgaccatgtcatcaccctctccctctctctcccctcttctctcctttcctcctcctccttcccctctctctctctctctctctctttctcttctaccctcgtctaggtgggccggccagccagcgggttcgaaggaggccggctgaaagggtcaattaggcctagaggggggtgaataggctaatttaaaactttatgcggaagctaaaactgaaataaggtcggaaagtctgatccacagtcagactatccaaaaatatcagatagtctgatgttggatcagactgtctgatccaccaatgaagcacaacaagtagatctatcacacagacaagagtaaagcacaaacagcaactagatctatagtggcacaattaagcaaagctaaaaggaggatgaagggagatcaccaatgatgaagttcacgaagttgttcccggagttcaaatccttgaggggattctactctccgttgaggagctcactaagagccgggtctttgctaaccctttcctcaagaggttgcactaagcactcctccttccactaaggggtatctctttccttgcggaggcgagatccggccttcacaaacttctcccggccaaccacacatagatcggtggctcgggagtgacacctagccgtctaggagtcctcaacctccaagagtaacaaacaccacacaactcttggtcaaaccctagtgctcaatatcgagtgaaacacacactaggccctcaaacaccaaatccacaaccaccaagatccaccacacaaagaacaaggagggatttgagagagggagaaagagctcaaagatccaaagcaccttagcaccaagttcaacccaaagtgaatgagaatgaaatgagttgggtaaccctagaaaagggttaggtggggggtatttatagacccccccccccaaaaaaaatgtggtcgttggagaggaatctttcagcccacgtcggatagtccgatacaagatcggatagtccgatattttaaacctccaaggcaacgagaaacagagaacgaagttccatgaaatttcggactttccgagacatcagactaactgatgttaaatcggagtatctgatattttagaagcaaaaacttcgtcctcaaacagagactcaagttctatgaaatttcggagtctctgtatcatcagactatctgatccgacatcggatactccgatacttagaaaaactcactcgataggattttttcaaatcaagacagagagtgaagttctgtgaaaaatcggatagtctgatttcaaatcggatagtctgatgttgatcaagtaaaactacaataactttttactccgaactccgatttcgaagatcttggactctatgaaaagctagtttcgtgggtcaaacccaacataaaacatggtccaaaaccttcaagagatgttgaaaaacttgcaaagaaacccggtgtaagtgttgtgacaagtgaaacaactcgggattgaaatttttacttaggtttttcaactcacacaaagatgaagcattttgagcactagtattctaccaataatatgcatgtggtatcgctcttaatagtacgacattcctacgacacaatgtaaggtaaaagatacaatataccatttgatcattgccgcattgcatcgtgatgtcgcattcatggggtatgcatctcattacaacatgtcgaggacataacaaccttcacatttgcttgaataaaagtgttagtcctctctaatcgcattgtaatcaatcatcaaaatcattaggggcctagatgcactttcaccggcaacgggtgatgcggtgggcggccttgttggtgcagtctaggagttgatgaccacacgtgccacctcctccgcctccacctccacagtgcacacctcccacaccatccttctcgccaggaatccccttgctgccgcccacctcctcgacgacgcccaccaccaatcctcacgccctcgtcgtcgccaccggctcgagacctacgacatcgtcgtcgaggccacgcgccgcctacaaccgtgtcatgttccagctccgctgatccaaggccatcctcaacttccccaacgaggtcacagccgactcaaattcctacatgaaattttctttgaatgcttgtctataacttttctaactttgtactagtgaaattcatttgtttataaccctcagtagctattaaaaaactaaacaattagctatctcaaacggagcctcaatattcaaatataaggaatattaggttctaccaatatctgttctgaacatactaacatatacttcctccgttccacaatataagatattttggcatcttcatacctcgtctaaattcaccaacatctatataaattaggacgcgtatatgaaatacatatatggatccatgcatctatttaaaacccaaaacgtcttatagtgtgaaataaaagatatcatataaattcaccaacattcatatgaatttggacatgtatataaagacacatacatggatacatgcataactatttaaaactcaaaacgtcttatggtgtgaaatagaggaagtataaatttaaaatataggtgtatatatttggcatatcctttttatttgtgctataatatattattagtctgtttgttaaaactctaattcctaaatttaacttcacttgctttagagtggagttgtgaagcggctcgaaccccactcagtttacctctctagtccattttatgatagctcttcagtatgttccgctccctttttaggtgaagctatagttctgccaacaagctctctatctagtactactggttctattatagttattggttaagtactctctccgtcctagaaaaaataaatctaggattggatgtgacacatcctaatacaacgaatctaaacagatatatgttcagattcatagtagtaggatgtgtcatatctaatactagatcggttttttcttggacggagggagtaatgccttccatgtgcatcctagccattcagttctctaggcaaataattagccctccgaaatcttgctatttagaagtatttaataaagtctatgtacagaactacttgttgaacccctgggctaattcgcaagacgaatctaaagaggtatattaattcataattagcggatgattactgtagtatcactgtagtaaatcatggattaattaggcttattagattcgtctcctaaattagcttacgggttatggaatgggttttgttagttatctacgtttaatacttctaaatagtaagattctggagggctaataattagccctccggatccaaagaggccctagttgattatgctcccttcaagagccagaccctcgctttcccctatagatggccatgaggcccgctcggcacggcccggcctaggcacgactaggcacggcccaccagccatcgggccggcacggcccgatcggccgcacctccggcctaggcacaacccaccagtagtcgggccgtgccgtgccagcccgaaggcacgggtggcccatcgtgcctttttttaaataagtctattctccctccctcctctttgggctgtgacatactccctccctcctctttgggctgacatatatatagctaaaataagtctattttatgtccctattctttggaccgtggcatataatatgtctatttttactccctttcattgtgtgttgggcctggctaccggcccaacgtgccggaggaggggcccaggcacggcccggcggtcgggccggaccggcacgggccctaccccgtcgggccgtgccgtgcttaggccaggccaaaatgtcgtgtcgtgggccggaccgtcgagcctcggaccttttcgccatctatactttccgctttcaagctacagctctatcgtcgcttgttcggccccttttcctcctttcctccgatgattcgtcgtcggcggagagagggagaggggtccggtccttccccctagtattaggttagtttagtcgggtttttcctgtttagtcggggttctcccgttgtgtagttggttttttgagtccggagcaagatgaacacagctggagctagctctggagtttgttctcagggtcttctagtcatcactcgggatccctccagatctgcgagttcacaggtagcgtcgaccaactttcatttcttcgacgaatttcttcctcggctggttctcctctgctacttctccagcgaaggatttttttttctccaaggcgtttgatatttccaagtctagccgagatggtctcaatctcctataaatcgggtatgcctctcagttttctttgcaaactgctacgttctctctctaatcctcgccagtggaatagttatagggttcatccttggaatttttgtctgcaagccaactttcgccagtggaagtggaatagttatagggttcatcctgccagtggaatagttatagggttcatccttggaatttttgtctgcaagccaactttcgccagtggaatagttatagggttcatcctgccagtggaatagttatagggttcatccttgaaatttttgtctgcaagccaactttctttcactgatccggatccggatccggcgaatttcttatatgttgttgctgatattattatgtgaattccaacatccaaacctcctttgcaaggccccgtttgggacagcatgttggttcaatctcctgcagcgcatcctccaccgtcagagtcaagtttctggatttcgtcgttggggttgaaggcaaaaaagggggaaaggactccattgctttttgctatttttaaagtccttttctgcactttattaagctcaagtgtaatttgcccagttctaaggggcttttctgcaaacctggttgtattccagtgtcctccactgtatgcaaacttgtactcgtgtactgtgttacttctcttacttaaataaagttacatgagttcaaaaaaagaaaagaaaagagccagaccaataatcggagaatgaaaaaatattaccaggctattctacttttacttgtcaggagcatgaattatctcgatagaacattatgcaacttttactaggagccagttagaaggaaagaatacgtatgctccacttttctatacatcagctatctatatgatgtcttcaaaagaagtgatccattccatcctatagcacacaatgcactgtcgtacaacacaacgcacaacgaattgaagaggtaattcatcttcccaaataacatacttccttcatttcacaatataagtcattctagcatttcccacattcatgttgatgttaatgaatctactaacatcaacatgaatgtggaaaattctagaatgacttacattgtgaaacagaggtagtaccaactaatcaaccagcatgtgttgctataagaactcaaaatgtagaataaaacatgagttttaataaacagtcatatcaatattaagacagaaataagcgcttttttcgggagcaagacaaaaaacgagcacttgtgcagatgtgctcagcctccagtagtatacatgtcaggaaataaagcagtgattgtgtgcgctttgctcaagaaggaacagatgagcatcaaatgccttattttaccatcacatattgagatgtttatgaagacgtcaggccaaagccataattaagataactcactccacattatttgtttttactggagctgaaagtgaactctaacatttaggaaaaatgggagtagcccattaccaaaaacaaagttcatatttgaagggcatccgcaatcgaaccagcaaggctcaacacctcaaatggaggttgttggttgatggctttcactgtttgagggcaggagtcagtgatccagaaatacgcaaacttgtcagctgacccagctgtgagtgggaaaaaaaagggtgagaactgaagttgagtggctgaaaggtagaaagagaagagaatcacgaattaccggaattagtgtgagtgaagcgctcatacgactgcttgggaaaaacagcatgagtcacgtaagcactaacttttgcagcaccatgagcagccaaaactttctgcaaaataattagacaaagaagcattaatgagaaatgcaacataaagcagcatatcccatcaacagtttatgaattagtacgtcctcaaaagtgttaaaacaattacatggagtaaaatgaacatcaagcctactaaaaaatgaaaatgcaaaaataagcatgtgactgactttgctaagatcaggttttacaagggcatgtaattaatctctgtttttcaggacctctgcctgttggcaattaatatgtgaaacgtatattataggaggcattactctttgtcagacaactaaaaacaaagatagcaaaaaaccatatccctcttggcctctcccactaaagtggaagtaagaaaatccaacattagtaaaaattaagtcactgaagcactactttgtagtatcatggcaaagccacagacagtatgttgatacctgacattctctaagagttcccccagattgcactaaatcatcaacaataaccacatgccggccttcaggattcccctccttaattcgaactatcctcttgtcaccttcccgaacctttgcgcagacaaccttataatcaaacagcccaaagtaaaaactcggagtctttcaaccagaaaaaaaaaagagcaattccacaatggcatgcataaccgaatttcgacatgttcattcattcacacaaaacaagaagctaaccattgggaagttgagcaatagcttgtggaaacgcttccacgccccatcatccgggaaggcaatggtgatctgcgcaacacacaaatcacacaagtcagcagtagcaacacgaattgggtacttgaaagaaattagtaggacaccggtggccttgctacgcacattgtcagcatcggggagctgccggaggcgctgcagcaggagcggaatcccggtctcgaagcaggggaggacgtcgtccccgaagtagaacctctcctggagcgcgtggatgtcgtagatgacgacgctggtcgggccgccccgggacttgggaatcatggagaggatgcgcgcgagggtgaacgcggtggcgacgtcgccctcctcctcgacgcgctcgaaggagcccgtggggaagaaaggcagcacgagcgtgaaggaggcgatgaacagcttgggcagcgcgaagatgacggagatctgctcgaagatgaccgacggcgagctgaacgacgccaggaacgccacgtgctgcccccggatgtcgtgcgcgttgttgatgaacaggttggggaacccgtcgtcgaagctcctgcgcggcggcggcggcggcggaagcgaatcagcgaatcaggtgactccacgaaaccggcgaggaggaggaggaggaggaggaggaggacggggagcgtacctccagttgatggactggagatggatggtgtcggagctagcggcgaccttgagcgcgagctcctcgcactcggagcagtagaagaggtttatctgcttcttcgccttcggctgcctcgccacgacgacctccatcctcgtcccgggctccccggcgggcggctgcggcggcggcggcgcgcgcgagcggaatctccgaaaagaacggcgcggggggacgcgagcagtgtggtcggctttatcgacaggggagaagcagcaaaggtctaggagcaaattattcgctcaacacttttctttttttttttcgcgagcgtaaaccctagcttagaccccagccgcgcggcgcgagccacgaatcggcccgtggtatgatcgatcgatcggccgacgcgagcaggctggatttgggctcgaggcgagactagcacctactagtagcggcgcaaattggggaagaagataatgcgagatttttatagagcgctacttgcaaaaactgacgaaaaaaaaacaaaaagggagaaagcatggaacgcgccgccgccgctgcaacgcgacggattactatcaccaatccgataccatatggtgtcatagagaggcatgaagtacacagccaacggctggctctcagggattaaacgtcggttctaaaatatactctccgtttcgaaatgtttgagaccgttaattttttagcacatatttaaccattcgtcttattcaaaacatttaagtaattattaattcttttcctatcatttgattcattataaaatatatttttatgcaggcatataattttacatattttacaaaagtttttgaataagacgaacggtcaaacatgtgctaaaaaatcaacggtgtcaaacatttcgaaacggagggaatactagtatactaagtacaaatttgaattgactgatatctaatactatctaaacggatattcgtacggtcagattcgctaaacaaactcttaccacactatctaatactattactactactaatctataaatagagagtcgctaaataataaactcttactatacaatctaataacctgtttggtacaactccaactcctaaatttagcttcaggagttaggtctgcagtgaagttgtggagctgtctaaacctagcttcacaactctagttcattttatgagagaactccacccaactccactcccagttttggtggaactgaaactgtttggctgagctccagctccaggaggggtggagctggagctgtacctgtaccaaacaggccctaatactactattagtagtatgtagtgttagactgtagtattatataatatctaattcattatttggttaatatattttagtacgaatgaagcaccgaagagcattgttggtgaaggtttttcccatgaaaacaaagtgtacagaagcaagggaatcgtaagaagcatatgagaacctgagcagaagacaagaaaatttctcgagttctaatgggagacatgggactagtttattccccacttgtctctagtggggtgctaatttacaccagcccgtcttgtgtgtatgattgattatccttagccaaaatcaacggtacaaaaatcgtaagttacagaaatgtggtcaatccaaaaaggtatacgaaatcaacacctgaaaagaatgccaaaacttttgcaatgatccaaccgctgttcaccaacagaatctgctccaggcctattcaagaattaagataaaactggcgtgtttttttcaggagcatacctcgcttctccggaacaaagctaagagctgccagagtatctgagtatatacaagtctagctaacgcacggatcagttgacgaatagcccttttccaaattgaatttcggctcgctgggatatacaaagacagttgcggctgaggctgaaggagtcagtgcagcagaatacctcactgaagttattgttatccttggcagctgctgggaaccagaaccaagcggcacaagcttatggctaacaatatgctcggttttcggcagaatggatgcagcatgattgtgagccccagagaagacgaagttctgggaatcaacaagagagtacttgatttcctgaagtaaggatgttgaattgtagatcttcacatgaaaagtgaaagggattccaaggatagcataaggagggcactccatggtcacaacaagtggcggctcctcgatatgaacttcaggtaacctttctttcattataacacggctatcttgactctctccaatgcttgaatctcttgaccagctcaggcaaatttcacctagaaaaaagcttggactaatagtatgtggattcactgaaaatattcctttgtattcttcactaggagcaataactgcgtattcattggaaatcccactgatctgttgcactgagcagagttgttttccatcatcattagacacaatagtcatcgtgtgtagccgcaaaggtacctctgtgcaatttctagcacttaaaataagcatatttgactcgttgaaagcaagagaactttttttatcatcatcacttgaggatctgatcctagataataacaggggttctcgcctaaatggtctcaaaaactgttgactgactatcatggggatcttaccttcaatttgcaagcttctgtgcacattaagtctgtgcagtgctgcttcttcagtcgagtccagggaatagccaagtgagacatagaacatcactgacattgcttgatgccattttatttccaatttgcatgaccaggaatcacctgcatataatgtgggaacagatacaaccccaaacgagtgctggatttttcttatgctatcaacttcttcctttgacccattttccgtggtcacatctgagacaccaagaagttcaacatgatgactttcagattcttctgcttccctaggactcatcaaaaggcctccacctttggcatcgacaaggttgattttcagttcaccagaatgaactgcgtgtccttttgacaatatggtcactgggactgtaaataattctccaaccaatgcaggaccaggacaatctaagacaaggtcaacttgagcatctggctcttcaacttggatcagtttctgcccagaaaaagcaagtacattgtccttcataggtaatgcctctacttggtcctcaaatttccacaatgaaaattctcccattgaaacaggactttccgcttggcagcaaactacaagacgtttacttattgttgccttcaccgccaaacattccagctttccactctgtcctgcagaaagtactcacattgttatttcatgataggactaacagaaggggaaaagttaacatcagcaaatgccgaataaagcttaaattttgattttcaatctatcagccacagccaaaatttggattttagaacttaattttatagttgattttgatgttttttcatcgtagttcattttccagcattggcatttaagtcgctaagaacgcatataaaagagttttacccgcaacttatgttttggttgctaataagtgtcatgacttaaaatcggttgtacgcaaaacgatgagactggtaatgtcctgttgtttctgtatgttcagattaagatactaatatgacaatatttacaggttacttttcaagaaataaaacatttacaagttacaatacgtgcagagagcgggtggatgaacatctaatgaaataaactatatataatatatataactgatacctggtttaacttcatgagtcaaccgcatccatttatcagtgaacagtgtcagaggagtctgaacagctccatcatgaacatgtgaatttgatgcagaacaatcttcctgtgcactaactataacaaagttacagtcggattggttaaactgaacctccaacttatcaatcataactggacaaggaagatgagactgtagagagacactgacaagcattggtgaatcaggttttacagattgatcgtgaaaagcaacagatgcgagaaacactatccttagtggacttatttgatcaatatcgaggtgagtagattcttccatcaaatgaagatcaaattcatcatcagtgttctccgatgcatgctttccttccaagatattaataacttcctgctgtataagctctctactggaaatggtaggagatcctgctggtccatttttccttttattttctgaatttccctgtccactgccagagaataaaggtaatgcagccatctcaagtgaataactgataaagtccttcagagacttaagtttccttgcacattctctcaagtaacctaggttttcccaaagtaaagtggcccaaccttcttgacggtataggccagcaacaccatcaaaaagttgttttgcattactaaaatcccctgctgcataatactcaatggccattccaccactacaggcagaagccattcttgtggcacctaggctccgaaatgattcataagcttttctgaacaatgcaattatctcataggaatcttgaaacctttcagcttctgacaaagcatagctggtatactcagtatcagaaaggctgcaagcacagtgtcagatataagtagtcatataaaaattacgttaacatctaaaagtaactaagggtcaaagaacttacggaagcaccgcaactgtatctccttgctcaaacaagcgtacatactgaccaacatatacggaaggcattactgactcaggtaatccattgactcctttggtaaggcttacacttgatgaagagaactctaaggcatacctcttctctctcaagtaatttgccgccaactgccagaagggaaggcatcataaaaagatcactagtgtggtcaagtaaaaggaatgaaatatcctctgttgtagtgctgtgtagggagaggttgaacctgatagtagtaagctggttgaaattcccactcggtcagtgcgttgtcagcagtgccaaaacgaggagatagtgtatccggaacagttgtagatgttgtttctatgagctcaccaaagacaaggaactgcctgctaaaccattcccagtgaagaaaagcaacttctggtgatccaacaacacgctcatagcttctgatatgcttacggaaccatgtgattgctcccacaaccttccccccatgaagtaatattgttgatatcttaaagtgaaattgctcagcaactgcttttacctcaacaaggcgttgtgttggaggcagtcttgttgaagttcctatcatctaaataagagcaattgtcaatgcagggtgtaaagccaatagaaactgcttaagcaatagtgtcggaaaaataaaacagtaaggaatcttgaaggctttcaatatgtaatgtaagatgcaaacacacatggagaggatagggcaggatagagtggtagcttggataaattatctttaatgctagacaggtatgagatcctcatgaagtgttttctatatttaatattttaaaagtagcacgtgcacaagagtatattcagcattacaaatatatacgacatttggatggatagcaaccatagctgtctttctttatttactcatgagttcagtgtcacaataatctggcttctaaaagagtatgtcaggtgtggattcacttaattatcagtcttttaaggtctatggcaaacatggaacagggatccaattcacacctcacgcagaacacgaatgccctcctcatagaactttaatgcttcaggccaatcccgcctaaactccgcataaacagcgacctggtgttagaatcagaaatatcagaggaatgcagcccaaaaaaaataaaaattagagtagtgagaagtcattagcactactgactttaccaagcatgtgaagaaaaatttttgtcccaataccacgggcattaagaatgactaacagtgctaaattgaaccagagagagattcctcttcctaccttgaaacagtagcgaatgctcagctcaacagatgagaaattccttttctcgatgcgagctttgacccttcgtccttcatccttatagtatgtcgtacataactccgcaaaaacagttgtcaacctttcaatacagaacataatgcaggttagtaggtataactccaaggaacacatgaaaaagaaaagagcaaaagatagtttcaaaaaaaaaagaaatataacagtagaagattaaggggaagtttcagagcatacttgttgagagatttggtccattccatttcatctctctcaaccaaaacaaccaggtgctttgaatcaatttctgcacgtttcctcagagcaaccgtaacatcctcgctcagttcatctgcaaaatgttattggctatctggttaggtttgacgacacaaatatcaagcgagtataagggtctgttatcataaggcccatgcccaagcccaaccctcgattcccatgacgcagagtgtaggcattgacatgcgtaaaataacagatctaatgctgttgcagatatggccagttgcagattgtttagctaagcttcgtaagctaaagtgctaattgcttgttcagcgagaaaatgtattactattacgtatactcgagaggatgcttaccaccagcttgactctgtacaaggatcaccactaatttagtgtttcttccctgaatcacagacctgcaaaaaaaaaatgaacattacttggtatttgcgaattcagtctgtgctacactagctgcttatacactgctgatacttcagaaaagtccttaatccaaaagaggtcgatagtttccaatttgcattgcaggggtgatatttatgagttctgattatgcgcacatctatttgggatcaacgatgcaagagatgtagaggaggtacttgaggttctcgagatcggagcaggcctggagccactgggcggggtccccggagacctgatcggcccggaacatcgcggcgacggcggcgggcactcgggtgcggtgcttgaggagccagtccttcttcaggatcccggcgggggcctgcggcggcgcgagcgggtcgcgggccttggcggtgcgagcgaggatggaggccttggagaagtccgggagggcgagcaagttcatgggcggctgcctggagctcagcgccgccgagatcgcggggtgcagctccgggcaccccacgatggacaccagcgacagcggcggcgtccgcagctcctccgggtagtcctccatggccgccccacccgcggcgccgcggcgaggcgaggcgaacggtcgggaggcgctaggtccggtcgccgccggggtggtggccggggaggacggggagctcggatctgtggtgactgtttggttcgtttggaagaactgggtgggggcgaggacgacgacgcgcaaggagtggaaacacgtatcgctatgtgagatgtaataatgaatatagtcagggtgttttctatgaagtctgaaggaccttgttataaaatttcagaattctgacagtcatcaggttaaatgaacaaatcaataaactacgtagtagcttgtactccctccatactcataaagaaagtcgtttaatacaatatttaagtcaaacattaggaatataaatcataaataactctcaagttgttgagtttgaaaatataaaaattatatgaatagatttgtcttaaaaaaaatactttcataaaaatatacatatatcacttttcaataaatatttttatagaaaaaagaagtcaaagttatgttttggagatcgtgtcgctgtccaaaacgactttctttacaagtacggagggagtagttcgtttatattgaaaatgaagatgaacttagagcacggaaaacaaaaaaatcataggcgtatgattaattaagtttagttattacaaaattagaaaatggttttatctaacatttcaaagcaatttatatatagatagttttcacacaaaatacaccagtaggcagtttgaaaaaactaaaatatagggatgcaagcgggtcaacccgcgagttcacttataggtcaaatactccctccgtactcgtaaaggaagttgttttggacagtgacacggtctccaaacacataactttgacttcttgtttctataaaattatttattgaaaagtgatatgtgtatagttttgtgaaagtatttttcaagacaaatctattcatataatttttacattttcaaactcaacaacttgagagttatttatgatttatattcccaaggtttgacttaaatattgtcttaaacgacttcctttacatgtacggatgggagtagatgataactcatggatttttgcaacgtggtccggcttgccgcatctagatatgcaagtgggtcgatctataaactcatttataggtcaaattaatagataacccgcaagtcaaatccatgggttacccactaattttgcctataaacgggttcgcggacaagcctgcttgcacccctagtgaaatattttttaatggcaaaagaacatgatctgtttggatcccatgaagacgaatattaagtatggacatgtaaaactagaaagccaataacacatggttaatttagttttaattattttaaacttagaaatggatttatcttatatcttaaaacaatttcacatagaaagttttagcacaaaatacatcgttttagcagtttgaaaaacgtgctaacgaaaatcgaggtaaaatatgtatcttataagacaacggaagtcattcgaatttttttagtgaatatcaacaactaattcctaactacactaattcgaaagtagaaatcacagattcagaggtcgggtggaccgacacgggaacagaggaggcccgtggtggtggggcgacgccatgctccctagcctcgccactcttctcgccaagttcacgcttcccctcattgtgtcgccaaaggtgatgacacctagcctctctctctcctttcccatatcttcccattatgttctctcctatcttcacgacgccgaggcctgaggccctcacgacagcaaaaatgacaacctaagcatcaacctgagcttccccgtcttcgtcaccgatagagctcggtgatgccgccgccaccgtctagctcctctctgccgactaccgcccttctccctacacaggcacgtgccatggaggcctgaatagagatgaggaagagagagaggggaggaagaagatgttgtttcaatatttaggaccatcatgatttttttttattttctatttttgcttttggttccaggtcagcttaacacagcctacaaagctgccttgggactacattcgtttgttttgaaagataaagaacgtgtgttatacttatatctggtactgcggtccaaagacacgattcgaactcaacgtgaattatgagggacctaaagtgaacttattctatcacgcggttggagttcaatagtctatcaggcccatccgggcagagagaacaaagcggcccatccaggcagagagaacaaagcggcccaccactggcgggagtaggcgtaggaacaatctgtccctcgctcgcaagccgtggagatccatcctttttttcccattgcgtgccagttgccacctctcaaccccccgcccctggctcaccctccgggcctccctcccccctcctctcctctcccctctctcgcggtcgcctcggtgcagcccgcgaaaatagcagccgcccgttccctccctctccctctcccctgccctgccgaagccgcggcgatgaacggcgccacggccggctccggctccggctccgaccacgacgacgcgcgcgccgccgaggaggccagaggggaggaggcggcaggccgtgccgtggaggttgaggaggaggaggaggaggaggaggcggtgcccgtggcggaggagagggccgcgtggggcggcggcggcactcccccgacccccgagccgaagagcgacgcggacgcggagggcgcgggctcgctggatcgggtggagctcaatgcaggggcgggcggcggccgtgagcgcgaggacgacgagggggaggacgaggccgtgggggcgaggggggtggagatgaacggggaggacgccatgagccacgacggccacgacggcgatgaggatggcgatgacgaggaggacggcgacgacggcgaggaggaggaggaggaggatgatgatgaggaggatgacgatgacgactccacccccgatgcgtcgccgagggcggaggcgaaggcggagggcgagagctccaccgtgatggcgggctgcgccaaccagcccgctgagcccgaccccttcctcgacggtgacgactctggaacggaggaggagcaggcggcgttcatggtggagctggagcgcttccacagggagcacggcctcgagttcaagcctcccaagttctatggcaaaggtctcaactgcctcaagtgcgtgtctttctacacctctcgtttctgttagctcctcaacccgagtacacccatctcttctcgtctaagcttgctctgttccttttccaatccaggttatggaggcaggttgcccacctgggaggccatgagcaggtatggtcctcgactccttgtcactagcttgctcgctgctgctactgtagagtaaaatattttcggtgacatatgtccgggtggatcacgatcaaataagttcaacagtgattagtgagctgcaaggacctgagttatatttattctagttaaatattttgcttgttcaggtaacaatttgtaaactatggcgtcaagttggagagactttcaggccgccaaagtaagcctctaattttcacagaacatgttattcgcagaaaaaaaaagacttccatatgtgagtaatttgttgctgccgtaatcctttgcaggacgtgcactactgtatcgtggtcgttccgaattttctatgagaaggtgatgcatttgctgcatgattttcttttgcctctgtacttgtcacaagagaacttcccccttttcagttctttctgtcacaagtaaatggtcaccaacaatcattttttttcctgcaatcagtatcatatcgcatcaactttattgtaagttttagttgcaaaactgttagacttattagtatagttcttagtttcaaacataagaattgatctaaaatgatgggtctgcctttattagtgtaaaaattttaggggttcccgtgtcagttaatgttgcttccttttttggcagggaatatttaatgttcttacttcttacttttagtttaacgagcaattatcttacttgatgcgtcccttcatcattttattgaaactgttgcgctttcttcagatgctattactcttaattctttagatcattaattttcttagttatttatatgctaactgatgcatgttttggatggaatatagtacagaagcattattgtaagcttagattccatcccatatttatgcattgttttctgcttgatttgttaatttttgtttctcattaacttaggcacttctcgagtatgaaaaatacaaagtccgaactggccagcttcaagtaccattgtctgctttaccacagcctggtggtactggccgtgaggtaattgttctaatagtgcagtttttaataagagctctaatttattaattcagtttatattttagttcaatactgtacaatttaacgggattcaccctatttgtgtaaatctttaataattagatgaacacatgctgtccttttaggacctgtctaattcgcgcctgcgccaaaagtcatgatcagttacggacaggatgcagccacgcaggacttttttttaaaaaaaaaatcatcactggaagaatagtaagacgagagcacccagaaggcctcaatccagttcttgtgtccccaactcgtgcagcttgcatctcatttcttgaactccccagtcacagtcacgcatgggcatggcacatttgtttatagcttttcgtgcatagtctcccctaatcctttccctggaatttgtagcccttcttgttctgcatcccgaaaagggaaactttcaacttctcattgcaaaaaaaaaaaaagatgctactaaaaacctttgattggacaactttcatctggaactgaaaactttcacctggaactttcatctggttactgaaaactttcttttggagactaagctttctactagagattgaaaagcttcctattggagactaaagagcttttgatcggaaaactttcacatggagactttcatctcgagctaaagctttggagcacacaactttcatatagaaaaccaaaagaataaaacggaaaagagaagggaaagcataatcaatgtgcttgtcaggggcctcctgagtgaatgccaagcctaaacaaaattgcataccccttcgtgtcgatcaggcccgtatgctagcattcctcacaatgtgcgtgaggggatttacttttttttttatatccatttgtttatggaatggtgttacgcctttgttagcatgcacctcattagtcatgtataaatgaaagctgtgatatttacaccaacctagctgaattaaggacacagtctggttatatccggaaagaccaagggattttagtcactgaattccttctgaaaattgagtgttggttatggatccaattttattgacatagacgcactaataactgatttaagatgcctgccatttgttaaggtttccatcaagatgtgtggtgttgcgttgttgccaaaagtgttttcttgtcgatgcgtgtaaactactagttttagctagcttgacaagtttgtttactgccttgcagattggtatgaatcaatcatcttctgccagagttagaagggattctgcagcgcgtgctatgcagggttggcatgctcaccgtctccttaccaatggcatatatggagatcaaatgttgaaggttaaaaagatcttgctctttgtttacatgtaccttttcaagtcaccaactatttaatcagaaaagattcaaacttgtacaggaaaaagattcagtcccttcttcaagtcgtggtaagaacctaaagtatttggtatgtttgataagttttctttcagcagtgcatctgttgttttttctcatttatttgttttgacacatttaggagtactcaagaggaagaaagcatctagtccagagtgtgctatcaaggtgtctcgtacaaaaataaacaaatcacagttaagacttcctttcctttctgttggttatatagcattggctgataatgacttggatttagctacggaatatgtcattacaaaattttataggaaaatcctaaaaattacagttacattttgttcaattaagcttctcagcagaatttaaatccatatatttggatacttagcctatgaagcctgaacttgtatttatgtaacgggattctcaatttcagggatgactcaatggtcactgatgttggagaacctgccgagtgggtgaagattaatgtacgacagactgtaagtctcatatggtgcattgatattacagacaagtttttcagtgctcttctgaaatcctaatagcatatgagctggtttttctgttgagttgccatttttattcgggagaaatctcttcatttggctgtttctttcctgcagaaagattgtttcgaaatctatgctctggttcctggacttctacgcgaagaggtgaaaaaatatctttaatgttgaacgcatcacttcaaactgttccattttcctaaaataaatacctgacttaatttgtgcgtaacaaacaaaaagcttccacttcttgaactgaggcactacctgcgagaagaaatgaattgttgaattttgttctaaatggtgcaggtgcatgttcagtcagatcctgctgggcgtctggttataactggggacccagagcagcctgataatccttgggggatcactccattcaagaaggtgatagcagcaatttgaatactaatttgagcacgtttgcattctcttcagataacatgaagtgattactctttctcaggtggtcaatctgccattgaggatcgatcctcatcaaacatccgccgttgtcacgcttcatggccaactatttgttcgtgcaccatttgggcatgctgatatgtagatagtttcctttgagtgcagataccactggcccggtggtatttctggaattctttataggtttgtgattcaccgttgcatctatcccttgcttcaaattaagctcgtcatgctttgatatcaggtattctgtttttcatgcaggctttagacaattttgttgcagaagcaagtttttgtgtgagcagacgctcaatgccgagctgacaacggaattttgctgtaatcagtagcaagacttggggatctgctataatagtattgtttatagtagttgacataagtaggctggtttattttggtttgacctaccggagatttttgttttgttgtttatttttagtcggaagcagagtatatcaaaatagagagatgaaaataggttaaatgaaagcttaacttctttattttttggaaaacaaaggattagtttcttaacattattatttactattttcatagtaatgtttataagtgcctctgggcaatgcttgtccttaagcaaattttttatgcttgcatttgattcctcgtcccaatggactattgaattctaaattttgttgctggctatcatcgaatattaaggtccatgttcttttcagctatttcactagatattgtttgtggattatttgtttcatgtgtccaaaaatattgaagctgttgctaacttttctctaaaatttacatgagccatctctaatgaatttcgttggatttggtgaaaaaaattccacatatacaatcttatctacatcgaatttataccgtattagattacctgatagaggcattattttccaatgctattgggtgggttgatttgatagacttcttttgcttttgataaataatagcgataaaaataccaaactaaaaccccttgaaatcaagggcagccccatcgtttggcatacttgaggaaaaaacggaacggcatatttgcaaataaaaaataattgtgaataaaacttttatatacatgttttcaacaatccaaaagcaaaggctggaaaataaactatgatgaaaaattcccaaaatcaacttcaaatttaaggttgaaaaatttaaattttggttgataagtataatcgaaaagatgagaatgcgaggttgcgttcgttggaatgagttgggaactaatcccttgcacacaaatggaacgaattgtagcgtatgattaattaagtattagcttatttattttttatgagaaattaattaatatgattttttaaagtaaatttcatatataaactttttacaaaaggcaatacgttcgagatgtgaaaaaacgaggaatgtgagttgagaaagccggcaaaagaacacatccctaatagctccagtaactgagcccacttgtaactgcgatcctacggcccaactcccagggcccatcaattagtagtgaaacaaatccggtggtgggcccgattcgcaattcgccaaacggcagggacccgacgcgaccgcatcggcatcgcggcagcggcagcgtgcggtgccgacttgtgggaggagccgcctcctccgcctccgactatataacaaaaatcctcccgcacccccggcacatcgtccccgctagtcgccgccagtcaccaagccccgagcccacccccccaagctaccagcacagaacgaatcggagcgccgcgccgcgccgcgctgcgtcaccggcgatggactccgactacggcgtgccgcgcgagctctcggaggtgcagaagaagcgcgcgctctaccagcccgagctgcccccctgcctccaggtccgcacccacccattgccgctaatcctccttcccctgcgtgcgacattgcggtccctggcgcggcttcccggccctagatctgtgtgcttccggaccgcgcggcgccagatcccgcgccgctccggcgtccggatcagtccatctcaccggcgctggtcgtgtatactgttcgtctgcttccgatttgatttctcgggggtcttaggccataggtttacgtgtatcagctgtcagtctgtcactcgttttcggggaaccagattggatctgaatcgtgctggacctcgcctgcgaggtgcagggctctgtctagcaatgtactagtagatccaaccggcgtgcctggcttgcgggaggctgcgtgcgcgggggaatttttttttttgaaagctcgttttgccgtgttggtattgtcgtgttgctgttttatttatgagtttagtagtggagcgtagcaacttggaataaacagtagatggattgattcgtctacagcaaccatggacttttctttttggactagctttcacggtcctgtgttgtgttgtttacttttgtggtgacccatgaatcgctatcaaatcgtaagactttctcctgtttagttatgctgtttgactggtggctggatcggatgaattcatgataattttgcgaatgattttctcgcgtgcgtgtgattggtggtggatgaatgattttgtgaattcacgctctgaatttcttcactccatgtaaatcagggcaccactgtgagagtggagtatggtgacgctgcaattgctgctgatcctgcaggcgctcatgtgatcagccacgcgttcccccacacatacgggcagcccctggcccattttctccggaagacggctaatgtccccgatgctactgtcatatcagagcatcctgttgtcaggtatatatgtattttttacttgtgatattcaatttttttacttgatatgccatctgctgcaagacaagaaactgttttgaaaaaaagaaaccaaatactagtagtaaagtatttgtcaaattataagagaatgctggagagaaattacatcaaattatttgtcttcgcctctcactgcctgcacatataagacatctgattgttttgttttggatgcagggttggtgttgttttctgcggaaggcagtccccgggaggccataatgtcatctggggactccatgaggcaattaaggctcacaacccaaacagcaaacttattggttttcttggtgagtcctttgatatgcaactatgaatgtattaatagttcgttccctttgttctcatgtctgcttgttgcgtccaatcagactttcagcgtttgcttaaatagcttcacaagctacttagcacactatgtgttgtcgacttcccctagcagccaccagtgttttaatttgaattaactcagcatttttgttatattttatttgttttcattaccttagcaggtgatcacaactgtatagcatcaatacatcatttagtatttttgtcacataagtagtgacatctaaagctcttcaaccgaactttgctaggtccacttaatgaaattaacaacacagtgacatacctatactaaaaaaaaaaaaacaatcagtgatgctttgctacaagatcttggacagagtacctatctttcttaagtgtctaatccaaatcaaatgtgttaattttgtgattggcatcctgtgcatgaatccccccaaggcgggcttctgtctctcatgcctgcttttctgaacatgtctaacacttggagctaatgcttacagattttctttaactgtttcttatgtttgtgtttatttcgttcttttgttgaaacaggtggaagtgatggtcttctcgcacagaaaactttggagatcaccgacgaagttctttcttcatataaaaaccaaggtggttatgatatgcttggccggacaaaggatcaaattagaacaacagagcaggtcaatggtgccatggctagttgtcaggctttgaagttggatgctttagtaatcattggaggtaggctttgtggcattagtctactaaatagctacattgtgtatattttttttaatcctaacatctgtttaatttctggtttctgaaggtgttacatccaatacggatgctgctcaacttgctgagacttttgctgaggctaagtgtgcaacgaaggtatatcataattcccttttcttgttgcagtccgtgccttggttcctgattccctatttccattgcaagtgtatgttttacttgcctgtaaatggcatgacacaatttattattgaacaggttgtaggtgttcctgtaactttgaatggggaccttaagaatcagtttgttgagacaaccgttggttttgataccatatgcaaggtagctttacattactatgctggggctccatttacctttactgtccttccattacctctatatgatgcataactgacctgttaggcatgtttggttttgtcaattgaggttgtttatgtatgcgaaagtgtgttttttgtgctatggataactttccaagttgcccattcaaaaatactacgcatttaatttaccactttgcaatttttatttattgttgaacttatttattattataacaggtgaactcacaacttataagcaatgtatgcaccgatgctctttcggctgagaaggtaatatctaatatggttgatccgcttcttctttagttggatgtactttcgtgtctgtgatactatttagctatggtcaattcctttatttttttctcagaattaaataatcaaattgaattgagacagtaaaaaaaactctgaattgatactgttaagtcccagtacagaaagagctaaacaaatatagaacacgggctataatttgcggttcactccttaattcggcctatgtgggaggttcacacttcacacacaggtgtacacaatctttgtataggcaataaaggatgccaatactgattgataacaatgcaaattcgcctaggtccattagacaactgaattatcctttttcttggggttccatggtccatttgttcttcagtatttctctcagcgtggttattcagtagacatacttttccagcaaggcctgctgagccttcctgtttacaaattcacattacaaaagtaacaattttatatgccttgtggttgtattctttctggcagtattactactttattcgcatgatggggcggaaggcttctcatgtggcattggagtgtgctcttcaatcacatccgaatatggtttggacttttcaacttttcgcttatgcttcctgagttgctgcaaattcttcttgcatttgtttgaacctgtatcatatgttcaggttatcctaggtgaggaggttgctgcatcaaaacttaccatctttgatatcacgaagcagatatgtgatgcagttcaggcaagggctgagaagggtaggggccttctattgtgatatgctcatgtaaccttgctttcaccaatgaaatgccattttgtgaaaatttatgaatttacttaaccttatatttgttgcacagataagtatcacggagttgtacttattccggagggactcgtggagagtattcctgaattatatgctttgcttcaggtaagtttgtacatgccatatggctattcatttacaacatttctaagtggcatctatgtaattgtaggaaattcatgggcttcacggcaaaggtgtttccatggagaatatctcctcacagctttcaccttgggcatctgcactatttgagtttttgcccccatttattaggaagcaggtgtgtattgtctgatactcatctatcaactcttggacattcataactctcatcaggtctctgatattgcattgttgttttctgatgcagctgcttctccatcctgaatctgatgactcagctcaactttctcaggtatattatagtatatgcagcaatactttcagtcatttgcgtatgctttttttgtttcatttcattatgtctgattacaacctccacatggttaccggtgcagattgaaaccgaaaaacttttggcccaattagttgaggatgaaatgaacaggcgtatggtatgctttctgcagcctttcttgtaactgtctcttggttctgaggcattactgatgtctcagtctacatgtggagtgagtaatatttatattggctcatgatgttcttggtatctctgcagaaggaaggcacttacaaaggaaagaaattcaatgcgatctgtcacttttttggctaccaagctaggggttcactgccttcaaagtttgactgcgattacgcctatgcaagtttcagctcacctttctacttggacaaagcaattttattttgctgttgattaattatatgtatgttgtttggcttcaggttcttgggcacgtgtgctaccacatcttagctgctggtttgaatggttacatggctactgtgacaaatcttaagagtcctgcgaacaaatggcgatgtggtgcggctccgatttcggtgagattactactgtgcacccccttttggcaaaattagatgagtatgatatgaatgaagggaacacctaacccacaattcttttccctttagtctatgatgaccgtgaagagatggtcacgtggtcctgcggctactcaaatagggaaacctgctgtccatatggctactgtcgacttgaaaggcaaagcattcgagtaagtgtgtacacaatctattaatcccatcttatattcgatcgctgtacagttgctgtcattggtctaaagaagatgcataatctcattgacaataacaaacttgtgtttacaggctattgaggaacaattctaccagcttcttaatcgacgacatctacagaaacccaggaccactccaattcgaaggagcaggtgctgattcaaagcctatttcactgtgcgtggaagatcaagactatatgggcaggatcaagaaactccaggaatacttggagaaggtactttccataatcccaataattgatcgatcttcgtatcgaacaatctgaattcctgtggacaaatggcacatgttggtgtctattctaactgttgttgctgcgcaggtgaaaagcatcgtgaagcctgggtgctcgcaggatgttctcaaggcagcgctgagcgctatgtcatctgtgaccgagacattggcgatcatgacatcgtcttccactggccagggaaccccactctgagtcaaatggattactaaatccacattcgcttgtgtcatctgacatgtggggttagaaacagtgatgttgcaaccccacggctttctttttcgtgttttttctttggagagttttgccatttttgagccggtagcgtgagtctgctattgatgtgtttggttggactggaataataattgttcagacagcgatgttcttaaataaaccaaattttggtaggcaaaaaattacagtttgtgtttttcttccctccttcgagagggttgcactggaggagtaatggctgatggtacataactcgtgaggccaactgcgtggatcggaagagcgctggtgtggaggatcaggaggcaaagctccggccgcaaggtttggccgggaccccattcgctgcgtaagccgaaaggccaaaaaggaaatttctagagtccctgatcgctgataaccgatagtattgggtctgttcggcagccctatacagcggctgtgcagctgctaccattgatcttctataaatttcactgtagcagctggctgccaattagagctaccgaacaggccaattcttttttgttggagaaacgttattttctttcccgatggcgaatccctactgttctcgagatacgttggcaaatgaccatttgataatccttggaatggtaaaacatagagcaggttaaaaatgcaaatattaaaaaattacctaatatcattttttcctatcaaataaataaaatgagtaagtcctcaaacccacgctggttagcccatcaaattgttgagggaaaggagaggacctgtcactcagttttgaacctttgaaccgaattaacgaaatattaatttttgttccaagatgaggttcttgttggtaaagctgcgccgttttggtttgatatcaaaatattgccataccaatgttttggtagtttaaatagtaaatgtgatgatttggtttaaagccaaatatttggtaatgcctatactcaatttagcacaattctagaatgttcttcaccacaatttaaaatttggctctcaattggcatcaatccaaagacactcatttaacttgcctagagtttggcactaacaatatattggtagggtactaaaccaaacaagcccgctctgtttttacccatttttcttcctcttggttgaatcttcaagaattcccttccatcagccagctgaacatagtattattgtgtccaggtccaggcagtccagctgaacataatagtattactgtgtcacactcttgctaccttctgaactccacaagtccttttcctcatttgtgtgacgagcattcaggaagtttagtactttagttcgcagcgtgcagccggaaggactgcccatatttccataatactcctatttattaaagtaccgtcatagctctagtacagacatcctacgtgcaagtgtacaacaatcattggcgttaatacccatagaaggattaggtataggtcattttcgatgggtggaattcttgaagttcttcaaaccggggggagtttaacacggtttaacagcttgttggttgtgacagttttttttccccacctaaccctggctatgatcatatataacctgcaattctaaaggcttaaatttacccaatcgaacagcattgcgcgctggacgcctagatttagtacaagtggtactacaaatctaccatctgtttgcccatgatccatttttacgagacagttgtgtggacctttgtgcgagaaaatctgcattcctcccctagccggccatccatgcatgtgccggccacagccatctgatctagccgagcaatcaatgcgacagcattgcacggtatcgattgctacagtagccgctacatggcatattggcataggttgtgtttagtttcacgttaaaatttaaagtttgaaaaaaaagttagaagtttatgtgtgtaggaaagttttgatgtgataaaaaaattagaaattttttaaaaaagttagaaactaaactcggccataaatcacagggcgtcccgcagtcacagtgacgtcaccgttggctgcgtactcggtaaccgcaaagttcagaccttcatatgtgagttgtgacgccgccgaatgctgcaaaaccagccggtctgagtacgggcgtgggacgcccctttttttctgctacgagtagtggatgaaaatttttatcattgtgacatattttttaaactaccaaacaatatatttcttacgaaagttattctaaaatattagataaatattttttaattatacattaataccatcttatttaacgtaaaatatttaattttcatttttattttcatttccaacaatattttcatttccaacacaaaagaacaccgcgggtcgctttcctgatccgatcccgtttcttttaaaaaaacacgatcccgtctagtcatgtccgcatcttgcgagtcagctgctgagctaatcaatagcggcaacagcaacagcgagataaatcacggtaatcacagcaacagcaacagcaacagccggtcccggtttgcactgagaaatcactcggttagccagccgttcgaatccaaaataaaaaataaaattaatcaaaacgcaatcattttggtactaaaatttatcggcaaacttattccgaaaaccctgcgtccagcttacctcgccgattcgcgctgatccgcacgaacgggttcgtcgtcgggcgcacgcacagcacaaccatcccatctactccatctcatctcccttattccaagggatggcccacctgtcagccgcgccggctataagttggcagcgtggggcactgacaggtcaagcccgcgagccacagcggagacgacgcgacgacgcatcgaaatcgcccgcgacgcgagagagaggcggacaatactagaagcatccctcgacgcgagacgcgacgtctctctcgtcgccagcggcggcggcggatgggggcggggaatggtgaagtgcggtacggcggcggcggtgccggcgccggcgaggcggcggtgatggcggacgacgggaccacggtgttccgggggacggcgcagccgccggtgcgcaccacggttgcgctggcgctgtggctgggggccatccacttcaacgccttcctcctcctcgcctcgctcttcctcttcccccgccgcgtcgccgccatgtaacctcttacccaaatctctcctccagcttcttttccctacctcgcgctctgctcgccgttgacgggttgggtacttgggtctcactctcgcctctccgcgctgtattatccagggtgctcgccacgcagctcttcttcatgttcgcgccggtcaatgatatgagcaggttggggcgcaagatcgccaggttcgtctcctcgatttcctcggctgccaacgtttttttacctgaccgcattgttggatcttacattttggaggacgacgcatcctcaggttcatcagcaagtgcgtgattgggtacttccccgtcacattacatgtcgaggactacaaggcttttgatcccaatagagcttacggtgagcttcctctttatctcattccatctctggaatcttgattaattcttgaatcacattgatgattgataccgaggcttttcagttgattcctaaagctaaacagaaacaactactaaagatgatattgtgatacttgaatctttttaatctttaaagtatcaaacccttttggcctatttctaaaagctaagtaaaggagtagtaatatatagaaaagtatggagtcttttatatagagggcactgtccactgggttggtgattatattgtgctgtgcttgcagtgtttggttatgagccgcattctgttttgcccattgcccttggggtccttttggagcttgttggattcatgccattaccaaagataaaggttcttgcaagcagtgcggtgaggttcccacttcccagatttccttcctaggagtacattcttaagagtttgatctttcgacactctattactacatatgctatttattgtggctgcgaacatccatctggatatagaggccaggttttaatccattttctaaataaagatatgctctttactggtgaattggtcggtgttaggtgttctataccccattcttgaggcaaatatggacatggttggggttggttcctgcatccaggaagaatttctactcctaccttaaagctggttatagctgcgtcatagtgccaggaggggtgcaggagatgcttcacatggatcatgattcagaggtaactgcggatttcttcttttattatcaataaagacattgccttctttcttgtgcaaaaccaagtgaaatacttacatcttttaccggaatagtgatggttaatttttgcaaatgacaggttgcttttcttaaatcaagaaaaggtttcgttaagatagctatggaaacaggttcccctttagtccctgttttcgctttcggacaggtaatctactcttgcacccaataagttcataaatgcaaaattccttatccatatagtaaatttattcatggtattcagtttgctgatttttttttggcactactttgactagagctatgtttataagtggtggagaccaggtggcaaattaattgtcaaaattgctagagcaattaaatttactccaattatgttctggggaaaatttgggtaactttctgcagtttatatatattttttcaatattttttatttggtcaagagttcatatgtccttgcacattgtgatgcaggactcccattccgtttgcgacacccatgcacgtggttgttggaagaccaattgaggttaagaaaaatgctcagcctacctttgatgaggtgaaatatcatcttgacattatgccaagtacaccttttgatcagtctgcacactaaaaaactgaaattaaatgatgttctaagataaatattaccatggaaagtaggatcttttttgttttaattgtttttgaatggtaaaaaaataaaaatgtatatattcttacaattaaaattgggtaattccctgatgtggcagataaatgaagtccatgaacaatttgttgtcgcactacaagaactgttcgagaagtacaagactaaagctggatatcccaacctccatttaagagttctatgatggcttctgtaagttccagcagtaagctctaatgatctggatttacggaataaaatggttatgctgttaggccatcaattcaatccctcgtagcactgaagctggagtgtgttcagttcaagagccagaatcagaattcagtagcttcagacatgattcgccacattcccaacagcagttcagtaaggcaacgtattgactgacgaattatcctctggtggtttggctttggcagaatagaatgcattgtatgtaaagtaaatgtgtacatttgtttattactcacgattctctcacatcattatcagcaccagtgattgaatcgtgcacagaaggggaaatctcagggttcatattcacagacctggtgtacttccaaagctccaagttagtgcattggcagcagcagctaactcgagctgagagcattgtgtcgtcatacagaaaacactcaattttctgtaacaatatttcacaaaataaagacagcgaaaccgcagataaatcagttcaaatagtaaagtttttaacaacctagacttgaacaatatcgctgactcgggcagagagcattgtcgacttgtcgtcatacagaaaacacaatttctgaaacaatatttcacataatacacaagactgccaaaccgcagaacaatttgtacaagttttaacgatcaagactgataccgctaactcgagcagagagcattgtcgtcacacagaaaacacccaatttctgaaacaatttcacataatacacatcactgcaaaacagcaaaacaatttgtacaaatagtacaagttttaacaatccaggcttacacaacaccgataagaccccaaagcatgggtttctcatccgaactgatttattttggtcggacaacaaagtgccgttctcggaagtcgaggaactgctgagcacatagcaatgaaaaattaaacacataacaacagttctgataccgataccagtaacacaatagacggtagttctgataccgataccagtaacaccatagaagatagtcctcgtgacctcgctaccagttggtaacgagtaacgaccctgagcagttccggtagacacttgggttacagatacaggaggaaggaccatcttggtccaacattttggacatgatgagtgaagcggacgcaataactatttatacctccaaaggccgatcaagcatagatcacgacgatgaccatagacagacacaagactgacgggacgggctacatttgttggacttgtgccagacttcaacactgggatataatcaaccacatagtagcttgatgattcttcaggagtttaggtgaacaatcatatgagtgcatcatgactaatccaaggggattagtcatcttacagagtgctggactccattccagcatccagtatatctccatgggctaatgagctgtcagatacaggatcaataatgctgtatctagagcttcaagctgcagcaatggtcgcagtcccattgagacataggatgtaaccaagcaaaactgacaagagcaaccgttgctcttggatcattgtcccatccatcggggcaacatcatgattccaggtacatctgatgaccatgataagggcaacctgcagaaatttcatagcgaagattatcataataatcaaaattacagaaatagaactcaggtcaataaaatgaaaacttgtatatgataaaaaacaagatgcatgatcacattagtatacacgtgcgggcacatgatccaattggcttacaataacttcagacaaacacgtataaaccatttcccaatgttttgaaacaagaaacaaagaaagcctgaagcaaacagaaagaatttctctgggaaatttttgctatttagtgtcgaccatatcatatcacaagcaaacagattgattaagattcagttggctgtttagtctgtatgttcagagtaatgatgaacgccatgatgccatcaatgtacttatcttctgttagatgcaaaactaatctaacatcaacgttaagaatgaatttcctggtttggtttcaagttaattatgggaaagcatcacccagtatcgaatgcaatactattggagcataataggagatcctaaaaaacataacgagattaaggagtacaacaatgagaataagagacaaaacacaagcatattaacatcaaagtttgtcccttttgagttctgacaagttagaaccaataggtaactccatcattttgttctgaaactaaatgcatctgaacttctgaagggcagaatattgatggactaatttcccataagagtaagattggcattctatgaatgtaagcatggcttctcagtacagcataattggtaccttatgaatgcaagggggattacttgccaggtaagaaccagtactacaaatacagcagcactgctcttttgtcctgctgcaatctaagggtacctattagggacagaaaaagaacagttactaccagataatcacaagaaaagataacagcagtccagacagaacaaacctcaaggtacaaatgtttggcagcatagttcagcttgctctttggtctgaaccactagcctgtgtaaactgaggtgagtgagctgggaggaccaagtgcgggtgagtaggaaccggtgctgctacaaaggccaagtaatatgaagttattcacaaaaggagaacacttaagcagacactataaaaagatgcagggtgacgaatgaacgatagcatccatgttagcctggtaaatttggtgtgagaacatatagcataacacagtattgtgttttctggaaagacaagaggaatcactaaatactaaaaaaaataggcaaagaagaccacattaccaactaaaaagggggcctgaatggtgggccgaggtgtaggcgatgcactgctaaagtttgatccagttaactgtacaaatggatttcctggcacattgtaaccatgaatagccacataaccattacccccaccagaaatggacgggctgaactggctaaatggttggctagcagtatttgctgcggatgaaactccataaattggaacatattgctgaccaacatatgggtttaatgtaccctacaaagagatctctcatcagaatcagtcgatgctttgtaaaacccttatgttgcgcaaggaaaattaaacgtaatatttttcacacttcaacctgtggatagatgtattctgtcccatatgtagtgtagctgcaaaaggaggaaaatgaatgaccgaacacactttattgacttccaaaacagcgatattatgttccacgaagaaaatgaacatatttatttggcaattttcgaagaggagcagaaaaaaaataggatgcaggctatgcacaatctacacaaagtaattgccacaagattatatgccaaatgtggacgcctaagtaagaactacttgaagattgtcacaaatgggccatctaagagcaggaagctgcattggaaaagttaacacatcatacctgtattgcggaaccgggaatccttggtaatacccaagaggaagtgtccggtgctgaccataaccccctacataaacaccccttggaactggaacgccaaagtaggacccagctgatcttggcctccctgaaaagattgtgcatgtattcagaacaaatgcttacagaaatagaactattatcaccgcatgagcacttccaagaactgtttaaggtaccaaaatggtatattagtagtcatcgtatcaccattaggggtggcatactgtaatttgtagttttttgtttgcaaaacaaaacaagcacatgccaaacaccaacatcatcagtacttctgttcaaatgaatgctcagtatcattttagctcacctgtggtgttattttaagtcccaaacccacttgagaaggtatatagttgactgtacctatgttcacttgattatcaatttttcttctttccatagttgtcttattctaggaggacgagtgcgggtaactaaattctagagcaaacacaatgtagaaccgatcaaataagtttgcagaaggcaacacaatcataccacagataccactgcagtaacttgctagcaagcaaatcctcacggtggtatcaaaatgtgctcataatctactcgaataagttagtgcaaatcagtgtcaaggcagggagatcaataccgagaggaactgcaggctgagcgcggccaagcgacgccaggttacaattggcacgcctgccgtcgatcaccggcgtcgggtcctcgcatgccttcctcgccgactcaggatcgcggaacgtcacctgcacaaggtcaacatgacacttgtataagccaaccactgtttacagccagcaattccacgaacaaacaaacaaacacccggaaaaagcaggatcaacagcggcgaaaaatcgaagggcactgacgaagccgtagcccttggagcggccggagtggcggtcggtgatgacgacggcctcgaggatctccccgaagcggtcgtagaagcggcggagcctctcgctggtggtctcccacgcgagcccgcccacgaacaccttggtgtaggtggtgtccccgaacggcgacgccagcaggtgcagccccgagctggagctcgacgccgacgccgaccccgaccccgacccctgctgctgctgctgctgcgccatccggcgagctacgcagcgatcggctggaatcccttcgaggatcggtggtgcgggtgggctagcttcgctgtccccctctccgaccttgggattggagagggttcgcgagtgggagcgaatcggcggtgggattttggaagggggaaaaggtgggcgagtcggcggaggaggggaaaggggggattgtgactggggccgacggttgggttggcgcgccttcttctgctacgggaacccaagtcacgttcgtttgccagcgaagaagccagtgtgtgtgacagtgtaagagggagagagctgtttgggtttttcaaatggatcacgcggttgacagcgaaattgcgggcgcttcgaaatattagaaacgaatttggaatcgaagtgttcgtggatgatgagcaaatttgctacttgtcgtaagttttggtcgatataaggtaagttggattcggacatgtttgagtagattggcattgcgttgcatcacggtatgataatataattttaaaagttcgttgcatgtttttcgcgtttttatactgttcatatgatctcagttagcatgtaagcaattgattttatataaaacaagttgaagagctacatgcctcttctatttggattcaatggatgtgatgtgtcatttttctttaatttttggttcaaggatattctgatgaggttgtatttataattctaacaaaattaattacaaacatgtatattagagtatatataacatgtaacttactagctatttctttgacttaccaagtcatgagaaaggtgtttttaaggattaattaactatctctatgcgaaggagaaaacatctccatactaaagtggaattgagatgttgaagtggtgttatgctaagataaattactaccacattttccataaatatagggatttctaactatacacttagatgaatttttataatcgtggatagatatagtacattcaatatatctttatacatgatagtgtggttgctgcagtaaacatagcttttcctatagataaattatcttatccgtagaatgacatgaaaaaaagttagggctaaaaattactcattttatcttatccgtagcatatatagagtacgttccatacatccatcttgatacatgatagtatggctgctacagtaaatatggtagcttttcctataaatgaatcattttgtccgaagaatgacatgaaaaaacttagggctaaaagttactcatttgatcttatccgtagcatatcctattttactcactaagttgtcgcaccctttttacgaaaaaagagctaaaagtagaagttatatagaagacctaaagtatgcacttaacacttctaaaaacatctaatgtagtataatagtaacacacaacaattgtcgtgaaacatgtacttcttaattctttatctttattcataagagaaattcaaaattactttagaaagttttatgaccaccattatattgtgtgatcagtaaaagtcctgtgaacgtatgaaataatctcatacgaatttgatcaaaaaaattttagggaatagatcatatactgtactccacctgtctcaaaatatatgattcgtagatatataacttctcatactaaattaatttattttggacgaagtgaatatttgttttaactatgtgccttatgataaagattctgtgttcggcactcactgctgggaacatatatgttgcgcacgaaaaatagagcggtccattagcgcgtgattagttaagtattagttttttccttcaaaaatgaatcaatatgattttttaagcagcttttgtatagaaactttttgaaaaaaaataccatttaacagtttgaaaagcatatgcgcggaatatgagagagaggtgttgggaaccaaatgtaccgaactgggggtttggatggaaccatgtcacatcagatgttggacactaattagatgtattaaacgtagattattgacaaaatccattccataactctaaactaattagcgagacgaatctattaagcctaattaatccatgattagtctatgtgatgttacagtaaacatgtgataattatgaattaattaggctaaaaaatttgtcacgcgaattagctctcatttatataattagttttgtaagtagtatatgtttaataatctaaattagtgtcaaacatcggatccgatgtgacaggtactaagatttagtctctgaacccaaacataactgcctagtcaggatgtaaaatatttccaaggtgagcagtgactgagaccaaaatctcgcacaccattcccatgctcgagcgagttcatcacatcaaccacacatttcatcatagattaccgagtagagagtgcttctcgttcacacttttccaaacgatcgactgcataaaagagagaagaagaaaaaaaaacacatttctcgctgagctccatcgatgacggatgactcacactgctgacaaaagagcagatttgcaatttgcaaacagcatcggacgtggaaaacgcccgagcctctcctgtctcctcccggtcttctgcttggaagaaaagaaagaacccgccgcccatccgcgcgcgggccccgtgccgttccccctcccccgcccacgcctctgcttgcggcttgccgcttagatccccctgtcctgtcctgtcacgccgaacatctgaacgcccgaggcgagcgagagagacaatcccgcggtcacctcccctctctctcgctgcgccttccgtgtacaccaccatcacaccctcccgtccgtccgatccccccctccgatcgcgtaccgagcaaacacgcacacgcacagccgggaggggggaggcgaggtccgcgtcgttcgcgatcgccttgggttgggttgtgtctctctctctgtctccagtgatcctgggccaaggaggcggatggacgtgcgccggggcgggggcggagggcgcatcgtcggggcggcgcggagggcgctcacctggggggcgctgcccctcccgatgcggatcaccaacggcctggccatggtctccctcgtgctctcctcctgcgacctgctccgcctctgcagcgacagggagcggcccctcggcggccgggagttcgccaccgtcgtctacctcgtcagcctcttcgcccaccctgacgcccccgccaccaccaccggcgacgacgacgacggccaggggggctcccgccgcgcgcgccccgccgccgcggagcccgcgccaatgcatgggcatggtggcgggatgatggaggccgacgacgaggagatcgtcgccgcggtggcgtccggcgcgctgccgtcgcaccgcctggagtcgcggctcggggactgccgccgcgcggcgaggctgaggcgggaggcgctgcggcgggtgacggggcggggagtggagggcctccccttcgatgggatggactaccaggccatcctggggcaatgctgcgagatgcccgtcgggtacgtgcagctccccgtgggggtcgccggcccgctgctcctggacggccgcgagtaccatgtccccatggctaccaccgagggatgcctcgtcgccagcgtcaaccgcgggtgcagggccatctccgcttccggcggcgccttcagcgttctgctccgggacgccatgtcccgcgctcctgctgtcaagctgccttccgcaatgcgggcagcggagctcaaggcgtttgctgaggcgcctgcgaattttgagttgctggctgctgtcttcaataggtacactccacatcatccactaatctagtttgttgatttgtgtgcttgctcaaagtgttataagactttgcgcgacaataggcaggcacagtgttaattaatgggggaaaaatgtgatctttcagtgtatcttaaggttgtcgtcttatgtttgagtaatggactgatgttgatagctagcactgaatggtattttaagaccaggtgatttcccacaacggaaagcccttctatcatgtgattgctgacagggtagagcccacagtgtgtaagctagcacatgcactggaggtactggacaatgcattatcaatactatgtttacttgttctaagagctaccagctaaatgcagataatgccagctcatagataatacctttctgaagtgttcaccttgaattgcctttttatgttcgcttaaataataccgaatgtgaatgaatcattggtttgtgctctccaaacttgagaatatgtggatttaagatctcaacctctagtgtgtatctttgcaccttcagatgttcagggactcagggtacacacatctactgacagtttacggtgttagaattttcagattaatgtcatttgtcttttggagtttttctgtgttactgactagtaactgtcgctctgtagtcagtatccttagaggatctattgtctctctctttttttttaaatgtacgatatgttgttttgttttattttgttgtctggaacctttacgtaattgtaggctcatgttcaaaagctttggttactgtcattaagtacactttagataacagtaggcttgtgttccaataagttattgttggttttcatgtttctaattaatgtatcttttcttacattgttttctgtcatttgagagtactgagaaaatatggaggtttttattgaatctctttaaaaaattgtggccgtgtgtttcaaagttccaaataggtccaacagttagttcctaggtatgctgcatttagtatactttcctaatatcctcacttgtgctattttaccacacaagccacttctgtgatttccacaactttgttgtgcagatttttcatattcatatttttctttgatttttcgtatccagttattcagacactgtacatatcggcatattattctaccagtcaaagtcaaaggtgtctatacatcttatttgatttctgatcttttaaactgtacaatgttttatagttgttcttggcagctagaaccatctacccaataccgacgcaactctatgggttgcatatatgggcaagtgtcatggttccatggatacctttttgcatagtgtattctccagggacttttccggagctaagtgtgagtttgccattgacattgttctttcaacctctgcatttcggattgcatatgtttcagtcttagtttttgatgtggcaaatgtcacacaatatggttgctatacagtgttgatttggtactattgtttgaagatccattatactgtgagaatcaatctgtttgtacaacttatctgattgttatcctcctctgtgccctatataagttctaatttagtaaatttcatgcatactttattgttggctgtgtacactcttgtggagtgtagaggccggaatgatatccattatctaaaaaatgtatactttattgtggaaattttcatttgagacaatcacgcagcttgcttatctaaggccccatttaatctccacatttggagataaattttggttgcacgtaaaacgagaaagctcattagcacataattaattaagtattaactattataaatttgaaaaatggatttattttcttttttaaaacaacttctatatagaaactttttttaaaaaaatgtatcatttaacaatttgaaaagcgtgctaacggaaaacaaggaagttgaagaatagaacagggcctaagtcgttcttacatcatcctttttttttcttttttgctctattgtttcgcttccttagtagaaccaataactccatatagaggtcatcttctattagaattgacataaaaactgttttaatcggtgtaggtccagcagatttggtaggcttcaagacattcgttgtgcactcgctgggaggaacctatatatgagatttagctgtatcactggagatgctatgggaatgaacatggtgtcaaaaggtgttgagaatgtcttgggctatctgcagaatgtcttccctgacatggatgtcatcagcgtatctggttttaactcttccccttgaactttgcatgcttcagttagttttgctttcctctctaagtcaatgcctccttttagcagaaaacgaataaaaaatcacattctttaacttctgtttggaaatgttgcgaaggaaatgatgaaaaacatatttcatcagcacccaaaatatttcctctcctattgctttgtaacttaaagaaacatgtccctaattagatttttccgatctagagaggaaacccttggcttcatttacagaaagcagatatcggttcttagaagattcagcaggttataagatggatttttttcatccctaagaagtatttttggatgcctttttatttattttctgctcattgtgcactagcctagttcaattgtaaaatatattctgattaccgaataacagtgaatgtactacttttcatcagactcgcatcaaacatggtctaatattctctgataatatatttgcgtgtatcaattaggcatttgtgccgggggtgctttttttgaaacaatgggtgttcacactatctgttttcatcaattcaccatgtattttcttgtctttgcatgcacattgatgaattaatctgtgtgcatcaggtaactattgctcagacaagaagccgacagctgtaaactggatagaaggccgggggaaatctgttgtttgtgaggctattattaaaggagatgttgtgcagaaagttcttaagacgactgtagaaaaacttgttgagcttaacattatcaaaaatcttgctggatcagctgtagctggggctcttgggggttttaatgcccatgcgagtaatattgttactgcattattcattgctacaggacaggatcctgcacaaaatgttgaaagctcacaatgcatcaccatgttggaagaagtaaatgatggagatgatcttcatatctctgtcaccatgccgtccattgaggtgattatttattcgttttactttccgttcctacctgcattatgtagattatagcataacctgctagccttaaatggagctgcaaaatctatagcatagagatcttcttgtattaactgaagtaatattttgttttagcatgcagtttgatcgtgagagcaatatccgcatcgatttttatttatttaatttcttcatgttagtaaaatggttcattttttctctcaggtaggtacaatcggaggtggtacatgtctggcctcacaggcggcttgtttgaacctgcttggtgtcaagggttcaaatcatggctcacctggtgcaaatgctaaacgtttggctaccatagtagctggcagcgtgctcgctggcgagctctcgctccttgccgctcttgcctctggtcaccttgtcaagagccacatgatgtacaatcgatcaagtaaggatgtcgccaaggctgcttcttgagcagcccttcgcatcattcaaatgctggacatatttagacagggattgccctgagcttgtggagaagcgaatgagcaatgggcttgtacatactgctgataagagagcgattctttagttccaaactcaacctgtattatactagcataatgtgtgaggaggcattaacctatagtgcagcttctgactgtaattttacccttcagttttttttttcattcttctgtaaccaatcaaacttatttttccattttttctggatagcagcaggtcaggttaacttatgcttttgtgcagtatagcagctcagtaatttttgtttacagcatagagaacctgactgtgtatgttcattttactgttcgttctgccttttgttccctccatgtccctcagttctgaattttgtagcctgtattgcatcttgcctgactgcctgttgcctgtgaccgagtgttgatagtgtggatcaaatcagaacgccttctctttttattttttcgcaatggtgtgcctgttgctgtcaggtacttgctttgatttataaggtaagtcgaatatactggtccggttcgttccataagcacacagatttcaaaagccaaatgtgctgtgattccttgagctcacagatttcggtgcgaaaattctcgtgttcaatcacgcctgctttctattgttgttgctgaagaatatcctcgccgcgctatgctggttcctacgccgcactagaaccacttgaaatcttgaatgattctccttatctttaaccaaaatcctactcctagtagctaaataaatcctacctcgaatctacaagtgcacatataataacttctgttcttgtgtagtcgctttcaatacacaagtagaaaaggcagattggatcaaaatcccggaaatttccacgctgttgaagagaaaacgaacagtcttcgggccagatttgtagcccaaaacagcccataaagcaccccaacaattctcccgtcttctctccggcccaagagaccgaaatgaacagactttgggccagatttgtagcccaaaacagcccataaagcacccagtcaattctccttcacctcctcctcctccagtcctccaccgtccagcactatctcctgcaactgctagtgcaagatcaaccagccctcgcacggcacaaaaatacacaatccttgcgaaaagtttgctccaccaccagtacaccacacccccaatgcgcgatcacgtccgcgtgaggcacggacgccgccacaatcccgcacgcgacgacatcggagcgttccgcgccaaggcgatcgagaccgcgatcagcagctgacgcgacggcacgggtgggtggacggatgatggtggcctccggcctcgggctcgcgcgcgcgcggccacagtggccaacgccgctccgggacgcggcatccgccggcatcgtcacgtggccgcgcggcccacggccacggccggcccgtatcaaaaattcgatgtgacatatctcggccccccgtcccctccacccaattcgcctcgccaccgcgcggggccgtcgcccacgtgtggcgcgtgacccattccccgcggcgttacgtgcgctctctctctctctcttcctcctgcagtagcctgtgcggtgcagccaacagtagacgaatccccctgaaaaagaaaaaaactgtaggcgaatcccagggtcgacacctgtcccatatccttggcgtgacacttcacgcatggctttttctgatgccatttcatcattagttagggttcccaaggtttacttatgaataaagattagtaagtactagtactactcctgaacaaacaattatttatgtagtagaattgaatcatcgagccagctttatatatagagagaattaatactgtaagctttgggagccaggcaaattatacgaaatgacaggagacacaaaagaggcacaaatgagtacgtgcttacaaattaatgtgacaattgagaggttgcctgtctctaacccagattaggtcaccgcagattacgacctccccgcgggtggcaactgggcgcatatctcatatcatttcaagtctcttcccgaccgataaagtaatcaactggctgcttaataaggtcattaacaatcaagtgctaaagtcagacggcttcaacgaaaagattagcattatcatcatcaggttaaccatggcgccatgcacggacaagcgagctaccgatcgatcgagagacgcttggcgccgcaacgcgacaggcgagggagctagcacatgcccggcgatgagacagcgcgccgctcggattatcttaatcctgcccccctaatctaatctaatcactcctccccacttgcatccacgcagctttaatcagcctttcgcccaggcactaattcttaattagccggccggccatcggatgctgcctagctagcttagcttatctcttggccatgattggttaaggtgcagaaaatatttaatcatatcatggttctcttgctcccctgtccagtcgcgagctaattagcttaattagcttgactgcagctagctactaagctgatgtacattttttgctgtgctcaaattcgatcggattctgtggttaattaatcaaaactaaagcctagaaatttgcgtggctgggagttaattagtgttaacttattctgatgcactgtccttttcaacgcagtgagttattcccgaaatagatcgtgtgtgttcttttccggcggtagtgtatttttgcatatatatggatcgtacgatctgcagtttcagcatgcatgcacgcgctgatctgcgcgtacggaagggaatcggacgtggaagaaaaagatgaaacaaagctatgagtttcgccttttcacagatttgtatattgcttaagtacttttctggctaataagcgacatcatgacaggctttttgattctgtacgtacagattgattaattaacttggtgcctgcggctagctaggcatatagctgtagttgcttaattggctgctgcctgctttaaccattgtgcgccaaaacaggctgtaaagaatggttttctctaagattaattctggtcgtatagcaatactcctaagcaatgactttagttcatatcttcgtatatcgtacttcctccgtttcatattataagactttctagcattatctatatctagattcattaacatatatatgaacgtgggcaatgctagaaagtcttataatataaaatggatggagtagattcaaattcagttgtactatgctctagtagggtgtgcagactttgactatttagaggcaggcatagtgttatctggtactggagtaagatggctaaattagctatagttatttgagttcaatgaacacataggaaaaactgcacgctctccgaaataagaaaatagctaaataacaagtcatggtataaaagttaatataataattgaataaataaatcagtactccctccgtttcaggttataagatgttttgacttttaacaaagtcaaactgcttcaaatttgaccaagtttgtaaaaaataataataatattttcaattcaacacaaatttattatgaaaatatattcaattattgaattaatgaaactaattaggtattataaatattattatatttatgtataaacttaactaaatttgaagtagtttgactttataaccatgtcttataaccatggaagtggagggagtagtacaaaagttgatatatgaattaaatagtataaaaattaatagatatggaataaaatacggtctcgatatcacaaagctaccttatattctgcgacaaggcaaaagtaagattcatgcatgtattgcctctgaggatcttattgattaattagttattatttcttgtgcttttaaattagtagtaatatactccctcagtgctcagaatataagggcattcccaacccaatgactaggatggtgtctatagcattaaataaactgtcacctatgatgaaaaatgatgtgacaagtgaataaatgaggaaagagaaggaaaccatgtcttgcatgagacatagtttctacacaacatccaagacatcatgtgagataagtagcattaaatttaagtatagaatagtggtgtttgcattggaagagtagtgtctagtactccctccattccaaaatataaggcacaaccacccttaacccaaagaccaagaagtaattattatcatcttgtagtttggatcatcctcgtaaatataatgcatgcattcaataggattagataatatgagagtggaggatttaaaaaagttataatttaatgaagaagatgccatagttaattgcatatttgcatgcatgccttatattatggaacatgtaagaaaagtggttgtgccttatattatggaatggagggagtactagtttcttgatgatgtggagtttatggaaaccatatctagtgtcttaggttgggaatggcctaaaggaagtcgttttggacagcgatacggtctccaaaacacaactttgacttcttgtttctataaaaatattttattgaaaagtgatatacgtataccttcataaagtatttttcaagacaaatctattcatataatttttatatttttaaactcaacaacttaaaagttattcatgatttatattcttagggtttgatttaaacattgttctaaacgactttttttacgagtacgaatggagtaatttacagcaatcgaaacattgaatatagtcctatcttgcctgctggcggtgatattgcgtgtgcgctccatcatatggttaattacattattattcgatacattgatctttgcgaattttagaggcacgtacgccgtacaaattaacatcagtactggatctctgagctatatatccctctatgtccaacttgcggctgtatgggtgtgtttggttgcaagccacactttgccacagtttgccacgcctaagagcatcaccaacagccacccaaaattcaatcccctaaatcattttttttagatctctaaaaaggatttaaggtatgagaataccttttatctccaagagattcccaaaatttaatcctcaaaacaaaaaaagtaggccacatcgacaactaccaacagaatcgtcattcctctcctccactcacgctcgcacacgctgcaatgctgcatcctcctcacggctcctttcaggacattcagtgatcaatctctttgacatcataactgacagtttaagcattgaacaatgtttccattggcttcaggtacgatctgagtatttgccccaaaatgatatttcacttgattattaccacgatctcctgtattttacatggaaaaatattggttctgcaatcatcaacaatggggttttcagcccagaaaaaaaatttcagcttttttagtgtgaacggtgttaacaacttgaagttttcagcagcaagcagcaagatatttcagcagctgcaatagtacttttcagtactagcaagcagcagtttttagcagcaaagaacaacagttttcatcagccagcaaacaacaaatttccagtaccaccaccaagcagttctcagcaatagcaagctccagatttgagcagcagcaacaatcagaaatcgactccgaccgaggtgcacgatgattcgatgaaggccagagactgggcacctccggttgtcgccggctgctggtcgcatcgcatggggcctttgtcgcctgcacattaccggggggagcgcagcgccagtctgacgcgagagacaggctgtgctgcaggatgcggtagggtcgagggacgattggagatgaataggggcgacggccgattcgagtcggtggtggtgctgggggagcgccgacgaaggtccgcccaattgggttggagatgggtctggcgctgccgctgagaaaaaaatgtcgacgctggggaagcttgggggagccatggctgctttcccagacagctgcggggaagatgaggctgctggcgtgatggattgactcacaggtagacgaacgcacaaagaagaacctggtaggaaaattttcacacagcgcgcgcgaagtgcatgcggttgaaggattgggcgccgagtctcttccctacaagtggagaacgaaatatgcgggtttggaaacgccaagcttttaggggtgatttaggtctactgttggagcgattttttccaacaaaactcctcaaaactgatattgggaagagtatcgggaaactgttggccatgctctaaggttaggcaaatttgacaggtgtttggttgtagccacagttgtggcaagattcccctccaacaaattgggtcccacgtgtcaatggctcaaaaaagtgtggcaagattcccttaggcttagtaagttgtggctaacaatttgatcacctcaccttagacaaagtgtggcaacttttgttggcaagtaatggtaaagtgtggctgggaaccaaacagcccctatatctataccggccggctgggcacttgggcagtagtactgctggactactggcattagtgcattaattagagccgtcagacaaattaacttagatctacgcgcacatcaacttactttctttgttaaaaaataaatacatcctgactacgaatctgaacctagcctatatccaaattcgtaatcagaagttgatgattttttcttggacggatggctatgtgcataaattaatgttgaactcgacttaattttccaccaaattattggtgaactagttaattactactcccccgtcccataatataagagattttgagtttttgtttgtattgtttgaatttgtgtaaatataaaaaataaaaagttgtgcttaaagtactttggataataaagtaagtaaaaaaataaataataattttaaaaatttttaaataagacgagtggtcaaacagtgcaattaaaaactttaaatcctttatattatgggacggagggagtaagtaccagcaagctactcgcgggccatgatagtaataatagttttgttggatcttaattatcattgagtttgctgtagatgtttaactattggcagttgaatacctgaacctaattagctgcaggactattcgcctgtacaagctggatatccggaggcaaatgcgtcaaactaaacaaagcagcggagctagtcgcagcgcaccaatcgtcaactctgaaagtctgaagtcgtcatgagttttattatccataacatgcaggcatggatcgattaccttagcactgtcttatatatgcatgcctggtagagtatagtattactacttgatttttcaaacctaccagaagaacatgcaacatgtatctataactgaatttgtttctcgctctctttctgcattcaaaacacaattttctttgcaaccagaaagcagaaaaccttacacgcatataatccgtactacaggtgagcacagattcccttttctttagttgagttgccgctcattgtttatgtccctgtacgtacttgacttaataaacgacgaaataattaaaggcagagctagcatgctcttgcatgcacagccaccaacagtgagaagaattaggtcatggcagtgggcatggcatggcatgtaaggcagtttttgtcgccatccacgcaaggcgtcacatcaaaatatagcttccaagtgtagctaagccgagttggcccggccatctagctcgcctgcccaattttataacccccctagataacttaatcataagctcgaacacataaacaatggtgtttagttgaggaagccaacaccagcactctttggataatgaactcttaatcaagtgcacaactgctcaattattttacaggccagtggagagatcgttccaacgcttttgtccaccctatgtacaattctatatctgcaaaaatacaagcgagagccaataaacccctgccatgtactgtatcgtttgttctggtgtctttgatatgctataaaacttaacgtaccttggaattggattggaagcatgattctcgtagcttcgattcaatactagcactagctagtaaataaatatgccaccaggaagagcaaactacccccccccccctcccctatatgtatgcgcatgaggtcactcatgggtgcattcatggacgatgtttgtcgctttaatttagaggcagagctatagctatatagacaacaaatcaacaatcactattcgctactgcaggataatgttttgatttgatcttgtcacccacccaaattaatactgcacagtaactaaactatggaggagagtaccagcctagctaatcaattaaacgatatccaacaacacaatgcttcaatcgcatgcatgttgccgatctatcagagaggcgctcgatcggcggcctcgcatgcgtaagtgcagtgtggcagcagcagcacgtactgcttgcgaatggatcacactgtgcgtgcgtgcagagtatgctgcaggcagagatcaataaaagagcgtgctagctagctagcgcgcatgcacgggaaagaccgagaaatcaaaggcgctggccgggcggtgatgataattgataatgatattgatacggatgcgagcgcactgtgtgtgtctcgttgcaacagggggccagcggccatgcttgcagcgatcgatcgatcgatgggatgagacatggaggcatgggacgagagagaggggttgggtaggcaccggcgcaccgcgcgagatacgtttacacaggcacaaccgctgatcagggaaagcagatggatatatcacttgcatcgcgtgtttgcaatgcaaatgcatatgcagtgatcacggagagagagagagagagtccaagtagtgaaggctgcagctagcacgggatactatacgggctatatatctagcttgatacagggggcgtcacagctaggtatacagagctcacatttgcgttatcttgctgcagacttgcaggaggaatgggagaggaagatgcagtgataaatagcagttacaatagcaggctattagccagttgtaaacatattttaatgagataaaagatgagagagaagagcagcgggctacagatctatagccagctacagcacgtacttcaagatacaatgtgtgtatgacatgtgggaccatatattaatagtatagtaagcaactattgtataaattgactattagattggctatatataaattgaagctaatagtgggctatactattaaacttgctctaaaacggccgtttgattcaggcgaggccggccgatgccagtgccaccgatgaatttggggatcgcgagagattgatgaggagggcgagatgggcttaactgtggcccgcgtgggcgtggccgcgagggcgatcatatcatatcatcgcggtggctgatcgatctctcgctagctagctgctcgtgctagtagatggtgaccgagacgcgcctgcccgccaccaccacgtgtctgacagctgtacggacggtgtagccgcccatcacccccacattgcgttctcgtttattttgaccggacgagagggtccccctagcttatccttgaccgcacgtgacggtgatctagctagctcttgcagctacgaggctcgatatcggtccaacggagtcctgccagatcggtgcagtagtactttttcttcgcgtgcgtactacggagaaaatcaaatgtacatatataatcatttcatcctaaaataaacaaatctaaaatacaatgcgatgtagtagtactatttgaagtataaatctgtttgtttcggctgatttgggatgaatcggaatggcgatgcatggctttaattttaccacaataccaccgtgtatatagatggatggattcatcttcatatatactagtactgtggagtatcatatgaccgagttaatttatgtgctccgatccagtaaccaattggttatttaatttaggatctaattgatgctagaagtgctgacatgcacgcgtgacatggcactgtgcacagcgctttctttaatttcatggtgccaggtctgcaccaattaactacatgcagctatatactatctccgtcccaaaataaatgcagccgtagaaatccgtgtccaacgtttaaccgtccgttttatttgaaaagtttataaaaaaattttaaaaaatagttacacataaagtactattcatgttttattatctaataacaataaaaatattaatcataaaaatatttcaaataagatgaacagtcaaatgttgaacatgaatagtgtaaaactgcatttaatttagacggagagagtaactcattcttaaaaaaaactgtgaaaaagaataatacaactgctagaggtatccatttgttgacatgatatgttatggtaccgatcactttcaagaagatggttaattaattacgtctgcaccgatggctgttttaatttagggcaaagtggcaaaactgatctataattgatgctacagctattgtaactagcagccgagaagttctgacatgcatgcacgcgtgacatggcactgtgcaccgtgcagaaatgctttttaaaaataaaaaataaatcatgatgcatgctaggccaggtatatgtaccaggtgcatataagagcaagtttaatagtataaccaactactagctctaaatcatctatagccaatataatagccaatttatacaatagttgtttactatagtattaatacctggttctatctatcatacacacattacgtcttgaagtccgtgctgcatctggctacagatttgtagcccgctacttttctctctcttcatttatctctttaaaatatgtttatagctagcttataacctgctattgtacctgctctaatgcaatcaatagttagctggtcaacagttaaacgatctcaagatatcatgatctcttgtcttttaagaattactccgaacaaaagagattcaacttaagagtgtccagcgcgtgtttgtggtacctgcgtttagagtcaaaatttagaaattactagtaacatgcttactccagtatgttactatacggccgctgtcaaaaaaagatggttaattaattggtgtatcaaagtcaacatgtgtactggcccatgcacgtaaaaaacggggaaaaaactggccgaccgaaagacgtactcgcctttggatttcaacctgttttgttgcgtgctagctcctcccttttttatatgctcgtgtagctttcattgacatatacaccattcatgtctccactctgctaatctgtggcgacgatcattaagtcactgttcgtgattgcgcggcactaaactaataccgctgcgtctcgagatccagccaatcaggccgtggtcattcaaatttgtttgctctctctcatgcgtcacatgacaatgacccgtaatccgctattaaaaattaattgaacacttgagagcatacgcaaagcgacaaggttatcttggcttctccacgccgagaaaagcctggtcacaaattgcaaaactcaagttttcgcccagctcgtttgattaatttccagttcctgaatgggacctctcaccaaaccggacctatccatgcatgccacatgccagtatttgggcgcagccgataatacctcgagtcgtccttgattagttgagaaaccacttcatttctaaagttatccaatcttggaattgtgaacagctgcttgtacccatgttgaaatatttccaaacgtaagccgatttcttatcctaaacaggctctagtacatgcagtttggtttaacggaacatatcaaggctagctctagaagcttgcgatacacagcgcatgtatataatcgttggacaattacgtacgtacagtgctccaaatgggggccaaaacggctgcgttctttccacaagtttcccaacccctttccatcgttttccgcgtgcacgcttttcaaactgttaaatggtgtgtttttttgcaaaaagtttctatacgaaagttactttaaaaaaacaaattaatccatttttaaaaaaaattaactaatacttaattaatcacacgctaatggaccgctccgttttccgtgcggtggagttgggttcccaaccccaagtatcaaacacagcctatactagtactaaacgaacccaatactcttggatatgatcgaatgaaaaagccttcatgcgaaacctagctactcctattttatacgcgtcctagctgcaaccccatactatatagtataattaaactacatatatataaaccgggcagattttttttaatataaaaaagcttcacaaatcaggaccggttcgtaggttttcaagtagtagcaggaaggaagcgtacgttgcatacatacttcctccgtcataaaaaaaaaaaagacaaactctagtttacgtgtccatcgtttgatcgtccgtcttatttaaaaaaattataaaaaaaattagaaagacaagtcacgtataaaatattaattatgttttatcatctaacaacaataaaaatacgaattataaaaaaaattatataagacggccagttaaagttggacacggagaccaggttttgtctttttttattttttttttgacggagggagtatgcaggtcccgtgtagtattatcttatgcggattgcttgtacttgcccgggtgtatataaaaatcaccggtacagtaaaaagcgacgacccaattgtttaacacgccttgtaggtccaattatttgcttgcttgtctgcctactgtccagtgactgaccgagccctgcacaccctacgtgacagcaccactaccctcgacttggcaccgatcgatcggtgcatgcacatgcaccgcgctgccgctaccgcgcacgcatttgggcggccgcctgcgcgcgagagcaacggcgcgcccgcgaatttcacgacgacccgcgtcgaccacgacgtcgtgggcgaacgcgtcgcgtgcagctgcagtgcgggcgcgtcccgtgggcgcgcgcgggggagggagacgtactccacgttttttatgttcaacgaacgcgacaaacgagtccacggcgcggcgggcgcctcgttcgctcgctttggcgtacgtggcctctgctacttcgggttgcccccacacgcgcgcgcgcgcggtggcctggcctgggcggggcaggccggcctttccgttccccgagcgagcgagctgctagtaaaaaccggggagttggtgtgggtgggattggcattgtatcgtgagagagattgatagagagagaggcggacctccctgaccttatcggcagcgccatcccatcccttgccgtccccccaagagctcacccctccgcctcgcttcttcatctcctctcctttaattcggccccgcgccgcccgcttcacccccatcctacaccgcgtgcctccttaccttctctttgttggaataacgatcgtttcgcttgctgctccggggaggtttttcttgggcgatcgatcggctgggcaggttcgtcggagggaggtttctgccgcgcgccgccggggtgtcgacgtgtcgagcggtgcgtggaggaggagaagcgtgcggcggaggtaaggaaaacatgctagctacagcgatcgatcgttttgagagcttcatcattgctgggtagcttagctatgctagctagagctagctgctagatgtgtggacaagtcaaaggccaaagctttgctgttgatgaaaagatctcccatttcgctttggttgctttgctttgcttcgctgtttgggtttgggctgcactactgtgccatgcaaattacttcgagattctttacaaggggcttaatctcgctttgtcttggcaggttgtggtggtgatggtgaggagcgagttgtagaggaggaggggcaccgatcaaccgggaagctggcggccgggaagtggtgggagcggccagatgacacggccatggccgggatggaccctggcgggggcggcgccggcgccggcagctcacggtacttccaccatctgctccgaccgcagcagccgtcgccgctgtcaccgctgtcgccgacatcccatgtcaagatggagcactccaagatgtcacccgacaagagccccgtgggcgagggagatcacgcgggagggagtggaagcggcggcgtcggcggtgaccaccagccgtcgtcgtcggccatggtgcccgtcgagggtggcagcggcagcgccggcggtagtggctcgggtgggccgacgcggcgcccgcgcgggcgcccgcccgggtccaagaacaagccgaagccgcccatcatcgtgacgcgcgacagcccgaacgcgctgcactcgcacgtgctcgaggtcgccggcggcgccgacgtcgtcgactgcgtggccgagtacgcccgccgccgagggcgcggcgtgtgcgtgctgagcggcggcggcgccgtcgtcaacgtggcgctgcggcagccgggcgcgtcgccgccgggcagcatggtggccacgctgcggggccggttcgagatcctatctctcacgggcacggtcctgccgcctcccgcgccacccggcgcgagcggcctcaccgtgttcctctccggcggccagggccaggtgatcggcggcagcgtggtgggcccgctggtcgccgcggggcccgtcgtcctgatggcggcctcattcgcgaacgccgtgtacgagcggctgccgctggagggcgaggaagaggaggtcgccgcgcccgccgccggaggcgaagcacaagatcaagtggcacaatcagctggacccccagggcagcaaccggcggcgtcacagtcctccggcgtgacaggaggcgacggcaccggcggcgccggtggcatgtcgctctacaacctcgccgggaatgtgggaggctatcagctccccggagacaacttcggaggttggagcggcgccggcgccggcggagtcaggccaccgttctgacccatgtcttagcatccagttcaaaaattctccaaattaagaattgcgcagtgcagaagccatagcaatccaatgcagatatgcaagctaagctaatggtacaaaattgcgacatgcatgttggattgttgattggacgatcgacaggcctttgtactgggtgcaacatacgtatgcatctatcatgcatgcgttgcaaattaagatttcaattcatattcatgaggaggtttatcatatacacatattttaacatctgtgggggcaagaagctagaggagagttgcaagagcaagctcggaataaaccaaaggtcagtgagattatccaatgttttgtgtttaattctaccaagtgtttttttttcatttttttctcttttgcattctgtaatatggtactatcctattctagtttgtatcttttgatcggtagaaccatgtttctgaaaaactcttgttcccttttttcaacctctgaaacatgtgcaacaccagaactgtcttatggtcactttcactggtctgaattcaagctcacgatttggtggcgttgaatattattttttatttttattttttgttttggaaccagatggtgatattgaatggttctcgacctggtcaaaatttcgaaccctagctaagctaggtcgatctgaagcatgcattttgaacaccattttttttgcaagaaagtaggagtagtagtatactcctagcttaaagtttgctctcaacaaattcaggatagtatacgatcaagtactgtactatcctgtgcttaattttggcgttcttgtactgctactcctactatactgtactgtacttagttttggcattcagtatataggtccagaaggaaccagccaccaggaggcaggagccttctgccctccctctttttgtttcacctgcagcttttataatggcctctgaatctctgacatcttcagtcatgtttttggcgtttcattgcttggaattatatgtgtgattgaatactgtagtatatatagcaatacttaagactgtgtctaggtgaggttccgtttaaccaacaggcaaagctgtagcaaggcagtggcagtgaggttccgtttaaccagcagggcagagctgcaaaatctggaaagctgctggccatgagatgccaagcccaaaattgacactagctgcaagattctcaccatctgctatggtacttgtactatcatgcatcttgcattctcgaagtacaaatctggaaatagggtctcggtcccttaatgggaaataaagaggagagggacgtttcacactttcgcataatttgtggggggagagagaaggcccagagctttggaacttgctcatagctttgcaacctttgtcctctcggagtcctggagatcagatgccagagcatccccacaccaatatctggtggtcaagcctctccaaatccgggatactaagctagtgccatactgtcatagtatctctcccccctttatttggagcatcatcatgtccatttgttcagtacactttagttttcagatgtcgatgtgttcagccacctttccaaagcaactgtttagattatgaagtatattttctgaattaaattagctggagtaatccaaaccagcacaagtgttaattaagtttttgcacccatgcatgcatagcactagcttgttggcattatatatctttcaatgttactagctagctagtactatatgcgagttatagtagacatgatttggtctctaattggatatattattaatgaaatgcaagttgcgaaaggaaaacttaagacgaggtctaaccgtctaatagtactagctaagtgctaataacagtgcatatatattagggtaaattgtattagcatgcaccttgtctctagttgggtgctgccatctacaagactacaactaaatcttgtggaattccattgagtggcattggatgttgtgtcatctacaactaaatcttgcagcaagcgagcaaactgtatttgctattgtctagaggcctagtattcagattaaacataaaatatcgatgcagaacatgcaaaaacaggattaaaatatgcagtcggcaatagttcaacctacattcatcttatgaatgataactgtaccttgcaactttgccttaaacagaatatttttgtgatgaatgaaatacttaacttggtggttaaaaaaccactatatattattgtttgttcaccataatgccggccgtttatttgcttggtaatgggtggtagtgataatcatgtggattaatttttaattttcatggctttaatcagcttatgttttaaagagatgatcatactaaataatgtactgtttcacctgatttgatcccgttaatttatatagagttttgttaacatttctatgttatttgttcccggtacattgacaataatgtaagactaagatcttgctcgattttctacctgatgatgcacctcttatgacttctttcgtcaagaaggcctttgtcaaatcacattggagtcaagcatcagattgccaagttttcctaatttggtcctatatatacatgttgttctctatattatggtacattaaatttgaaagaaactaaaggaacttagtagcaagggcagatccagaataagactataggggggacttatcttctaagaactagcttgggatttcatggttgctgaagctagtctcttttcttttactagaaaaaatgcccatgcgttgcaatgggtaaaaatattttttatcgcctatacattatactccttatttggttttggaccgaaagcccattattttcttccttttcagccctatcgtcttcaacctccggaagtgcatgtacgataccggagccgatcctcccatcaaattcggtcgaatctttcacgatgggttagttgagggtttttatccactcgatctcctcttttcctttttaaaaaatggagcaatccacaaaactcagaataaaaatagtgattgagattaaatccggtgaattaaagacgaattttaaggagaaatcaaggggaaaatgatgagggagttgtggggaatcaatttttgcaatcaattagaggaggaaacgcatagagggatagatcaacgtggcggctgagctagggttcagcccgacgacagaagaaaacctagttgataaaaaaacgaatccttaccgcatgcgaaaaaacgtaatgtaaaaaaattgggatgaaaaaaaagcgtgccaaaaagaccgcgatgtaaaaaaaagtggatgaaaaaaaccctgaaaaaatggcaaaaaaacatgtgaagagaaaactgcgatgaaaaaagtagatgaaaaaaaagcggggggatcggcgaaataatacggatggaaaaataccgagaagccttatgtatctttttattagccttatgtatattttattatgtatttttttattaggtatatagagatatatatttgttagcatcatgcggttctaatacatgcacagataaaccaatacaatttttctttatctttatatgcgatgacaagatgagtggagttggatggataaatttgttatggaggaggcataataggaataggggaggaaataaattgaaggtgaagtagatcttagcgtgacactcggtgcaacctagcttccagctaagttagctagctcccaactgtaacatggacattgttttttttaaaaaaaatcatttcctagaaaactaacaaaacaagaaattttgtgcactcactgggtaatggataatgtgagccagatgactctggtagagaaaccatctttgctcgatcggtcaaattccacaatagttctggttctaataaaacctgggattaaaaagtatctttagttccagtttaaaagttgaggggtactttttgatctttagtagatcatttttagtctcggtttaagaagttgttgagttcaagacagaccccgattatttttactcccggttggtataaacaaccggggactacaaatagatctttagtcccggttgtttataccaaccgggagcaaagagtaccccgagccgtgcaccatctcgatattatccgcgcgtctcctctcgatttcctcccctcttaatatctcctcctccatcccttcctctccccttcattcccttcctcacccgttcctccccttcccctctattttgtgatgtgatgtatttgtgatctctgatgtatttcttttcaatctgtgatgcatttctttccagatctgtgatgctatgatttgtggatgatttggggatatatagggagcagatcaatttgagcaaagaaacaaaaaaaaaaagaaaaaaactagggatcaaccggactgcttccaccattaccaactgggattaaagatacccggatttatagttccggttgtatagggggttcccaactaggattaaagcccctttttccactagggtgaggtacgtttcgtagggtctaaaatttcagcaacgctatatcaacgcacgtacgtacaggtagcctagctacccggccattacccagtgagcacacaaaatttatcatgcccagatgatcaggcgtacgatgggaagaagaggaagactggaagaggaaagtaggaacttaccgcgtgtactgctgcccgcccagatgatcaggcgtacgctgcgggcgcaggtacggaaactccctcccccagaacgtacgccgggccttccgccgtgcagcttgccgctaccgcgacgagatgcgtcgcacactcgcacgcgcccgccgcgccgggatgcctggtatagttgtacggtgggcggccgccggccggcgctgcgcaatcacgcagaaatccggtcggttagattttgtagggggcaccggccggtgtccggtggccaagggctaaagccagtagaggccgcgatatgatctgggctgagcgtacccagcctgcgagccctgtaacataggctggctgggccgcacaggtagttgggccgtgaaggtgaagagaagatgtccatgcagaggcctctgatagccccgcaagcaggtgtacactgttacatacatgtctagactctagagatggcaacagggtgctatgacccgacacctgactggtttttactctattagaagctaattatctattatatgctaattatgttttaactcttatacccatgagtttaccgacgggcgaaaattcttacctattaggtacatgggtatgggtctattctttatctactcgtacctaccaacccgagggtgaaaaaacctgtagattaagcctaaatccatgagtaacataaaacttctttcttatcttaagttctattctagttatatgaaattattatttgatttcttgattatgtaatatggttgtagattttttttactcgactttgagcgctaatgttaatagcattgttgccagaagaattattgatgggttacggttcaaaaatagctaattatagaacaaaactataaatggtatgagtcaattatatgggtatgggtacccgttacctgcacgggagtgggtacagggatgatatcgaaagcaatactgttttgagatccaatgtgatccgattttgtataattaagaatgtgttatatcttgtattccggctcaggaatggttttgaaacttgacaataaaatgaaggagctcaaatgaacattttcctaggctggctaggctgcataggtcgtttggttcgtgaaatgtccacagggtttctcaggcgcaaacatgtcctggtgttttctctcaaaaaaaagcgcgcgtgcatgcacagggggagagagacagagccatccattaagattgtactaaatctactaactaataacaacgtagtaaagcatctgtaaactaggcaaggcactactagatggaactaccaattttgtttagattttggagtcggaactcctatccgatcgagtacgtgtatgtttcggcaaaatttttttttacctaatccctttcctgttcggtcagcccggatgtaaaagatacagtacagtgcctgcttttctctgcagcagttttgcacagagggtccaattttgagtggcatcttatattcttatacgtgcggcctgcctccggttcgtcgggtctagatatggtaacggggaattccccatcggaggttactccaccatacccgcctccgcggtggagaattttccccatcaccatcaccgtgaaatgcaacggggcaacatctttccccatcaccgcctccgtgcgggtaatttatccccgtggagcctccatccccgctatcaacttactcaacagtcaacatgtatgcatttctcatatcaaacaataatttagatacaaaagattaacactcaaaataacaattctagccatcaatttcagcacatcaacaacaactacaagaacacaagttcacaaattcgcaaatgcacatcatcagttcacaaatgcacatcatcaattcatcacttacaacaacagtgcagcaacaagcagtgcaacaaaagtgtgcccaagaatacaatatccatcatattcccagattaagcaacaacacaataatacatgatcattcatcattcatcagtcatcactcattagttatcaccacattgcagcagcaacacatgttgtccaggcatacacaaaaccatagtcggagtaggtcttttgtgccaaatatccaaaagcattgccatggtttacaagtttatcatgacacataacaggggttacaaacatccaaaatcattgcgagaacagtgcatgtccatacattcatggcttcaaacaagagcaagtccctaaattaaagaagtagcaaaagatattcaattagtcaagtactagaaaaaaaatgcccgtgcgttgcaacgggtaaaaatattttaaaattgatatacattatccagcttgctcggtttttttagttgaatactccttggttttaggctgaaagtcccattcatttcttttcaaccctcagccttgttcgctagctccatccgctcggcttgcctctttggcacggccagtgttggacacaggatgttgcggatgaaaaaatttaggtaaggacggacgaatccttacatacttttttattattaggtacatattaacaccataaaaagtgaccgtgggtcctttgcatgtgcagcaaccttttgtttctttcatggaaagaaagggcattaattttgtatacttgaatatgtattacatcctatatatcggtaagcatatatttatatatatttttgtgtatataatatgattatctttacttttcgaattaaaaaatggttcattataagatttcagaatcaataatttcgaattaaaaaatggttcattataagatttcagaagcaatctgttgaagaaagaggtgcaatactttttatttttcagcaatgggatgtgcatggtaatatgatttgacacgagggaaggaaagtagacttattctaggatgggcccatagacatagtgccagcaataataggtgaaaaaatgcgggagatttgacacgagggagggaaagtagacttattctaggaggggcccattagcccataggcatagtgctagcaataataggtgaaaaaatgcgggagaggaaggtgggaatcgaaccctggtcgccgggatgaaaactttcgatgttaaccatgtaggcagattactatatgtgctacgagattacatggaacttacatatagtatataaacctcggttttggagtagattgaaaactgtccgatccgtctattaatcagattaaaacggatttagctacacgtgtgggacagacgaaaaaaacgcccagaatccttacatattttttaattaggtatatagattttataaggatataacaaataatggcggtaggagtttgattgctaattttaagttgttgaaagaatagctcaatccgatcttggatatcttgaaggcaactccaaaagcttgctgcttcttcgttatcagctacaagataacaattataagaattattttgcatccattgcattgtaaaatctatgctaagcatgatgtatgaataaaacagcatatgtacctcgatacttgttttgcagccaatcttgtgagcacattaaggcctccaagagttctgaagtaagccggctacgatgctcactaagaacccttccacttgtgctaaatgcagattcagatgcaacagtgctaacaggaatagcaaatatatctcgtgctaccttcctcaatgtaggaaagcttgtcccaaccactttccaccaatcaagaatcttaaagttttctgtattaattgaaaccaactcatcctctaggtacctgtctagctctgatttaacgcgtattgctgctggtgtcctactagtaacacgtgctgtgattgaagacaataaatcagaattgacaagtggaggagctgaagattccgtgttatcctcatcatcttccacttcatactccatcaaatcatatagagtgtctttcacctcagcaactttcgttgcacactcttcacttgactgaccagtgatggtttcaatgaacccaaggagatagtcaatcttaaacctaggatcaagaatggtggccaaccccattggcccttgaatatctttccagtacttatcaaacttttgaatcatttcaactgacatttcctctatagtagaatcaccacaaacagcccacttcctaatttgctctttagcctacagattttaagtagttgaatattggaagtcacataatttgtgccagaaaatactgcagtgatgtcattaaacaacttgagcctatcaactacctcactagcaaaagcccattcttcttcactaggagcacaaatcttcgaaagccaatatggtcaacaatagataaaggatactcatgtaatattgaacctcaatgaagattgtgcaagtgtctttggccccatcttgatctttctcaatgtgcaaattttcaaatggtcatgtagatgtgaagtcccattgctgctcttccctccaagccgcttgtggcaatgaaggcattcagtcttgacatcaccacagactttgactttcttgaaatccttccaaacaacagaagtaagcttcctctttgtgccaaaattctcagaatcatcttctggctcatcatcttcaacttgtattggctcagaatcattaacagactctgcttgtggtggaagtgattgtgattcttgctggctgctactcccacaaccagtaccagcagttgaattcgtggtaaatctgacaattgacaaataaatatagatcaatatatctttcagcctatagaataatcttggaaaacttgaaatgaagaatctctacacataaagcatactgaaatctgctacagcctatagaataataaaatttttatgagctacactacacagattcagattcctttaatttcaaaaacttaagttcataacatatttataacttaacaacattcaatgtacaaccatacaatatacatgtaaagatatctaattttctacagatactctaaatacaacattcaatatctaagaaaatcaagcaagctgcaaattaataaattgcacatgctaaattgttaggaacttaggattacaaaagtgaagctacaatatataaagggttagcgtgaaatcgaaccccatggatttgaataagcgcacgccgttggtggaagatgaagcttctggagttcttggagcagaaggagctcctgccttagtcgaagcagaaggtgctcctgcaagatggctttttgcctagtggtggtcctttttataggtggttgcggcggccgactgcaggcctttgcaccggagttggaggaaccagatctgcccacatgaacaatggcagatccagcaacaggcacaacggcaggtgtggctgcagctgcagcgcttatagcatgcgatggctggtccaactccgcattggcgtcccttattgtggatcgccgaacgtgagttagtgactcaacgagacaacgatgtagccatggaagaggaatttagtggagggggagggggatatggtactgtagttaggcgtctagggaggggtactgagttgggagtaggacagctagatgtgctcaccttgcatcgtcgtcggagcttagcagtggtgaaggcgaagccatggtggactcgagcggctggtcgtcgtgtggactcgtcgttttcccctttcttgccaccgaagccttcacctacatccaccatcagcaaaacaaataagcctacatgacggatcagatattgacagagggtggaggaggaggccgacgtccggtggccggtgccgagtccacggcgtcctcggacctgggaggctgcgagtgaagggaacgggacggcgcggcgtggcgctgggacctggccacggggctcgggagctgggagctgggccacctgggaccgggcggctcggcgctggtgcggtcaccgacacggcgggcgcggcggcccggcgctggcgcggtcgccggcacggcgggcgcggcggccctgcgcgtgcgggtgcgagatcgggagtcggcgccgcttagccgctgtggccgacggacggtggcgtggcgcgtggcggcgtggggattgggacgagcggggcggacggtggcgtgtggactggggaatggggacgaaggggataaggattggaatggttagggttacacaactgctttatatactctatgctttgggcctggtttttatgggccatatgggccaaatgcacaggatattactacacacatacttttatatcgggcctccacggagggcggggacgggggacggtgaactaaacccgcccccgccagacccgacggagactactttctctccatttgattccccatggagacacaattgataccatcaccatcacataatgggagaattctccacgggggaccggggaccgggtacccattgccatctctagtcgggtccttcgcttcttcccgtggacgccaatcgtcaacccggtaagttggtactaccttcccttcttcttctttgctagtgttgctgttgtcttgtttatgacagcgcggcgcggcgtgctttgtatggtatcgtgaaggggatgtttgtttaatgcataacattgctataatttagattagttgtggcgtggtgacgcaagtagcttaaagatagtgccacaaataataaaaaaaatactatgatatcacttcagatgaaaataaactttatagaagagttattgatatcattgagatctacaactttgtagtgtattaccttttcatttcaaatcatttggagtatcaaataagcattagtatttcttaaataaaacaattaaaaccagtgaaaagaatttggatacaaataaaataaattacatttagatctctctggaagggctttttttttaaaggacgtgagacctctaaatttgtaaattttcaaaacaaaaatttattttttaaatatttcaacaaaatctctatctctatctctactacttaaaaaataagatgtgcttccatcgtccgtaaaaaaaaaccagacgaaaaaatccatccgatccaaaacaaaacgggctaaaaaaaccggacaaaaaacgggcaaaaaagaaaagaaaaaccaaatctgtcccatcaaaaaagggcaaaaaaaagaaaggaaaaacgaatccgattccgtggtaaaaaaaagggagaaaagaaataaaaaaggaatctgtccgattccttaaaaaaggggcgcaaaaaaaaccaggtgaaaaaaagaccggccaaaaaaaacgaatccgcgtggatgcggtaaaaaaaagagaaaaaaaaaacaaatctaaaaaaaaagaattatatgtggtgcagtaaaaaaatcgaatcctattatatttgacatggtactatatctctattttctctatctctactacttaaaaaaattaaaaacgtttccgttgtccgtaataacgaaagaagggcgaaaaaaacattaaaacagaaaaaagaaagttcgattcaatttacttccattgtccgtaaaaatcttatcttatcttaatctcaatctttccaaggggacgagcagcaccctccatccccgcccgcgcgatgaaacaccagccaaagaaaaaaaacaaaattaagcagagggataaactagattgaagttcccaaaattaaaagaggataaacgatattgaaactcccctaactcgaaaagagggaataaaatatattgaaatttcccgacaaaattctctaaattcgaagaaccctaatttcgggtaagaaccataagagtcaaatccaaatcaattaagccaagggtccgggttacttaccggacttgaagcccctgagctcattggagctttccgggaagtggcactgccgcaccttcacctcctcgcagtcgtgtcgggttccctgcatgcgcgctgtcctggagcacccctccaccgtcctttgccgaagacgggaagcgtcggcttggcgtcgcccctaccgccgatgaggtcaggccgctcggcgcttgtcgccgtttgcacgcccaccttgccggaccgctgacgtcatggcatggctttgcgcgccctcgtgtgcgccccccagccggcgaagcaggagccactcagcggtcatcgctgcacgcgcgcaccagcttgccggaccactgtcgttccgctctctcgtcgccggagagaaatgggatcaggagagagggatttgggagctagggttttgcccctctcctcggtcggcgcttcatccggcgcggggacgattggagccgtccatcagatcagacggctcagattcgcccagtgtcgggccgtcgtcgccgttgattacgctgcgcctaatgggccacggaagtgcatcggaccgtccccgcatatgtgggccgcgctcagctgctcagcttgcgggccatcgaatggactcaactcgccgaagatgggccagcccaagtttgggctggcttgggaagacctgggccgaaagcaaatttgatcaaacaatgtggctcacatttttcaaattaaagtccgtcggataaactcttaagtaggcttgaaaaataaatctaaaactaaatcctaaatcctatgctaattgatcaaattagactcggttctacctatttgttaatatatcaaattatacttgatttttacaaatttgaggtttttagggtgacactatcaaacggcgtttttcccgttgcaacgcacgggcactattgctagtaatataaaaataaaaaaatcgagcgaaaccggtccataatagggacaacagattttgtgcccatggcccatggggtgaatggtagagggcttcgttgctttaccaaccctagggccgagcttttttcttttcttttttttttgactaaacatctgaattgtcattgcataaaagggagaaaaatagttttgttacaatggatttagagtttgtagacaggaagagaaaatgtgtttccaatcatctattacggatctattctgcaccgctagtgtttgtccccaaaaacctgcctcgcttatccctcgttgaaggcatgcagctacagaaggttgttgccccctgaaaaccacatcatgcctatgattccatagcacccaaaagcagaggaggtagaagacatggcagtgctttgccggcagaagctgcgtgtgacttagccggtagaagaactgaaggtcttggattgagggttgcactccaatatttgtccagaaactgaccacaaaagggcaagtgaagcacaaatggtttgccgtctcgtcgccactgttgcagatcacgcaagacgctgactgaacaatcttcttcttcaagagatttttcattgtggacagtctatttcgaaccagcagccaagcaaacagttttaccttcaacagtgctctgctgctccaggtgaacttccaatttggcgaggtaatacctgcaggaaattttgcctcataaatttgtttagatgtgagtgtgccagaacgatcgtcttgctctctccggtcgccgacggccgctactcgccgccgctagtccgccaccttccctccttccctctctaagctaaatcggggcctttgtacctggtcgccgaccacctctccaagctaaatcaggccatctgtccctctacctctgctagtaccgagtaacagtctccaacccaaatttcgacattatcgatttgattcagttgaatcgaggcaaggtagaatcgtttaagatcaatccaacgtatccggcgcctgtttttttaattttcactctctcttctacctaattgctgcctctcgtcggcggtaagtatctctctgtttttttttctgtatgctgaattgctgattgaggtctcctgagcgatctatttggaatcacatacctccggttttcccacctaaattgacaaagtatagtatttacttaatttcgttttgaatacggaaagacacaatccaatttcaatcaatgaaacgtgtcgtttttcaggtccggtgacctgttttattcggtttatcatcaatctgcaatggctaacaagggagggtatctaagcgtgttagcgcccattgaaactacaccaaccatcaagcaagaccacattacttccgtaagcgttttattttgtaaatctacgtcattcttccccctcccccgtccatgaatcctccaacttttccttcgaatttttctgcggtcatatagttcccttctttgactgtggtcggtatttcagatttcatctttaagtttgcttaatgttttcgcaccaaatgcagaatgctgacctacaagacaggattagccagttgccagatgatattttgctagccatccttgatggactcaatgtccgagatgctgcaagaacaagcctcctctcaaagcgttggaggccactccccactatgatatcacatcttacaatagatgtttctgactttgatcccaagagcatgtccagcttctctgatgatgaactgggtcggatcaatgcaacagtggttaaggcaacgaagagcatattggcatgcaggaagtcaaatgagcacactatcagcctcctatccatgagattctacttgagagacgatgactgcatatcctttggacacactgttggccacgttatggcaacccaaaaagttgagatgattgaatttacaattttgacagagaaagatgacaatcagtgcattgacgatgatttcatcgtctatgggagacgttttgcgttgttcttcagttattgtccaaatacattcggaggtctcacaggactccaacttgagaatttgagatttggtgaaccagaaatcattgatgtcctcaacacttgcaagcgattaaactatttgcgtttgtataactgcagctcaggaatttccacttttttggaagttgaacacttgcaactcagtgaacttagtattattaattgccgttttggaataatcaaacttagttcactcccaaaactcacacggatgatctttggtggttggatagctttccaagatccactttcttttggacatgttccattactggagtctgtaaccctcaccaatgttggtcttagttggcacaatgcggtgaagttgagcgaatttctgagcaatatctctataagagatctgactttagattttaatagtgaaaaggtatatcaatgttattcttatagttccatctaaaaaggattattcttctgctctgatggctttacttgtatgtttgtaccatgtcatgtactcatgtgttcttttccttgttgcatatttgggttcaaccagaaggcccaaaagcacttgcatctgcattccacaaactaagggttgtgaatttagttgatcttcctgaagggtatgatccctcgtggacaatgttctttcttgaggctgcaccctccttgagggagctatacgtggcggtaagcacctgcaactgatgcttgattatctgctaagccttttacatcaggggcgtagccagctaggtggcaccgtggttcacggaccatctaaaaatttgaaattatagtatatgtgctggttaatatagtaaaaattgtatagtggaccacccttttaattgacatattacatatagatggactacttttaatttaaattttaactacgccactgttttacattttgcattgactgcaatttctgagatatgttttgcggcctgcaggtatgggatcatctctgcgaaatagagacggatgatgagaggaggaaagcctactcatacagcgagaataagaacgcggattggaatgcgtctgcgtcagatttcaagaaccacagcctgtcaacgttagtcatgtttggctttcagtcgaacgacgaaaacttgattaggtatatcagacttgtcatggatgcagcggtgaaccttgaggatatattcctgtataagaggatggcgtgtgaaaagtgcaagggcaagaatccaaggcccttgaggtacccgtcgaccaagaaacagagacaggcactgaggaacagaattgctctggggacacattcgcttgctacgatccatttcccaactgtattaagggctaatcactatgcaaaactgttgtattaagggctcaaagccgcgtactaagttatcaattttttttttcatacttcctttttaagctctaataaatgtcatcggcgagcgtctaaaaaataccataccattgtactccctctgtcccctaatataaggtattttaacatcttgcttgtattatttgatcattcgtcttattcaaaaaaaattaaaattattatttattttatttgtgacttactttattatcctttattatccaaagtattttaaatataactttttattttatatttgtataatttttttaataaaacgtgtggttaaatgttaaaagaaaaagtgaatatctcttctattagggtatggaggtatccatctttcctaaagaaatgtcatcgccgtcggttttccattaatagccaatcgtgtttactgtcggtcaacacggtcaaaatccgccgtaacaaaggggagctagatgcatctgaagaatgccgtaaacgctgagatcgactgcatcctctccatgtctggccgaacgcgagtttgccgattgctttgcagctggtgatctagcggccgattcctcgcacgttgcatcgacatggaggagccccattgccggcaacgagaggagggtgggaggagaaagggaaggagagatttgtacacagctgcagccaggtgagacccaccatggtacgttgcgccgcgccggcttccgcgcggcggcaacatgccgtggcggtggccgcagatgcctcgactgcaaagcatgtcggcgcggggtgcagcggccagctgcagccgtggtcgtcttaccgcgcgcggtccgcggtgcttgccgtgccaagacgtggagctatgccagtatgcctctcgtgcgtgctatgttatgagcaaacaccacgtagcatcaatataatccctccattttatattataaaactttctagtattatccatatttatataaatatttataaatctagacatacatatatatatatacatatatacatatacatatatatatacatatatatatatatacatatacatatacatatatattcattaacatctatatgaatgtgggcaatgttaaaaagtcttataatatgaaaaaggggaagtatgtcgcaaacaccacatagcatcaatatatgtcgcagagttaacgttgcaggtgcggtacgcctcaccaaaacacgtaaagaataagtacgtggctttaacctagtagtaacagataaagttctcgttgtcactgctgagacttcacatagcccggcaataacctagaggccgcgatatgatatgggctgggcgccctgcctgcgagcccctgtaacataggctggctgggcaagtaggtgtacaccgctacatacatgtctctgtattctctcagggttagcaacctgctagtgaacttctaattactcctctttccaggaaaacaatagtgatatccaccatatcagtagcattgatcggaatggtcttcagaatacacaattccttgctagtttggtactaaaaacgccaaatgtcacaataactcaatcataagcaaatgcagaaaatgcggatacccgcaagcaatacgtcgtcttcagcgtaaatacagataaatctccagcacatcaaataatacgacgctaataaggggcaggaaaatccggtagaagcattcagaagtcagaacagcccatggcataaacgttcagagtgtagctttcagcagcgacaacgttggacttcttgaaacgctggtggtcgcttcctcctgagatagtcaatcggccttgccctcctgtgcaccgacctcctgcagatagtgctccgcgtccaaagcagccatgcaccctggatacaatgatgagttagaagtctgccacaaaaattttatgctcagcagtagccatcaatgatgagttagaattgatcttgtcgacagagtcatgcatatagacaatttctctctttttttgaagtgcatgtctattggatcaaactcctgaaacaagctagcacaaaataatagtaataataataaggcttcatcatgtactaaccatactgaccatgtatcaaccaacatgaaaatcacaaaggaaaaactctgtatgctgcttctgagatgaaaatcttatcatcaggctttttcctttcacacgacaggtaacaaggtagttctttctgaagtatatagaaatggcatactgctttcattctacatcagcagtactggccttattccctgattccaatttttgctaaacaaccagacatcaggattaaaatcagtctcctatgactgtgtccatcaaaaatgccaatttggattgtttctgaccaagaccatacttggtaacattattactccctccttccctaaatgtttgacgccgttaactttttacaacatgtttgaccgttcatcttattcaaaaacttttgttaaatatgtaaaactatatgtatatataaaagtatatttaacaatgaatcaaatgataggaaaagaattaataattacttaaattttttgaataagacgaacggtcaaacatgtttaaaaaagtcaacggcgtcaaacatttagggatcgagggagtactttgtttatgaccatccggaactcaagtttacagagcatgcatggaaagtgaacccagtctctgcttattcctccactatgttgtccatcaaaaaggtcaatttatttcagcaagtccatacttggtaacatattagtttactttgtttatgcccatccggaacacatgttcacagcacgcagggaaagtgaacccagtctctgtttattccaattcattcttttatgcaataataagttcaaactccatctctgacaggatcaagaagggagaatggcgaaacatgaccaattattgaagtttgagcatggagaattttgcatgtgccctctaaccacatgaaaatgtaacttgcactctagtaaaaatacttgctgcaacatcagttagcatgtaaacgcttaacaaagttaactcacatcacaggagtgacagagtgatgtactgaccatacttctgtttttgatttttttgcaaaaatacagtccgtactttgtagtgtagaaattgaaatgcactcttctatactaaatgggaagtagcacttttttttattcctaacaatatttggaatgccttaactatgaaaatcccagaatagcttgaaagtcacttatcccagttcaacaaattccatgattaactaccagctacttattagtcaaacatatgaacctacatggtactttggaagcattaaccggcctcaaatacacctaactttttttaggactaatacacccaatcctagcttggaaacagagcacgcattcaacatgcccaaaaggtagttagtatatctaatcaactatgctagatacataatgaaagcacttatttcagaaactcaaacacgttaactctatgatagcttaaaaaggttctaattttgaccatcatcattcgctcactacatactcaagccctgaacaatttctattgcaattcgcactagcaaatagcaacccatgaagcgactgatctctaagaaagtgcagaaaaaaattaatcacaggtaacctgaaaaatcatcaattcacaaacctgatccagcggcagtaatagcctggcgatacttcttgtcctgcacatccccagcagcaaagacccccttcacactggtgtgcgtggagcctggcttggtggccacatacccatcagcatcgagctcaagctgcccgccgagaaacttcgtcgccggttcatgtccgatggcgaagaagagaccggacacctgaaggtcggagatcttcccagtaaccaagttcttcaccttgacaccagccaatggacctccaccctcgccgccgtaggcctcgacgacctcagagtcccagaaaacctggatcttggggtttgacaacgccctggcctgcatgatcttggaggcgcggaaggtgttgcggcggtggatgatgtacacatgggagccgtacttggtgaggaagttggactcctccatggcggagtcgccgccgccgatgacggcgatgggtttgttcctgaagattggggcggccccgtcgcagacggcgcaggcggagatgccgcggttccagtaggcgtcggagccggcgaagtggagtcgccgggcgacggcgccggtggcgacgacgacggcgtcggcgagcacggtggtggagtcggaggcgacgcggaaggggcgggcggagaagtcgaccgcggtgacggtctcggagatgatgctggtgccgaaccggagggactgggcgcggcaccgatccatgagctcgccgccgaggatcccctcggggaaccccgggaagttctcgacgtcggtggtggtggtgagctggccccccgccgcgatgtcgttggcgagccagccctcgaagagcacgggcttgagctccgcgcgggcggcgtagatcgccgccgtgtgcgccgacggcccgctcccgatgatgcacacgcgcgtgcggagcggcgccccggcggatccctccatggcttggctgcggcggcggcggcgcgggtcggagtctctcctcaaaattacgcttcctacccggcactggtcagaccgtcagaccgagaagggaggaggcgacgagccaatcaacggccaccgcgctcggtcggtcatacccccagatggatgttgagttgttgaccgaaactattttctttttctttggacaacaagttgcagaaaatccacaataattgacaaatggcaatttttttttaaagaaacacacaaacactcacaacacgatgcataccacacttttaaacgcgccgtactcctataaacacctccaaaaaaactgaactgatatatctccatatgaacacacattttatctctattagcacatttagaaatctggattaacatatcttgagtttcatgaagttgttgcgagtgcattactatcaacggctatattgtctactgttgaaagaataattaaccgtaaaagcgagcatatgtgtcaactttataacttcgatctgagttggatttgagctacgctcacttgacggcaaacttttcaactgcacagtatgcacgcactagattcacagatcgcaagcgagagcgatcaagtgatgttaacaaactaagctcaaaaatagagtttgtggtgtgacgacacaagcaaaatcatgtcggagtattaggattcgtggtgcgatttgcacatacgtggatctgcaaatcttgctccttccgaccagcttcattcagatgaggcccgccaaaaaaagaagggcttcattcagatgatggcgagaaatagtggcttccatcttttatctttcggatggaaacccaaacagatcgatcgaaacttccgctgcgtgacacagccaaagtgaatcactctcttcccatcactacttccactctccgtgcagtttcgttaagataatggccagtacgtgcgccatgtttatttggatttggtcgttctaatgatgatgaattgatgatgatgtcctcctccattgctgcattacctgtcgagcttttcaggattcaggcaggagagacacgagcacaggaacatgctgccgactgcccactgctttaatcctttttgttcatgcagccgatcaaatctcgctttcgatccctttgctgtaaacaaaaaattcagaggcagcgtttcgttcaaacggaccagaataaacaacactagccgctggcccatgagcagatttttctctcgaccaaatccacgatactaattgtagcaacgggcttttctactactacccgtgggcttttggctaatgacccagccttgtctcagcttcagcatttttaccatttattcacgctacatcattgaaaattttaaatgcagttctttcaggatgatgcaatggcactttcagacaaagaaaaacctgatcgatagcagtgtcggtgtccggctgtccgctgctcccgtgctttcactaactagttgacaaagataaaccagcattgtccacagaacagctagtgacaaacaaattaagccgataagaaaaatcagtaacaggtgagacgcaaagatttgtttggccagactagctatgtgtttctgactttctgtaattggtgagaaattaaccccatccatttgggcatgcattaatttttttgccaaaaaaaaagacagatatcgtcaaactgactctccatcgacacttactttcagcagaagaaaatggagtacactcacacggcagaacaaagaaattggcatgcaccattaaaaaaagagagagcatgcacgctgcatggaaagttttttttttttgaaggaaatcgctgcatggaaagtatatctgtaacagtctgaaacgttaacacgtatttgaatattcagttgtattattcttgccccgtccttttctatcgaataaaatcccatggacctggacggctagacggccgttcgtggaagaaaaattttgtcacacaaaattaaggtctactctaatacagatggcagttggaaaacaagtgttaatatctatcttgaaccaatgagcatggcaaaaaaattcagattatgcggctcacatttcacgccctgttaattacatcctcatgtgtattaagacatgagtgtcgtcaatccaaaaactagtttcacatcttaatttagacttcattcgaagcacacatttacaaccttttaactaatctgtatctttgttccaaaaaaaattgcagccattccagactttgatcagattgttgtcaggtctaccgatgatctcctgccgctggagctggcgtagtcctcgaccgggactgagttccgcttgatgaactcgaggcagtcggcgatcgcctgcgcgtagaacgagttggaccgcatgaacgacggcggcactgtccgccgcccgccgtcgacgtgatgcttcccgccgccgacgaggaacctcgtgctgctgctccgtgagcagccgcctccagccgacgacgaagacgacgacgacgaccgcggccgcctcaccgccagcagctggcgcacgtaccggccgacgaggccgaggaacgtgagcagcttggcccgcagccgccgcaccgagaaccggttcctcgggcacagccggaaccccctcgccggcggccgccgcctccgccacctcctccctatcctcacgtagctctccggcgaagacgcacaaccctccatctctcttcgaatcttcgatctcctttacgtgcgtgtgtgaattgcgatcgattctgtacggcctcctggatcgcgagctatactctgcttgatgctgccgctgccggctgccgctgctgctgctggtcaagtggcagcaagcgaagcaaactggggtatatatagctctcgcgcgcgggtgtcgggggagaggaacgaggcaggaaggtaggtttgaatcgagccttttcgcgagagcgacatgcgcggggagtagcttaattaagctgctactccactaattaacacgcgatgtgaagccggtacggacaagcaaacagccagtgaagccagggggggcagtgtgacgtgtccgtgtaaaatgtgaaacgggtggccagcctgcacgccaaatttcgccgcgtgattggttgggtcatcgaccaagcagatcaaacagcagctgctgacagtgttactactagtagacatgagtgaattaattagtgggcatgcgtccgtgcgtgcgccctgctcagttctacgtaactgcgtagagattacgtatagaatagtgatgtttcgtccagcagagtgagtggacttgtaggggttaagcgcagcagttaaccataaacatgcgagttggcaggagtttggcagggctagttaaaaactcaaaagagccattaacaaatgtactggcatgacggatctgtcaggagatctctcggcacacggtatatggggaggtggatggagtttgttcgtaccggcatgaggccagttgctgcagacagtttgattcttgtgaccccatgaacttgaataataaactgtgtgcgtatcagcgaagagctagtatatctattgaaatactatgaaatgatgtgcgtggatactctgatatccagctggtgtgtacgtctttgtcccgaccaacaacccaaatattttcgtgttgctgtcctctcgattcagttttcatgcatacatatattcagctcaacgaacgttaacacgtaacaccacagcaagaacacacgtcagatcatatccttgacaatctccctcttgacgtacaatgcatgcattccagaacttttttcaagcagatcgatggaaaaatccgtccgtacataaattagagtcttggatcgattagtcaaaccgttgagcttgaggtcacaggagagccacacgtaccgcatgccacgcacctgccgatcgatcgagccgcacgcaacgcaggcacgggggctcgcgcgatccgcaaagtcgcgatcgatcgatggtggccgcgcgcgcgcggttaggtacgccgtgagccggcgaaacggccggagccgaacacatggcgcgcgcgcgtgcgcgatgcgagattgcgaggaaataatcgtattctcatgccgaggctaccacgggagacggagttggtcgtacgtgcgccggtgcgccctgcggaatctcgcggctcggcacgagggcggacggggcgtggcatgcgcggccgctcacctacgaccgcgaccgtgcgtgcgtgtgtgtgtgtgtgaaggagacacggcttcgcatggaggggaaagggggcgtgagtgaaggggacacgtgtggtggactgggggctgggactgacggccgtgtgggtgagtggcgtggcgccatgtcgtttttgcctttttgtgtccgtgttgggccgatgagtgaaaagcaggagtagcacgttttgtttggagcacgagccacaaggtgtgcgtataattaaagaaaaggggatggtttacttttggactttttgagtctaatggcatttgagtacatgcagcactgagtaggagtacgttttaagctgctgattagtagtatatactttgctcttagagcaggtacaatagcaggatataagccagctgcaaagatattttaaagagataaataaggagagagaagagcagcgggctacaaatttgtagccagttatagcacggactccaaaacgcagtgtgtttatgataggtgggactagatattaatagtgtagtatgtaaatattgtatgaataaactactagattggctatagatgaattagagatagtatttggctacactattaaacttgctcttacacggttacacctattgtgttcttccggaaacacggaagtgtgttgacgacctagagccgatgttctccctgaagactgaagaccgaaaagagtacagctaaggtaagctactgattatagttggccataaggcccgaggcccgaaggcccggcccacggcacgcctttttggcccggcccaagcacggcacggcccgacttgggtcgggcccgtgccggcccggcccgactgtcgggtcgtgcctgggcctccccaccagcacgctgggctggcccggcacggtcgggccgacccggcacgatgggctggcaggccaggcccggtacacaaagtatagggactaaaaatagacatataaatgtcaatgtctaaagaatagggaccttaaatagacttattttagctatttatataccacagcacaaagaagagggaggtaaaatagactttttttagctatacaatgtcacagcccaataggagggagaaaatttagacttattctgaggaaaagcacgatggcccatcgtgccttcgggccggcccggcacggcccgaggcgtgttgggccgtgcctgggctgtgagtgcggcacgtgggctggcacggcacggcccggtgcgtcggtcgggccgtgccggcccgacaagcctcggcccaggcacggccgggcctgggccgtgccgtgccgggcggcccacatggccatctatactactgatggagctgttgtgccgattcgtcaaaaaaaactaatggagctgttgtgcagcacatggcaaccgacagggccgaatctgacgtcaaatgccaataggccagatggaggcccaaaagtgattacggcccattataaactggagcccaccaaaacgttcagcttggcctgcaacgctacgagagggcccacaactcgcgaaaaaagtacacccaaggtccctcaacttgtcatcgagatacaaaatcatccccaaccgcaaaaccaaatatatgacatccttcaacttacaaaaccattcactttagatccttcggtagttttgaccccggttttgtctaacgtggcagctgagtcagtatgggtccccatatgggccccacatgtcagtgtccacgtcagcaccttctctctttttttccatcttctctctcttcctcctctctcacattcttcttgttctcattgccatcgcggtgctgcatttggatgcagaggatctcgccctgtgcgacggcgagctgcatctgtagctgtgacacctggttctgcatgaaggagatggccccgacgcagccgtagactgggtcccgcatccggtcgttcgcctcatacaccaggctgctcaccgcgtcgccttgctgccgcgccagcagctcctgcattggaaacacgcatcagacgcaagcatgcatgcacggtggcgtgggcgccgccattgatgacgaccttatacgtgttcgtgcataggccatgcaatgccaatggacatatacacatatatgtatgttgggtaagaagaagtttgatttaatatacctggaggctggagcatcttgctaacattgctgtgttagacttcaggagtcttttattgcttggcttcactattctatttgggatttgggcctgatggccttgtaaggtggctggtgcgtgagtgaaggcccagctgtgagctgtgtactagctggaacctttatatactttgccgaagcgctggtcgtaggcaacgaataagaaaatacaatatcaccaacctcctctccaagtcaattccccactctgttcttgctcagttcctcttttcttcctcccgagttgctcgatccgtgcctagtttggcgtttcgccaagggagatctcactgattcgtgacaaatctggtatcagagcagtggattttagggcagcttggcaaggaagaaggcgaatccaaccttgacggagcgcatggcggcggtggaaggagaggttgaatcgctgacgacgagggtggcggagctcaccacaagcctcaactccatcctgggatccctacaaggtatggagaagtggattccggcggtggatgaaggcatcaaggacctgcgtcaagctgtagaacaagttgcctcgcgggtgaccacgctggaggcaaaggcgccggcgacaactatgccggtgactattccgcccgttgggcacggcgcagctttgaaccaccagggagctgcaactggtaccccagtggaccaggggcgcgccctggtcaagggtaagctgcaatttcacaactcgccagttcattttgatttgggggattgctctgaaaaagggatgggaggattgcagagtcctggaaggtctagtggatctaggttacccaaaactgatttcccaaaatttgatggagacaacccaaagctatggaaaactaatagtgagaagtatttcagtatgtaccaggttccttatgaaacttggtcatcctttgccacactccactttgtagggaatgcagcgttatggttacaaacctatgaggagttgcactgtgtagagagctggccagaattgtgtgtagtagtgcatgggaagtttggtaaggacaagtaccaacaacatttagaggagttagaagggttgagtcaagttgggggagttgatgagtattatactaaatttgaggagttgatgcatagggtcttagtttacaacaagagatatgatgagacattttttgttactagattcatggggggtttaaaaactgagatcaaaacaactataaagttacacaaaccaagaacggttgatctgacattatctttggcaaaaacgcaggaggaattattgctggagagtagcaggaagaactactccaaagaaggatacaaggatgcttacaagccggtgattaaacctgtttatcaaggcaaagggattctgggagcatcaccagaggaggctaagaagcctgaggagaaacccaagtgggaggaaagatttgacacactgaaggcagcaaggagagctaggggagagtgcttcaagtgtggagaaaagtatggcctagggcacaagtgtcctaagtctgtacaattacatgttttggaagaattgcttgaagtgctccaattgcaggaggatggttcccaaggtgatgatgaagaagaacataaaagtgatgaagagctagttttgtctgagtttgctgtggctggaaccatgggaaggaagacgattcgatttcatgggatgatacagaaacaacaactgctgatactgctagattcaggtagttccagcaactttttagcagagaatgtggtgaacaagttgggacttcagtgtgaaactgtgccagcaactcaggtgaccattgctgatggtgggaaaatgcagtgcaatcagcttgtatctggtgtggaatggtggtgtcaggggcatactttcaccattgattttaaggtactgaatttggggggatatgacatgattctgggtatggaatggttagaatcattcagtcccatgtggatagattggagaaggaagaggatcagattcacatatatgggagatagggtgtcactaaatggagttaaaccaaacctctcccagaccacaatgctatctgttaagcagttgaagggcttgcataaagatggggcaatatcacagatggtgcaactttgtgcaatagaggaagttcctgatattaagcaagagttaccagcagcagttgagcttgtagtgaaggagtttcaagataggttcaagaaaccaactgagctgcctccacaccgccagtttcaccatcacataccactgcttccaacagctaaatcggttactaagaaaccttataggtatgcccctcagcagaaggatgagatagaacaacaagttgtacagatgctacagcagggaattattcaggccagttctagtccttttgcttcccaatgttgctggtaaagaagaagaatggctcttggaggttttgtgtggattatagggggctcaatgacataacagtaaagaataaatatccaatgccagtggttgatgagttgctagatgaactagcaggggctaaatggttcactaaactggatctaaggtcaggataccatcagataaggttggctgaacaagatgaacataagactgccttcaggactcatcaaggtctatatgagttcagggtgatgccatttgggcttacaaatgcaccagcaacctttcaggggttaatgaacaccatattcactgctgccatcagaaagtttgtgctagtatttgtggatgacattctaatctatagcaggactctctctgaacatgtggagcatttgagatgggtgttcactctgctaagacagcatcaactctttatgaaggcaagtaaatgctcttttgcacaacaggaattggagtatctgggccacataattggggtcagaggtgtggctactgatccttagaaactgaaggctgtacaaatgtggcaagttcctaagaatttgaaacaactcaggggattccttggtctggcagggtattatagaaagttcattcaaggttatggcctgatgacaaaacctcttacaaatctgcttaaaaaagaagtcaagtttgtttgggaggaaacccatcagcaagcatttgagtctgtcaagaaggctttaaccacagctccagttctagcacttccagatttctctcaggaatttgtggtggaaattgatgctagtgacaaggggataggggcagtgcttatgcagcaaggtcatccattggctttcattagtaaagcattgggggtcaaagcgcaagccatgtcaacttatgaaaaggaatgtttggcaatattgttggcagtcaataaatggagaccatatttactgcactctgcatttgtgattcaaactgatcacaaaagcctaacacatctgggagagcagcagttgaacacatcaatgcagcataaagcttttgtcaaattaatgggcttgcagtacaagattcgatacaaaaaaggggtagataatcaggtggcagatgctctttccaggaaagttgaggatgaagaggtgctggtcatgtctattagttcaccaaaatggatggagattgtaactgaaggttatgagtgtcggtgacatgggatcaggagtatcatgactagaggtttgaggcagacacaatcgcccacgtggcctggcaccctcgggggacgtcgggcccgagggtaatgtgttcgccctcctcttagtccccccgagggggtcggaccgcacccgcctcagccccgagggccgaggcgccctgacccctcgtggattttttgctctgtgtgtatgggttaggtgagcacagcggggctcacctaaccacatttattgcggtttggctgagcgtgtcacgctgcatgtaacgcagtgcagtgcactcatttatccggtctgtgaccagtcacagaccggtcagatcgcgggttaggtggcgacaggcgatctgacgcacgcctcgccccatcccgtcaggacgagggcttctaggcgcttgtccccagctggagctagcgtgttacctcccagagatggcacgttagccctggtcagatatatgccaggcttcatcctaaccattacaggcaagatgttgtgtgaagaaggacgaacatatagattgctaagctgacacgtggtggacaagaatgaccgacgtgactggtctgacaccggtcatgtcgtcagtagacagccacgattccacgtcgcatctgctcccggcgaaagtggaggtagttgtggaccgtcccatcagaaggtgactcggatggcaactatacaaatctccgtccatttatgaaaagggtgcatgtggtatccccttaagataaaaaaggaggaccttgcccacttagagggaggaggagacttttccagattgggaacctagaacgagggagaggctggctcatactttgtagttccttcatacacaaatccaccaaaacacaggagtagggtattacgcttctgagcggcccgaacctgtatacatcgccggcgtcttgtgtgcttcctgtctcgcgaaccttccacagattgggagcttagagtctcacccagagtccccggccgaaccggcaaaggggggccagcgcggtctcccggtgaggagccccacgctccgtcatctggcgcgccaggtagggggtaaggatccttaggacatgccttgttaaggtcggtgtagtcgatgcacatccgaagcttgccgttcgccttgggaacgaccaccgggttcgccagccactccggatggatgacctcgcggatgaatccggcctccagaagtcgcgccacctcctcgcggatgaaggcttgacgttccggggcctggcgccgcactttctgccggaccggcctcgcgcccggccgtacagcaagacggtgctcaatcacctccctggggaccccgggcatatccgccggtctccatgcgaagacgtcagcgtttgcccgtaggaaagagacgagcgcgtcttcctatttgccgtccagaagaccaccgatccgtgtggtctttgacgggccgtcgcccagggcaacctccttgaccgggacctcattgcacgtgactatccgctgcctcggggcggcgggggtggatgtgccaagcctctcgccgccaccctcgggcttggacacgacggcgaggcggtccgcgcgctgctccatacaagcgagcgcgactttgaggtcgccatggacagagatggggccaccggggcccggcatcttcatctgtaggtaggcgtagtggaccgccgccatgaacttcaccaacgcgggcctcctcaggaccgcgttgtagggcagactgaggtctgccacatcgaagttcacccgctccgtgcggaagttggcgggtccaccgaaggtgaccgggagatcgatgtgacctaacggccacgtgtgccctggcgtcacaccgataatcggctgggatggccggagcatcatccccggggccttgatagcgtcaaaggctgcgggggaaaggatgttgagggccgctcctccatcaatgaggacacgccccagcttcacgttgcaaacagtgggggaaaccaccattgcgatctgtcctccccgggcaacgcatggtgggtggtcggtctggtcgaaggtgagggcaacctccgaccatcgcgcccggcgcgtcgcctcatgagtaggggccgcggccagaagctctcgcttcatggccttgaggctccggcgagaaacgtgagcacacgctcccccatcgacagtggcaatggtggccccaggctcttggaaacctaggccatcatcgccgtcatcgatgtcctcggcgggggccttctgcttggcctcacttcgccgattgccggaaggaaccgccggggacttgccctctcggcgctcctgcctcctctcctcctcccacttcctcgttcgctcagccaaacttttgaccgcacggcagtccacgaggtcgtggagggaggtgttgtggacggtgcaccacttgccggctgggcgctccctgctgggagcgccggcctttttctttttgtcgctcgcaggcctccccttttgggtggcccgcgaagcgccctcgacggcgaggacatgaccctcgtcatcggaatggactgacctcttcttcctcctcctgtcacgccgccctgtctgagcggcggatccaggggcggccgaagctgccacaccggaaccggaggggttccaagtccaggcctcctccttgcgagccactcggtccgcgagctgaaaaagctccgcggtagtctggggctccttggaggcgatcttttcgagcatgcggttgtgccgcatgccccccctgaacgcgtagattaccgcgtgtgcagggatgcatggtatggtgttgcggacttgacagaaccgctgaatgtattagcgaagtgactcatcatcccttcgctgtactgcgtgtaagtccgcttcttcacctgggcgcggatatgtgccctgaaagttcatggtgaactgttggcacaaatcctcccaggagtggactgacgtgggtggcaagttcattagccaaccccgcgcctgcccctttagggccatgggaaagaaattcgccatgaccctgtcgtcacccccggcggcctcaatcccggtcgtgtagacctggagaaactcggcggggttgacgctgccatcatatttttcggcgatggtgggccggaaccttgggggccaacggacattccgaagactcgccacaaaggctctacagccgacaccaccaaccgggggcacggagggctgattcccgcgtccgtgttgaggtgacactctggacgaggaagcgccctccgttgcgtgggtagcacgtcgatcattacgccgccgctcgatgctggtgcgggcgtccggccccccacgcagatcttcccgggttgaaggagtcgacgaaggagtggtggccgaatggcgaacggcagctgccgctcgccgcgcccttcgtcttgacgacgcggagccggtggtagcagcaccagaggccttggtggcggaggaccgcccaccagcatctagacgctgccttgcagtcatgaccaatttggccacatcgtccagccaacgttgggctggagactccgggtcatgggcgacgggcgggtgacgtaggagcgcgcccgcagcttggagcgcgccctggggcgtgctgccgtcaccgtagacgaggaggcgacgctccccatctcgccgtttttctccatcgcccgcaatcggtgaagtcgcggatctttcgaccctctcgagtgcctccccccgcttaggactttggcgtggagggggcggtggagtacgagctcgacggcgtgggttcggctccccgtcgtcaccactcggcagggcggctgttccccgggcccctgtcgcgggacccagaagcacgaccccctcccggggtagattgttccccctgcggctcccgcctgcgccgtcgtggccctttggagctcgctcctctgaggccccgaccgccatcataatggtcaggatggagacgcggtctggatcgctgcagagggggaggattccttggggaatgagggacgcctccacggagttgagattcagcacccgttggaccaatatcttgaagtcctcaggagcccagtcccatctcactccctggtgggtcctcatgaagtcttcggacccggtgtactcccaggcgccccgagcgcgccgctggagcggcgcaatccgacgacggaggtagtcgccgtacaccatggcccctgtgagcccctgggatcgcaggcccgccaggcggtcgaggacggcgtcatagccatcccccagatctaccggcgcccgccagctggaggcctgcgccgggggctggctcggaagtcggaggcgcgcttcgtcggcaaggggggtgtagaaccagtcgctcttccagtcgtcccacttcttgcggagggcgcaggggatgtagcgattcagcaccggctcccgtggctggaagtagcagccaccaactaccgatggcggcgacaccgactgtacggtgaagaaccaccggaacagccgaagagatgggcgcaccccaatgaacatctcgcacagatgcgcgaagatggccaaagtcatcaccgcattgggggtgaggtgcgccatctggagatcgtagaactccagaacatccatgaagaaagaagaaaatggcggaaccagccctgccattgcaaaggggagaaagaagacggaccgccccgggtagtctggcgccgggcgtccctcgcccagcgtgactatctcccggccggtggcagatcccggcatgaaacggcgcgccagcccagcctgcctctcgctcacaatgcgggaaggcggcagcacgctaccatcgagcagagcggagccccgtgccatggcgccggaggaagagaagattaagagcgagcgcgtgtggcgaaggtagggcacaggaaagaaggagttagggcgcaagcggcgaagacaaggggaataatggcgaaaggaaggaaacagatcccttcctcagtgcctttatactcttgccagcgctgtgcccggctcctcgcttctcgcgcccactatttcgccccctcgtttctcgcgcccacgcttccactaatcccattcgcccgcttgcggcgcatgaggtggatatgcggttgtggcagtcgagatagatcatatcatgcgtgcgttaattacgctcgccgaccgaagcgacgttaccatatctccagacgaaatgaatcgccatgtccagattcgtgtgctactcgagtaatgtggcagtctcgaagagaccgctcattattgacagccgagttaccactgccgatgtgcgtgatttgtgaccgttgggtttctgcccaattgaggagaccggtcccgcctgtcaccgggccttaggagtggcgtcacgcccaaccgcttcccttaaagagggcgatcgccctggcataacgccgggggctactgtcggtgacatgggatcaggagtatcatgactagaggtttgaggcagacacaatcgcccacgtggcctggcaccctcgggggacgtcgggcccgagggtaatgtgttcgccctcctcttagtccccccgagggggtcggaccgcacccgcctcagccccgagggtcgaggcgccctgacccctcgtggattttttgctctgtgtgtatgggttaggtgagcacagcggggctcacctaaccacatttattgcggtttggctgagcgtgtcacgctgcatgtaacgcagtgcagtgcactcatttatccggtctgtgaccagtcacagaccggtcagatcgcgggttaggtggcgacaggcgatctgacgcacgcctcgccccatcccgtcaggacgagggcttctaggcgcttgtccccagctggagctagcgtgttacctcccagagatggcacgttagccctggtcagatatatgccaggcttcatcctaaccattacaggcaagatgttgtgtgaagaaggacgaacatatagattgctaagctgacacgtggtggacaagaatgaccgacatgactggtctgacaccggtcatgtcgtcagcagacagccacgattccacgtcgcatctgctcccggcgaaagtggaggtagttgtggaccgtcccatcagaaggtgactcggacggcaactatacaaatctccgtccatttatgaaaagggtgcatgtggtatccccttaagataaaaaaggaggatcttccccacttagagggaggaggagacttttccagattgggaacctagaacgagggagaggctggctcatactttgtagttccttcatacacaaatccaccaaaacacaggagtagggtattacgcttctgagcggcccgaacctgtatacatcgccggcgtcttgtgtgcttcctgtctcgcgaaccttccacagattgggagcttagagtctcacccagagtccccggccgaaccggcaaaggggggccagcgcggtctcccggtgaggagccccacgctccgtcaatgagcatgatccaaaaactaaacagctcttggaaattctgccccttcagcctaaaggatgtgaccacttccagttggttaatggggtaattcgatacaaaggaagaatatggcttgggcatcataaggaagcacaacaggcagttttgcttgcattacacaacagtggggttggtgggcattctggtgttacagctacctatcagagaatcaaaaatctgtttgcatggacagggttgcaaaaggatgtgcagcaatatgttgctcagtgtactacttgtcagcaggccaaagttgaacactgcaagtctccaggtctgttgcaaccattgccagtccctatgcaagcttggatgactgtcagtatggacttcatagagggactgcctaagtcaggcaaatatgacacaatcatggtagtcgtggacaaattttccaagtttgctaaatttatccctcttgcacacccttttactgcttatacagttgcttaggcatttatccagcaggtgtatgatgtctttgggatgcctcaggttatcatttctgtcagagacaggatttttactagtgctttctagcaggagctgttcaaactagcggatgtcaaacttaacatgagctcttcttaccatccacaaaccgatggacaaactgagcgcttaaccagtgtttggaaggtttcctcagatgcacagttcactttgctccatctaaatggtccagttggctgtcccaggctcaacactggtataacacctcctaccacaatgtgctgaataaatctccatatgaggtcttgtttgccagaaagcctacacattttggccttgtggatgtgggtgcaagtacagtgccggatgtgcagctttggctccaagagagagctcatatgaatgaacttttacatcaacaattactaagggctcaacagaggatgaaaagtcaggctgataagaagcgttctgagaggcaatttgctgttggagatcgagtttatctgaaattgcaaccatttgtacagatgtctgttgcccgaagatcttgtcagaaactgagctttcggtattttggaccgtatacagtgttggaaagggttggcgctgttgcttaccgcttggatttacctgctactagtcagatacatccggtggtgcatgtttccttactcaaggcggcaatcaaaccaggcacccaggtcagttctgatctccctctcaactattctgacgaacaatctaccattcagcctgaagcggttcttcgtcgaagtctgattaaacgtggcaagagtgttgttccctgtgggctgatcaagtggattggcatgcctgaggagctggctacttgggagaacctgcgccaactccggacacgttttcctgatgctactgcttggggtcaagcaggttcttaaggggaagggaattgttagactccaggagtcttttattgcttggcttcactattctatttgggatttgggcctgatggccttgtaaggtggctggtgcgtgagtgaaggcctagttgtgagctgtgtactagctggaacctttatatactttgccgaagcgctggtcgtaggcaacgaataagaaaatacaatatcaccaacctcctctccaagtcaattctccactctgttcttactcagttcctcttttcttcctcccgaattgctcgatccgtgcccagtttggcgtttcgccaagggagatctcactgattcgtgacatgctggcgccgaagaccttgtggactatggtgaacttgtggggttcgtcggccgggaagaagggcgcaaagatgcaatccttggtgcaccgccgccgcagcagcttgcacgacgcgcacggcgacccactgcacatcgtcccaatcctctctatctaatgttcacacacgtataaaacgcttatacgaatgacagtggcggtcagtgacgggccacgtggcggcggcggcggcaacgacaacgtgggagaaggagacgcgcctctgctgtggggatcggctccgacggcggattgctacctctccgcccgctgccgcgctgctccgcccctttggcttcgagcgccgtcgctccacccgccgccacccaatccgcccctttggcttcgcgcgtcgttgctccgccctgctggctttcgccagcctgcgccgtcgccccgccggctttgggcgcatcgccattccgcccgccgtcgccccacttcgccttcctacgccatcaccccactccacccgccgccaccctgccacccccgcttgcttcgcgtgcgtcgccgctccgcccgccgtcgccccgcttcgcctgcctgcgcgccatcagcccgctccgtcgttgctcgcctgctccgccgttcccctcatcgcccaacgctgcggggccgcttcgccgccggtggtgacacaacaccattcgtgaccggccgccgccctcgccttctctcgcgtcgcagccgccgcctcctcctttctcgcctcgccccggcggcctcctccccagcagcgccgctggcttgccagagaagagaagagaagagtgagagagagaggaggaggaagggagaggagaatgaagagggagggtgctgatgtggcatcttgacaatgtggggctgttaacaaccaaatttggtaacatctatgtcaggaaagaagattggatcaaagcaaagttggaggcggagatcgagttcggaaacagagcaggaatcggctgaagtccaaatcggctacgattaggatcagctgggtctgagtcgggttgagtaagccgatacagccgattccgacaatacgaatcgtacgcgacatcgggttcaagttaatgtatttcaagatgattgccacgcacgaatagagtcctgggaaggcaattgtatctattaattagaatattttatgtaaattccttatagataaatgtcggtgacatggggccgggggtatcgtgactagaggcttgggtagccgcggtcacccacatggcctgaccccctcggggggggggggtcgggcccgagggtgacgtggccacccctccctctgtctccccgaggggtcgggccgctcccgtttcggccccgagggctagggcgcccccgtttcggccccgagggctggggcgccccgaccccctgtggttttggcgccacgtgtgtgggttaggtgagcacagcggggctcacctaaccgcatttatagcgggttggacgagcgcgccacgccgcatttaatgcggcgcagcgcacgcttatccggtccgtgaccggtcgcggtgtgtgaccggtcacagaccggtcagatcgcgggttaggtggcaacaggcggcctgtcacacgcctcgccccgtcccgtcgaaatgatgagagcttcctggctctcgtccctagccggagccggcgtgctaactcttggagttggtatgtcagtcccggtcagatccattccaggcttcagcgcaagcatggcaaggaagtcgctggccattgaatgaaggttgaaatgggcgtccaccgggaaagctggcgagcggggcaggaggcgtgtgctctgcttgtcagaggtcacttccggctgtagactagccctcattgtaaaaagcatgtttcctttcttaggcagctggaggcccatgtggtgacccctgaccagataaaaaggaggcccaggcctaggagagggagaggagggagaaaaaaacaggagaaaaagaggaagaggggttgggactctggcgaatgggggctagagcctgaactctctctcgctctccggctctctgtattccttcacgcacagatccaccagaacacaggagtagggtgttacgcttctcagcggcccaaacctgtctacgtcgcccgtgtcttgtgcacttcctctctcgctgacgttcctcagatcgagggcgaagaacctcacttagcgcccccggccgaaccggcaaaggggggcctgcgcggtctcccggtgaggagccccacgctccgtcaataaatataggcaaaagtctgccgcaaagacttgtggtatcttagagtttgatagagataatagtcgtgtccggtatgggcatatcttgtaattctcaggtataaatagaccccgagccttatgtaattaacaacacacgttcaatacaatcttggcgcatcgccacccttttgctttagttttgtttcgacgagttcttgctttcgggttgagctgcattggtttcgatcttcaacaagaggtaaaactcgttatgacggattatgtttttacgattagtgcttccatctttatgatactctaatcttatttatataattcgtcgagttatcatatatcttatataatctctagcaatatcgccacctaatctactatcggctaacatctgtacgcagagggcagctgattgggttagatcttgatgttgatctagattataagagatatctaccattctatgaaacttctagcggcttgattgtctagatatcgttattcttttcatacttaatgttgtatcagttgagtttgacctattgagtcgtgcttagaataccgatctatagcctgccttctagttgccgattagaatagcgtcagagtttcagccgatcttatctgatttacttatatttgttctatatgcttcattgacatgttaaatctgccctctatatcaagatattgttgtgtctaagtatattaggctcttgttcagtatattattcttactttaatatcctgatatagagtagtatcggagtattagccgatacatgctagatctatctgatcggctatgctataaacatatatagtcctgttattgatatatatttcgatctaagtgatttatactgtctcggcatgatgaccgatctatcccaatcacttgatttaagtatacatcgatataaggagtatatatcgtgaatatctacagccgatcgagtagatttagttcttctttacttattcatgactgtcgatcgatgcacagatgacatcggcttaaagataaatgatatgtcatcggcatctagccgatcggctatcatttatagatttaaccacggttcctttgcttatatttcttgttgattacaggatcaaatcaactggcacgctaacacatctgaaggcgagctttggatctgcactggagttaagcagatctcctaggccacgtgttttctgtcaacagaggcccacgtgggtctcacgttgactcagccgccacgtgggacaaaaccggggtcaaaaccactgaaggacccaaagtgaatggtttttataaagggggctactatataacggaatcccgttttcgaacgggatgatcccgagtaggtatcaggtgtaatacctatcaggtatcagacgattctacacatgtttcaggtgatacttgcaaagtatcatgtgatacttatcaagtatcatacgatttctaccatgtatcgcgtgatactcgcaaggtatcatgtgatacctatcaggtatcagacgatttctaccacgtattgtgtaatactcgcgaggtatcatgtgatacctgtaagatatcagacgatttctaccacgtatcgcgtgatactcacgaggtatcatgtcagatatcgatgatttctactatgtatcacgcgatacttactaggtatcggatgatacctaccaggtattaggtgattcctactagatataactggacatctcgttggggagaggagcatctcgacgcgcggccggccacctgcagtcgtcccttgtagacggcgacgacggcggcggcagcgatggacgggcgcagcggcgacggcggcagcgggcgcggcggcgacgacggcggcggtgagggacgggcgcggcggcggcggcggcgagggacggcgacggcagcggtgggggcgggcgcggcggcgatggcggcggcgatgggggacgtggacggcggcggcgggggacgggcgcgcgttgatgccttcagccgcgtcgcatggatgagaatcgcatctgtggaggaggagtatcctgctaggggacgggataaccctagcattcccgtttataaattgagggatgccatatatctggttttgtggttggggaacgttttgtaactcgatgacaggttgagggaccttcggtgtactttttccacaactcgcagggcgacagggtctagcagatcaagcgaggccgaggcccaatcgagtttgacgagccggggacgcagaatccaactcctcccggtggaagtcaggttgggctaggctggctagccaagagggcttttataggctcctgggacgcatcgccctgcttcggcagtacggcgtcaacttctccgcggatttgttcgtctctcatctcttccgcacgccgctgctcctctgcctgttcgtccatctccgaattctcttctcctttcgactctctttgattctctctctgataaaaaggtcgttttttctcggtttgttttctcatctacgtggatgttgccgatcacaatcgctcgcggaacaccgctgtgtctagcttcatgcccctgcggtgttcgtcgaattgcccggctgggcatcgatgtgtgaccagcggttcaaatgatcaaattccagtgtcgttttcaggtattgcgctttcactctagaatcacgcgtttatctcagcaatttcttccgttggactgcataaaatctggatgtgatgctcggcagtatcgcgctgttcaggttggtggcatgtcgcgacattgacttgtgcctcgcggcgggttgatttcctctgctgcttggacgcatttaactacaaattgacatgaatagtactaaattagcatggcctttttaatggttgctggactcaactgctcattagctacgtccgttatgaaactttgagtttggtataatcgaacgtggctatttgctgtttcaatggtagttgatgataagatcctcttttttttttctaatatacgagacattaggtaatgcacaggacaaaagctaattggccatataagattgatttgactacttgcttattcgtgatacaattgtgacacaagctgcatacgcttgcagctcttatgtctgagcagtgttataataattaggtgactaggatgacaaagtagccaagcttatccttgttttttttgtatgattcaacccttcaacgatgttaatcttgttgaagcagtaaatcggcagctcttaagaagtgagtgcactgggctctaaaacacttttcaactgaaagactgaaatgcagaactttttaccatatttcctcctgataccactgtggcaaccaactaccatagactactgttttttttaataaaaaaaatgacaccagtcacatgctttttcttgatgccaagccatcaagataccgaaatcaaaagaagcaggtgatctagtcatttttgatcgatgtgcatcttcatttcattggtttgttgacctttcttgataaattattttcagaagagaccttttgcaaaaaaaacaagtgtttgtcatgtatgctgtgattttgcttgaactgagcgggattaattggatggaatcactgaaagtatgttattttttaagttttatggttagatgacaaaaatactatatcactgaaacacttgctcagagagaaatctaattaattacgcgtgtgggtacctcattattgaagaaatcagttgattaaatatgccatgctgactttattctcctgttcatatgaaatagtacagatttggttgcatcatttatggtgacttcctaaaggtatgactccacaggcttagttaaactgagacaattcagttgtgttcacaagggaaattgttgcctcttattattatataaatcaaccagttgcacattactagttggttctttgctcagtttaaatggactctgaataaataagtacaactgattcatgttctgtgaggattactgatcagtcttcctgatatttcagtaaaatgtactgaaagtgtacaagcaggactataccaggtattcggtagaactaattttaactcggtggagtgtacatctccaccagaccaccaccttggttcgagttgtttaatactttgatccaatttgtgtgctttttatctgttttgttaataagaaatgtagttttcctacatgttttaattttcatctttgttccaattatttacttaaaaaatcaataattcaaattattgctgatgttgcttaccaatctccccagtattaattaaaaggtgtgtcatgtaatcacaaaatgaaagggggcttgtctatttgtattcagaggtaaagataaacgacacaggtacacaaatttaaaccacagctgatgccattatgagctgtcgttgaattgttattgcatggttgacaggtttttaagttgctctcttgatgtccagcaggtgaagcaaggtaatttctcaagtgatgccttggacataaacatgtcaagctgtcaactcttcttagttgagaggcagtacctgacatttaactcaagaagaagagaagcaatttgtattagagaactacaaaacctgctgaatttctgggctatggtacattcatgttctcgtaccaaggtttgcagtcactttacttagaacttacctctactaaaatctgcttcacttactagaagaagtcgtttcgctgactggccgaaccgtgcttgtcggggtttgagtggcactattttcttagagatagtaacagctatgcatgaactcatacaattgacgcccccatgtgccgtagtgtattgatgcctgtgcagttggccttcccgtatgtgtgtactcgaactgttaagtggatagtaaaatgcacagcttcagggtaaataggtgtaaaaaatagtgtgtgacagacttgacaatgctagtgctattgtggttacccagcatacttgctagaaaagggtgtgtttagttcacgccaaaattagaagtttggttgaaattaaaacgatgtgatggaaacgttgaaagtttatgtgtgtaggaaagttttgatgtgatggaaaagttggaagtttgaagaaaaaatttgtaactaaacaaggccttaggaaaatggataatcattcgtcatgatcatatacgtcagatttgcaatttttattgtagcttgctgacgcaggatttgccggccagagcagtgaaaggcacctccaggtccggactccagatgagagctacctcgaaagataatgcctatccagcaggcttcgcagaagggtccatgcgaaggaatttccctaatccagacactttaggtaaccggtcacatcaaactcaaaaactacatttgggctgagtttagatccaaactttttcttcaaacgtccaacttatccatcacatcaaaactttcctacacgtacaaacttccaacttttccgtcacatcattccaatttcaaccaaactttcaattttgatatgaactaaacacacccttggtctagtcatatgatgttgtatatctatgtactaatacatgacagtgattgaactagtataagaagtctacaaggcacgtatgttctctgtacttgagcatgtagatgcgcatacatctgaaagaaaacacataataagggagattgagggaggggcttctaaattctcgaaggaacattccgtcgttatttatatatcattcaaatggttgaaaaaaaataaaaaaaattcaaccaaatagattaatatgagatagatcactccacaaatatgcaagttaaaattcaacttctacatgttgaaaaaaaaatagaaaacactatggctagttaacgtgttttcacagtcaaatttgtttttttcgttacaacttgtgaaagttaaatttgaccctacatatttgtggagtgatttatcacatattaatctatcttattaatttttttttaatttttttataatcatttagatgacatgtaaataataagggatatcgccttgagaatttataatagtttcccgggagattgatcagggtgtacattgcttgctcattgggcaaaaccctgtttgaaatttgagaaagagatagagagatgatcacaagggtttgactttgaccagggatagaggaaggcgcaacgctgggagcaaatgaaaattgaccattgaccggccgatcggtatgacgagagattagcccgttccttctgcacagagacaaaaacatcactggagccacaccagcacatgttctaaccttcaggattccaattttttaatgtggaggtaatagccattcgcctgcaggtaatcacttttttttttctgtgcaagcttctgttatatgagtatgttttcgccgggtgttttatgagtatgtttgctttttttttcttttttctctctcattgtttttttagaaccaacagtaccagtgttgaaattgatcttgtttatttcgtttgggagaaacctgttagctgtgtttgagacatctgaattttgtgtactctgaaattgatatatgccttgacatttactattttatttcccattgacagattatacagtgacatgccgagcaacaaaccggcctactatttttcttctttccggatggagtcacgatcgctgttgcacggacattttgtctatgacgcggtaagagggagggaaaaaaaacagtacatattatggacgtttgcgttgcagccttgcagttgcgggttagcccgttccttctgcacagagacaaaaacatcactggagccacaccagcacatgttctaaccttcaggattccaattttttaatgtggaggtaatagccattcgcctgcaggtaatcacttttttttttctgtgcaagcttctgttatatgagtatgttttcgccgggtgttttatgagtatgtttgctttttttttcttttttctctctcattgtttttttagaaccaacagtaccagtgttgaaattgatcttgtttatttcgtttgggagaaacctgttagctgtgtttgagacatctgaattttgtgtactctgaaattgatatatgccttgacatttactattttatttcccattgacagattatacagtgacatgccgagcaacaaaccggcctactatttttcttctttccggatggagtcacgatcgctgttgcacggacattttgtctatgacgcggtaagagggagggaaaaaaaacagtacatattatggacgtttgcgttgcagccttgcagttgcgggttagttggatcagtaggaaggtcagagagtttctgcaagcagagaatcagatctggggaatggaatggcgcgagcaaggaagcaaccaaccgtccacttccatttataagtcgcggctcgcgagctagcaaaccccccttgctacatcaccaacccccacccttttctccatttcgtggccaactcctccgcagacctgcccttccgtatgggccttcccggccgtcgccaccgcggcgccatggccggccgcgccctcgtcgtgctgctgtggtgcgtgtccgcctccgtgttcctcccctccgcccgcgcgcagaccaccaccttcaccagcgccatcgacggcaagaaggcgaccaccttctccttccccacgttcgacaagtccctgatgcagctcggcgccaacctgaccttctccagcaacgc

SEQ ID NO: 9875 - DNA, 1044 bp, Oryza sativa
aaaacccacagcaggaatatttatgaagtacatgcattgtagatccttcatattcagtggaatccaacatggaccaaaaagggatttgggagaatatagagagaagaaactcagatgctatcccacgacaacaaacggcagaagccattgtgtcttgtataatttcctcccatttctcaaaggtaaatcttttcacagtccatgacaatgcgaacacctccctcctgcatctactgaaaccatgatttggtgcagaaaatgtcacttgaacacctaatgctgcattacttgcaaggacgagtgttacttcaggtcgaagtttcaatgtctccagaaattatgatccggtaaattagctcttccatttctatcccaaatcttcaccttacaagtttctaaccctgtgttttttttttctccaattgctcgacccaaagggatgcaatggacattgcaaagcaagcggaagaggagatactgaaggctgattccagcataagccaagtaagcgtacagctaagattgggccagcaaattaagcaacttaagctgccaggaggcaaaaatagagcgaagaatcaacaggcacaaatgcagtagcgtcagctacactgtcacggttgattaggctgttttttttttcttttttttttcaaacattattcgatcgacttcgcttgctgctgagtgctgaggcagtagactagttctagcttcgtacagagtgatcttagcctgttcaggcttcagagatactactatggagcagtatatatatatatatatatatatatatatatataggacactcatatggggcaccatggtgcccgggcaccatggtatcaaatacacaaaatcactcaaatttttcaaaattttcaaattgtgagtatatacctagttataataactcgattcatacctatacctatcaacaaaacaactcaaatttaactttatttcacaatccatgattacatacctaactaattatatgtatggatgctatatacctagaatcaaaatctaacaaaaacaagt

SEQ ID NO: 9876 - DNA, 4174 bp, Oryza sativa
atatttatattaattatatatagccattctatattaaaaaatatagtaatgatatatgccgtgcaaatggagacttatcaagagaatccatgttggttttgatatatttaactgattttaaatttgagcatattatttacattattttcaaatcatgttattttaaatcatattttgtagtattgttgggatcgtagaatcgggatacacctaagatttcgtaggatcgtgtagtaatgaatagtaggatcgagatactatgaaaattaggatactatgtgggatcagtatcgtttcggcttggtaggatcgtagtatcgtaagatactaggatacgaatcgggatactgacaaccttgcttctaatgttccttattttttaattccgaatttcaactatttctaaattgtatttctatatggactctagtctccttttctaatattccttattttttaatttcgaatttctgctatttctaaattgtatttctatatggactctgttttttcttttttcccgattaatgtgaaaatttctaggccatgtgagcgaatgtggaggctcctttttctattcctttaataatataatagatattcaactagatcatatggcttgtgtagaagcattattagttaatttatctttccgagcagatgtctagcgaataatcttgctgtttggcagcacattttaacggaatttagggtgccaagttggttgcatgcaaagcaaataaatgtctgaggcaaatgagtaaattaaatataactactaggcaggtctaatagtatttctcttaaaaataataattctaagacataggggtagtatcaccgttttgatattttctttaggtttatatacacacacaattaattaatgccttttgttaaaagttcctttacaagttaattgtggtattaaaaaggattaattatggcaggaaccagaaaatatgtaagcctagagagaaattagtctatcaaatatgatagtattggcatatattcttctatttgcagcatgcaatttcataccactagtaaacaatcgtctgtctaaactaaattcatagtactagaatattctaatctggattctaaattgctatattttaataatgaaatgaatatataaagttaaacgaaaattttacccacatgaagcaccttcttacctacacacccagttattaccccactttcttgacattgactgtcaacaagaattgggagaggtccacagatgggggcaaatggagaggtccacagatggcggtgactcgacgaggaggaaggctggcagcggctcgatgaggtggaggagcgcagcggcggctcaacaaggaggaggaggggcgacgatggctagacaaggaggaggagtggtggcggcagctcgacgaggaggaggaggggcaacgacggcttgacgaggaggagtggtggcttgacgaagaggagcagtggcgatggcttgacgatgacgaggaggaggggcggcagcgttagggtggatccggcggaggctcggcgacggatctagtggcaccgaggcacgcacgcggcggtggcgggacttagtggggagacggtggtgcttcggtgagggagggagcactggcggcggcggctcacagagaaagggagcatcagtgcacagtgaagcgacaatggctcgtggagggtgagagcagtggaaccggagggtggagggagtggtggtggctgctgctccgcacggatgggctcgggagtttgccgtcggcgacgtggtgtcctgctgcttgacatgttttttttctttttctttttctttttgtttttggtggacataaatttgtgccatgaaattttgtttgattcagtttaatatatactaattgcacaaaactgaataaaaaactttgagaaactaggttaaattcacaagggtataaatgaaatttttgtcttgagttaacaccgtcatgttgccttcacagaatagggtcaagccccattttcgtttctaaaaaagagagtcaaatgaccaaatcagtggttagtcttcaaagtagggtaaaaaacgcaattgccctatcatataaagtcacccgattatctccaattagggcttttctaaaggagacatcaagtagtacgtttgtgaacacattggccaacacgacatttttcttgctagcaagattattcaacgaggtaaataacttatcaaaagaaatgtctcccaaaacctcaaaattgagttccattatgaatcacaaaagatccatgtgagagaaagagacgatcgacatggatgatccctccaagcagaggcgttggcatagtacagagaacaaatcggagggaaggacgagacaacatggtgaggggttgagaactatacatgcttacgattgtggcaaatggtgagtaaataaattgatttcagctctacaatgtggtattttttcttcacaaaagccagattctacttctcatcggtcttcacaaaccaatgtagtgacacgtgccaaaagcgagatgaaaagatagcttgtgtcttttgctgggggaaggcagaactgaaccatgctatacaccatacattgacctatcaatcactttcggacattgtttggataataggattggaaaatgatttcccacccatcaaaaggtatctttaaatcctaaccattcattctccctcttccatttaatcctaactcttcattcatttcccaatcccaatcccactctccatttcccattatccaaacacaccctcggagactaattagtagttggcaatacatatttatttgtaaaagatggaaacctttgtactatgaaagtttgacgtgttaaaacaaaggtggttagctgattcttttaattgttattgtaagccatatttagatctgtaagaaaaaaaaagatacaactaaagattaagtttgagtaatacacttgacatccaaatacatacagttttgttctaagaagaatccaataaaaaagaagaagaaaacaaacgaagagaaataaagaggatcagattctcgtggccgagtttgctccgtagtccacattggaatcaaaggtgtgcattctcatgtctagcatgagagtgagacagctgacactaatgtttttacaagaactagcatgatggcccgcgcagattgtgcggctagcatcattatattttatctcatataatagcatgtatattttctcattatattattcaaatatattaaaatgacatcataattttaaattttgcaataactttatgaaactacaaatgtgtaatattcatattgtattttatatacgtgttagttattaattatttttaatatcaaattttagttatttgtaaattatatatatttctatatggactctagactcgtcttttaatatttctttttcttaattcagaattttctgtaaattgtatttctatatatactctaggctcttcttccaatattatttatttttatttctaaatttttattatttctaattgtatttctatgtggactctaaactcatctatcaatattctttaatttttaatttcgaatttcagttacttctaaattgtattcctatattgactttaaactcttattcccatgtttttcttaatttcgaattttagttatttgtaaattgtatttttatacggactcaaaactctacttttaattttattatgtttattctgaattttagttagttttaaattcctatatggattctatactctacttctaatattccttatattttaattccgaatttctattttttttcttaattgtatttctgtatgaactctatactctacttctaatattccgtatttttaattccgaatttatattatctcctaattgtatttctatatggactctatactctacttctaatattccttatttttaattccgaatttcagatatttcctaattgtatttctatatagactctagtcacctcttctaatcaaggttgtcaggatcaggatactaggtagtatcgttttgctcaaagtaatatcgtatcataggatcgtatcgtagtatcgggatactgtgagattttctttttttaagtttaatttatatttatattggttatatatagcccttctatattaaaa

SEQ ID NO: 9877 - DNA, 2553 bp, Oryza sativa
gtctaattaattaggaatgtttggattttttttttttgctgaaaatcattttcaagaatgaaagaaatttggtctgtttacatttactgttccttgtttagtgctttacagtcttcacctttagaagtttatattcaagcagtagtggagacagggaggggcaggaaggggtctcgcctcccccaagcacactatatttactgtagcttttataaaattttaaaccgttagtattgttgggcccctccaactaataaaatccagtgtttctgctccgccactgtattcaaggctagctttcatgatgctacttgaagtgatgatttcactgatgcagtgtgctggaactagttgatgcagctgtggatccatcgcttctacaaccaatcaaggaaacaattttgcaggttgatggtgtaaaggtaatacagcctggataaatttcctttgtgccatcatgatttttaaaatgttaaaccgataagtcgaaaacaatgaaagtattgaaataattctagggatgccatcggttgaggggaagaaaagctgggacctccttatatcttgatgtacacattgaggtacatggcattgtgatttagtttattgctttggtatttattttttttggatttcaagatgagagccctgacagttttgtaatgtgggtgcttaggtgctaaataagagaaattgattatgatatctgttgtattgtaggtatatcctttcttaagtgtcagtgcagcacatgatattggggagactgtccgtcatcaaatacaaaagtcacacaatcaagttgctgaggttttcatacacataggtagcctgcaacctttaaaccagaatgctctctaaccatttggctactgtacgcattgagttctttgcatgtactaattggtatctctagctttttttttaatatcgcaaacccgtatatacatactgcctactggaatgcatttcattatgtgaaacaagctattattatatgttttgggcagctaccttgattgtgcattatcttattttagtccaatctatggtttgcgggactgctactagtatgcatacttgttcaaaaaaaaaagtgtataaatacatcttttactcatagtactacgattatgtaaaactgttagacacagagaatttagtgttgcaggcttgaaattttagagttctaactcttgtggctttctgaaaagctgttagacacatgcagtttgtattgcaaacgtacagttctgaagtacatggttgtgcaattaaccacgagacatggttgtgcaatctttctcatggttaattgcacaaccatgccaaaacccacagcaggaatatttatgaagtacatgcattgtagatccttcatattcagtggaatccaacatggaccaaaaagggatttgggagaatatagagagaagaaactcagatgctatcccacgacaacaaacggcagaagccattgtgtcttgtataatttcctcccatttctcaaaggtaaatcttttcacagtccatgacaatgcgaacacctccctcctgcatctactgaaaccatgatttggtgcagaaaatgtcacttgaacacctaatgctgcattacttgcaaggacgagtgttacttcaggtcgaagtttcaatgtctccagaaattatgatccggtaaattagctcttccatttctatcccaaatcttcaccttacaagtttctaaccctgtgttttttttttctccaattgctcgacccaaagggatgcaatggacattgcaaagcaagcggaagaggagatactgaaggctgattccagcataagccaagtaagcgtacagctaagattgggccagcaaattaagcaacttaagctgccaggaggcaaaaatagagcgaagaatcaacaggcacaaatgcagtagcgtcagctacactgtcacggttgattaggctgttttttttttcttttttttttcaaacattattcgatcgacttcgcttgctgctgagtgctgaggcagtagactagttctagcttcgtacagagtgatcttagcctgttcaggcttcagagatactactatggagcagtatatatatatatatatatatatatatatatatatatatatatatgggcaccatggtgcccgggcaccatggtatcaaatacacacaatcactcaaatttttcaaaattttcaaattgtgagtatatacctagttataataactcgattcatacctatacctatcaacaaaacaactcaaatttaactttatttcacaatccatgattacatacctaactaattatatgtatggatgctatatacctagaatcaaaatctaacaaaaacaagttcaaattcagttcaaacttgctttgaactagttagtaaagtagctaatgttaatatctaagtaattgaaaaagtttcatactcatttgaattaggtatatactcaatttcaacaatggtgcccgggcaccatggagcaccaaacaaatttactatatatatatatatatatatatatatat

SEQ ID NO: 9878 - DNA, 7343 bp, Oryza sativa
cgtctctttctctcacatggatcttttgtgattcataatggaactcaattttgaggttttggagacatttcttttgataagttatttacctcgttgtataatcttgctagcaagaaaaatgtcgtgttggccaatatgttcacaagcgtactacttgatgtctcttttagaaaagccctagttggagataatcgggtgactttatatgatagggcgattgcgttttttaccctactttgaagactaaccactgatttggtcctgatttttcgagtttgctcatttgactctctttttttagaaacgaagatggggcttgaccctattatgtgaaggcaacatgacggtgttaactcaagacaaaaatttcatttatacccttgtgaatttaacctagtttctcaaagttttttattcaatatagttatgtgcaattagtatatattaaactgcctcaaacacaatttcatggcacaaatttatgtccaccaaaaacaaaaaaaaacatgtcaagcagcaggacaccacgtcgccgatggcgaactcccgagcccatccgtgcggagcagcagccgccgccactccctccaccctccggctccgctgctctcaccctccacaagccattgtcgcttcactgtgcaccgatgctcccttcctctgtgagccgccgccgccagtgctccctccctcaccgaagcaccaccgtctccccactaagtcccgccaccgctgcgtgcgtgcctcggtgccactagatccgtagccgagcctccgccggatccaccctaacactgttgcccctcctcctcctcatcgtcaagccatcgccactgctcctcttcgtcaagccaccactcctcgtcaagccaccgttgtccctcctcctcctcgtcgagctgccgccaccactcctcctcctcgtctagccatcatcgcccctcctcctccttgtcgagccgccgctgccgctcctccatctcatcaagccgctgccagccttcctcctcgtaaagccgccgccatctgtggacctctccatttgcccccatctgtggacctctcctaattcttgttgacagtcaatgtcaagaaagtggggtaataactaggtgtgtaggtaagaaggtgcttcatgtgggtaaaatttccgtttaactttatatattcatttcattcttaaaatatagcaatttagaatccagattagaatattctagtactacgaatttagacagacgattgtttactagtggtatgaaattgcatgctgcaaatagaagaatatatgccaatactatcatatttgatagactaatttctctctaggcttgcatattttctggttcccgccataattaatcctttttaataccacaattaacttgtaaaggaacttttaacaaaaggcattaattaattgtgtgtgtataaacctaaagaaaatatcaaaacggtgatactacccctatgtcttagaattattatttttaagagaaatactattagacctcgcctagtagttatatataatttactcatttgcctcagacatttatttgcttttgcattcaaccaacttggcaccctgaattccgttaaaatgtgctgccaaacagcaagattattcgctagacatctgctcggaaagataaattaactaataatgcttctacacaagccacatgatctagttgaatattcttctaaaaacattagtgtcagctgtctcactatcatgctagacatgagaatgcacacctttgattccaatgtggactacggagcaaactcggccacgagaatctgatcctctttctctctcttcgtttgttttcttcttcttcttctttatgggattcttcttttgtttttacaaactcaaaggtttccatttttataaataaaataagtccctttcatatgaatatatattgccaaccactaattaatccctgagagtaattgattggtcaatgtgtggttatttctaccttgcccccacaaaagatacaagctatcttttcatctcgcttttggcctagatcacgacatacatatatatttggtttataaagactgaagagaaacagaatgattgctgacaggtgcttctcctagcttttctgaaggaaaaataccacattatacagctgaagtcgagctatttactcaccatttgccacaactgtaagccccaatatctgtcaattaatgtcaacaaggtgggggtgagcaggcaagaattaaggcgcttcatgcgggcaaaactttggggttgcagagcttctatactgtttactgcaaaattgcatgctatggatatccctaaatagaagagtatacggagttactgtcctgcttgacaatagtaagatagtttagaagtatgaaaactatatatagatgttaatttgttgagcaacaatagtaaaatgcaaacaggaaattttgggttgacatgggacttttaaatcctttgtgaatatctgaataagaaaaggccctaattaatcgtgtgtgcacgtaaatcatgatctctaaaggactacacatacccatttgatggaagaacccactctcatctcaatcacattttggacggcccggatcattgtgagattcatagagctactgtgcctcaaccatatcctgtcctcctccttctccctctactcgctcagatcgatgcattccagtagccagcctcccacaccaccgccattgcactcgttccccctgatcttgtcaacgcctacgaggtccctctctcctgctcctcaatccaacgggggtgacgtggccccgttccatcatcttcctacgctaccactttctcaccactagctccactttgtccccgttgttcaacccatgtggcttagcttcaatgacgatgccgtcataggaatccctccaaacccataaaaccccctcccctgttgcaactaccccacctccaaccctacaaccgaactcatctggctattgccctccccccctccggagggatctgggatagagaggaaaatgagggaggggagggccctccggccgctgttgttgcatgcggtggcccccaccaccacccttccctccaccggattcaggagggagggaggtctccgccgaccacctctgtgccgcctctgccatcgctccccttcctccggccggatctacaaggggaggtctctgccaccgccaccaccatccccgctccttgctctggctggatctaggatagggaggggaggggtgctgcctccgcaccgccaccgtcgctccgtgccgccgccgtcgctcgggaggggagtcgcctctacgtcgccaccattgcacgccgccaccgtcactccccttcgtccggccggatctaggagcggggaaggagggagtagccgccactgtcgcttcctccaccgtcgtcaccgtcgccgcgtctgcgccaccactgtcgctccccctcatccagctagagagagggggaaccgcctctgcaccacctccacgtcgcaccaccgccaccctcccctcctccgatcggatctggagggagggaggggagggggaaggacaacacgcatgagaatgggggagatcgggtgaggcgagggagggaaggaataatggtggagacttggtaatggggtaggttgcgatttttgtaacttatgaacttttttgttggcggacatataatgtctcgcctgtaaaaatcgaggtccgcctgtaaaagtaatggtattcaattttcacatgcagacaatgatctcgtctcacggttgtcatttttgtaggcggccatatagctccaaaaggcctacgcgtctggaaaaaaatgtcaccgtctgcaaaatggttttttaatagtgttacacgtggttgcagaacagcatcagcatgataaacgcacctcagcatgcaaggtcatcgtccataatgatgatgagtggacacaagacctcaagacgaacagaagaagataaagatgtcattatgcagctgtgcatcagtgagaatataataatgtcaataattcagcaatttttgcccttatgaactatactttggatgcatgacgtcaagataaccttagcacaagatatgccataactcttaccacatctagaaatgccgcatgcattttctgtttctaaattttgtagaaataccagggaattatatacttccttcattttaaaatatttttggaaacatggatttatatacttcattcatttcaaaatatagcatcttctaatgatttattttaaaatatagcaatttctctacctaaaatcttatctcaaccaattacagtcatctctcatttattttttttggtgacttcctcatctcaacaattatagtaatcatccagtaataattttcttgtttccttaatcacagcgaaaaactaaaaaaaaccattaaattttagaacagagggagtagtattcaaagtaaatatataacatgtatgatgtataaaattaaattaaatttattttacaataaataaaattagaattgttctatttcattgttacgattgtttatgtgtcgtcatctggtatattttgggatcaatgactgaagtcgagaagattagtcgtcgttccactatcgactaacttttatatagcaaaactgatgagacaattggatcagattcagacatcaaaacggaaaacacaaaacaaagatttcatcagcgtgcagaaaaattcagagaaacaatattgatgatgagataaattcagcctgatctagatgtgtttgtttgtaggatggccatatgctggaagaaccgatgaagtaaaaaactgatcaccgaaccgaccttgccagcagtcagcattgggagtcgtcatcctccttgtacaaggcgtagaggcagtggtcaatcgcctctctctaggctgttgaggtgagagacagcgcctagcgcgtggcgacgctgtgggtggacggtggacacggcacagcgccacagcctgacctgccggatcagcaactcgtcatcagagacggaggccaccgacgccgccaccgccgctacaagagagaggaggagatcgaagacgaaatcaaatgtgtgccatcgtgtgggtagcatttggcaacagtgcacgatctctcatcggcaatagaatcggcggcagctccaacaacgtatcatccgaggagggcgcgtctaaggatgcggaatcagacgcattggacgaaatttttgtgccggccgggggaagaaatctcagattgtggcgattggaaaattccaattttttaagtaggtaagataagataagataagataaaagttgcccgtgcattgtaatgggaaaaaaactaatgttataacgatgattatagtttattttaagaaagaggaaacataatcttcacttattggataacttacaaattcaaaccattttgcatttccacgtatcctaaactgtatgtatggttgattcccaccagccaacaaaatataaaccatcgaagcttcggattttatcaacccctttcaacatgaaactatttctctcaattattttagaacatttcaataaaaattgaatttagcaaaatttatttagttgtgaccaaattttgtttaacattttaaattaatgtagaccaaaattgtcataattccaaaatttttatcctatcgatgttcaagagaggaataggtgcaaacaaatagcatgtacaatgtcggtggttatgtaacctatttttttcttagctgctcggatggatcataactgatgatactaaacatgtaggtgaaccaatcacatgtaaatagtagtaaaaaatagacacaaggaaagacaagcatgtgtgtattcttttttactttacaccgctgaatgcaatgggcccttcggtttgatggtcaaatctttgatgcatcaatggtcgtagactatagcaccacaaactcttgcatccttatctcttcagttgtagggtgctccatcactcttgcatccttatcttctttttaagtagtactgttgccaacctgactatggacaactacctaaaatgtataatacgggttcggataaaaatcatagttaccactgctccaacaacagaaatgtacttaataatattaacaatgcgtatataactaagatgagcacacttaatcaaaaaattgccagtcaatacattgatatatttttggcaaaacaaggcagggtttaatgttttggtttgaaatttcaggaaatttgttccatgatatgaaattattttagctaaacgaattaaggaaaaaaataacaatacattgttcaaatttcttttttttttctcagatcagaaatttctgaacttctatcagtaccccgaaatataatcacgattcgtattgaggtgtttttctaatatgtactttctaactctgtatgttctactataaattcagtagatgagagagtttttaaggcatcagcgacagagtatgctcctacctgaaaggttaggtattgcaatgtagcacaaatagtactcctatttagcaagagatttgcaattgggattctgccattttataacaagtaccttggctatagttttttttttctttttgggagaaatacctgcctgtaacttcatggtcacccaacatacagccatacatgtcctgaaactggaagcatacaagcacatgcaaggggcggcaatcagttatcatgcacagttgagaattgcatcgccccggaccagaaaatccttacctgagttacaaacaagaaagaaaccaacatggcagcaacaattcctgacaggtttattgcaattcataataaacagaagtatagaacttcatgcataaatttgacactgaagaaagaatcaactgaactacgtagcataggttgcatgcaaattcaattggtagtagacgattctgaacatcatatcagaaattgcagtagcctacagagatgcatataaaacatcaggcacattgatggatcagcagcaagcatgattcgatcatttaattggacagataacaaaaccatgcatcataattcatactcctattagtttcgactttttaccaatacatctgtggacagaaaatctcacctcccatcttttaaattttagaccgttggatgtgctttaagattcataaagaggcattaaccctagctctcctcccttttccctcacgtcgcgcgtattcagccgccacccatcccatcactattatccgcccgatccccccgccgccaccgccccaccacgccgccgcccgcctcgccgactggccggagggcgtcaacggcgccggtgagacctcc

SEQ ID NO: 9879 - DNA, 12751 bp, Oryza sativa
cacaaggataaatcatgcaaaagtgagaacccatttattttgtgttgttttacaaagaaacaggcagctaagacaagcttatgactacaaatattatgaagtacatagagaataaataaatattaaaaaaattatcatacctttctccatcaaggataatacctgttgactgtaacgaaccaatgtaccgcactctatcacctgaaaaaaaaagaacatctgaagatcaacaaatgacccacactcgcttgaccagtttgacaagaataataagttcattatactcgcattactactaacgctcagccataaacttgcaatacaacaatgtcgatggcctatctttggaaagaacataactagggttgtgagttgaaactcagtacaaggcaacaatgtattatgtatgtccttaccctttttgtatgaatctgattccttggtagtcttcccctgaaataagaaaaataatgctcagagtctttattacttaaattcataccataccaaaacaagtgtttacaatttttttgctcaaaaaggccagcaagtaagaacaccaacattggttgaatggcacaggtacaacaaaaagaaataacaacaataattccaataagaatacagataaaaagttcataaaaaaaattcttggctaacataaatgaaaaaaaaggtataattgctaagaagcttacaccaaatagcatggaagagtctatggtgagcaacctagcaccaaagtgttttgcaagtgccttaaccagatattgttggtagatatcggttcctgtaaaaacatatgttaccacactttacacatagtaaaattaaattaatcattggaaaaaaatagtagcattatacaatacaataacaccaagcctacagaatgcatacagtatgtacctgccggaccagacagcagtactcgctgactaagagaagaaatatcttttgtgaacttgatatagtccttgcagtgcaaatttacatatgctgatgactggagagcagatttggtgttctcactacataaacaaaagagttattagaatatagttcatgacaactatgcgttcaccgtttagaaaagaaatggcttgaggaactagaaggaaagtatttttttaaaaaaaaaatagaaggaacataaaatagttgatatagcccaacgtccccaaggcctatgtgtgtctactactctactgtagcccatagtgctgcaagggcagcgaggagtcaactcaatagtatagatttattcatactgggagaccatttggaataaagaagtgattctatggaagcatagataacataaatctaatgattttattcagtcactaaatccatatattgctggactaattgtatgtcagaatttacaaaaagaaattacaaaagaaacatttgagaataaattggaaggaacaaggaaaaaaactaatatcaagcatttacatctgctgcaaattacagatagaagaataagacttcctagaagaaataacagcaccatatgtctgcaaactaatatcatttagatgagtgtggaatacaatgatgaagcttatcaagagttccaaactaagatgcacagagaccacagaacttaccaaccatggcatttcaaggccaaagaacaaatactcaatctcataagtattaacaaaatttattacaacagtttacagagatatcctaagaacaaaaatagcagaattataagccatgagacaggcagctaagtacagtttaccttagataatatggacagctatcaaatgtctcggagatttcactaggatcaatagttgcatttttcaaatcctcctccaataattgacaccaagcaaatggtgtgttttcttcagagttaaactggtcctccattgttttacatagactactgaccagatctggatccgatgatgatcctgcaataatgcttacattagcatctttttctatcaggtaaagtgcaatttcaaatgaaatacattaccaacaggcatcaaaggaggtcgactctttccaaagtaaaaggatgttactttggcctccttagatgaaaaaatatccttaaaatctttgataagcgaatgctgccccggctgaacactacaccaagtagaggaaaatggcgatgtgcttgatttctcctctggaagttgctcaaatatctaacatcgcattaaggactttcaaaggcaaaatatttaattgtctaatcattgcttatcacttaattgaaaatcttattatgcacaagtgtccagtaaaaatcaaatcctgttggtgctagcctcaaacagagccagtaaggaacccactggataaggcgtaggcaataaaaaggatacataagcatgcctcacaggtgtattgaaaacaacttcatcccctccacataacgtaactttattagtcttgtcaaaagactttccatttacacgaacaactttggactcgtagatttcaagaagagcacctcgctgatacatgaaataaagataagacagggtacataagacgtgaaatgtgtataacacaggaacttctaaaacaccacgttaccttagcatgcttcaatctacaaacaagtgagttggtatatgacccttccagtctcaagttatggtgagctccataaccaacagtaaaatgcgaggcattaataggaatggaaggattctgcacattaagaaagaaatgcagtaaatcaaatgaagagcagagagtgtattatgaatttgctagaagtattacgtagctactaactaatgttggcaaaatatatgcaatagcaaaaataacaatagcgctgtttcataattatacatgcttgcgatagaattgttatgtaattcgttgtgtagtaatacaattcctgcacattgcaatacctattgatggcccaactgaaatagcagtgaaggtttagttagaggaaaaggatttatgactgcaagatacataacacatttaacacttagtggattcataacatatttaacagttagtaacttagtggatacaagcatatttaacaatgtgtctttaatttaggcattcctggagaacactaccaggttcttaatggcataatatacgaattttagttgtttgtgaacattatgttatagaataaattgtatttatatatgaaattaaactgttcgctgataagctccaaaaacatagtacaatttcttattaaagattggaggagcaggactattctgaactaagaagttttacgaaaatgtagtatgcagtaagctgatgagtagaaatgatgttgttgacaagtaacaaaagtgttcatgagtctaatttatcatctaagcataaaaaataaaaaatatattaacaatgagcaaatcgagttcacggttttattgacccaaacaacatcaagaacaaaccgcgcagccagaccttagcatgttgagatattaatctgcaccagggctcctggcgcctgttggccaccgggggcagccgctttttggccacgccatccgccaaatccttcacttccttcaactttgcttgtaaatccttagcaagagcactgcgcttatggcctgcagcgacgattcatcagaccccgagggccaatccaaaacccccgtagtcttacccaccagagaggaagaaaccgtaccggccgaattcgataccgcctcgccgggcctcaggatggcctccagcctatccaccgcgccggtcagagcctgcagcccagccgtgtcaagcggcggcaccgccgcgcccccgcctccgacgaccacaggcgtagcatccgccgccgacgccacccccgacgccgacgccgcctcctcatcctccttcccgctatccacctccaccgccacggcctacaacacaacacaatccaacagccaccacagatcagaaccccccgaaacagacgcccgccaccgccgcgcacggaagggttgagatcccgcccgcaccttgccgcgcttcgccggccttcgccccgccgacgcgggcgcccccgccccctcccccgccgcagccgcagccggcgccggcgccgccgccgccttctcctcctcctggtcctcctccgccgccgggcgcttcgccgccgcgctcctcctcgtatccaccatctccgccccccctcgatccgcgaggggaagagagagagaggaagacgagataagggcggcggaagagagaagagagagagagagacgcgacgaagcaaggaactcgcgacgcgagagaagggaacaaaatcgaagagaaagaaggtaagagagaggtggtgggattgattagtggggaagcgaagaggagaggaggaggagagaaaggggcaagcaaatgggcaaatataataggcggccaccaatgatacgggcgagcggcgcgcgcgacaggttaggctgcgctgtctcgatgagggtcgagggccgaggcgatttggggaagtttttttaatttcctttctttcttttcaggggattttgctgcttctgctgccctcttgcggatgaggattattcgggtgtttgagtggcgtggggctggggattgggtactgtcgtgctgactgtggtgtgggagtagcagagagtttgggccgtcgtcgtttggcggttcggccgtccgtcagtccggactccggaggcggaggaactttattcaaaaacggggagaggatttttaacggtggattttgtgcgtgttttgcgaatgtatgaactttaaccgtataaggattaatatgttatcgtaccaacattaatctggatgcctagtttagtttgtgtactaatcagttctctatgttttgatggtagatactccctctgtaccaaaataaatcaacttctaacatcactaaacctatgttctaacttcgaaaacaggtcttctcggcctttttttctcaatacacgtatcctcatatacgtaactccgatggcaacatcgctaactgttcctaataacgggactaacctctttacaaccgtaaccgccgtgctttcctttactccgataagtactccctccccaaggaagtacttatctcacttccacaaaaatagcaaacactaatatttctttgctccgaggaatcctaccttccccaaaggtagaatccctctcacttaaaaacactagacattagggtactaaaaaaacgcatggtttccgggctcgcctctttgaggggccttcgctcggggacaacctcgctctgggtcttacccaccctcgagtttaatctcgggtgggcgcttaggcataccctattcactggaccggatccgcatcctaatccaaacaaaatacatactagatcctagacttcacaaacctggtgatcggcatactgcatacctacacgtccagtcattgggatcgagtgaaaagcacaagtgtatgacacactcaaatgtcatatttcactgtgttcagaaactcattcattcacttccaagaaacttttcatctagtttacttgaacccctttcaactaaaataaaccaatttctaccttcttacctatcatcggtccacaaatcgaaaagttttatctcttcaatacccctcgcctacccacccatcagtatattaattagcggtattttggtcatttgtctctccccttgagagtaagtttaatagtataacctatcgttggctccaaaaatctccacatcagcaatagagctagagggtgtttagatctaggggtgtaaagttttggcgtgtcacatcgggtattatacagtgtgtcgcatggggtgtttggcgctaataaaaaaataattacaatatctgtcagtaaaccacgagacaaatttattaagcataattaatcagtcattagcacatgtttattgttgcgccacattgttaaaccatgaagcaaataggcttaaaagattcgtctcacaaagtagtcgcaatatgtgcaattagttattttttaccctatatttaatacttcatgcaagtgttcgaacgttcgatgtaacagggtgtaaaattttggggtgtgatctaaacaggcccctagtgaataagagcagtatgtgtacaaataagtatcccctccgtctaaaaaaaagtccaatcctgaggatgtatttgaacatacatgttgtctagatacatccttagaatttatttttttttgacagggtagcagtagatgttaaatcatctacacccaaatagaatacatctattcttaatttcttaatctaaccttttcacgtctgccaatatccttttgctctctatccaatcattctctccgtgagaaaagaactactccttcgtaaaaaaacaatctatgagaggatataaccctcctagtacaacgaatatagacaatgtctatattcaccttggaactaataggagatatggtagcatagatagttttcaccttggagcgtgtgagcagttgacgcttatttattcgctcgctttcactctctgtccactcatttagtcattcacactctaactcatcaatttttctgacatggatgcagtatagccaacaaaaaatgatctattgtacctgctctaaatccaccatgtgaaatcaggattggagttcttgtgggatagaaagagtagtctattatgttttgatggtagatataggactatgttttcatggtagatagaggatttagcattgcggaagtttagtggcgttagcgttaaactgaatagtatagcattaagattttgatgatgtatcggattttggttagaatttattaataccaagtgttggtaaactctttagccaaaaaaattaaaatatgcctttacggtttttacgcgtctgtgtccatcattaactcctccgtttctatccaaaaaaaatatattctttatggttgacatggtttcttttcctcccatgcttatatctatatctatttatatctctactcattctaatcgggtattcctaaacaattctgaagttagtctctactattataaaaattgatgtttttaccggtatttagatacatcatttgtatatgagtcggtttttaaattcgtttgcttttgaaaatacatatccgtcatccggtgtaaaaaaagtgagaaaaaagaacttctatcgttaaataaaaaaaagtccgaccccaactcctccggtggaaaaaaaaaaggagagacgacggaaaaaaattgagagaaaaaataaaaaaggagaaaaaaattttgtcgtaaaaaaacgtccgactcctccggtggaaaaaaagagagagacgacgaaaaaaatagagaaaaaacaaaaaaaaagagaaaaaaaacatctatcgtaaaaaaacgaccgactcgaagtccgactcctccagtggaaaaaaaaaggagaaaaataacttctatcataaaaaacaaaaatgctgtactccgggcgaccggcgtggggggaactggatcggacgctcccccgcgcacccctcccccacctgtatatctgctatctgctagacccatctacttctccctccattttttacacaaaagatatttcatctagtatatttacaatgtttcactatttatagatctaatgttgcagtgaattaaaatattcttttgcaacaaaaaacccacatattttggaaactctctattaaggaatttggtttattttttgttccacagaaaatgtttcacctaatgtactcacaatgtttcactatatatagatctaatgttgcaacgaacgaaacattccattaaaaaaaaccaacatattttggaaaccccctattaagggagtttagtttattttttgttccaccgaaaaatgtttcacataatgtactcacaatgtttcactatatatagatctaatgttgcaatgaactgaaacattctttcactatttactaaaacattgtttttatatagggtgaaacaacacctgatttaaacgagtgaaacattttcgatctacttagtaaaacaattccgatatacctggtggaacatagtgcaatatttaaaaataattcaataataagttaattttttttcatcgaaatatatccatgtgtggtcttgttttgaagatttaattgcaacgaatttaatcgtgcaatcggatcatgatttggataagtttggataagtaatttaagagataaatcagtttaaagtaattttgcacataaatcaagcgctgacgtcatgctgacgtcagcgcccgattttaccccctcccgaccgggcgcccgaccgggagtcatctccgtaaaaaaaaacgtccgactccttttaagaaaagtccgagtctgctgtggagaaaaaaaaaggcgagaaaaataaaaaaatgaaaaaaaaacttctacagtataaaaaagaaataaaaacgtcgtctcctttaaaaaaaagtccgactccaaaaaaggacttcttgcccgtaatcttctctgaaaaatatataaaacttgaagatgtttttactgatactttggtacgtcatacgtgtatgggtcggtttttaaattcgtttgcttttagaaatacaaattcgtatttgagttggtttttaagttcgttcgcttttggaaatacagaagaaatcgtataaaaaaatctttgttaaaaaactcgtatgctaatttgagacggtcggactcctaattacagctcttgattttctaacaaaacatatatccaagcaaatttaacacagtgaattttattttaactaaaccatataacaaataatattaaaatagccttcacccgttgcaacacacgggcattttttctagtcaaagaaaatatcacatgttgatggtatgctaactccaatattgattaaggaaactaaatgtataactatccgtttactaacactacttacacatttaacctattactaggtagagctgagtaatgttgggtgtaaacagtaagttaagttatatacgactcatatacattacatgacgagtaacaataaagatttagtcagtgtgccacgtaagcaaaatcaagttagattgttatttatacttggtttaggagtcaaagggttgaataccttaatttaggatttttttttcttgtgcaaaacatgttaaaataggttggatatcttaaattgttgtagaagatgcgagtaaacaattgcaactataatattgatcattttttataggtgcaagagcgaataaacgagtaccaatgtaatagccaaataggtcagtaacttagaccatataaatccggcaccatcgattcgatcattgataacctgatagagaagctaccgatagataagcttcttaaattaggatgttgaatataccagcgatatagacaaataaagcaacagcaaatatgttgtacatcccacatgccaaaaaaaaaagttgaggaatatgcgtctagatttcaactgaaacaataatggtcatatacaagtactatgcagaattgaagattgactttaaattaagacatacagttagaccatactccattagttgggagagtgtctgacgtcgccaggtgagccgttcgtataggctgcaaccaccagacctggagagcaaagagatctggtcaaccgttcatcagttgaaggcgcacgctcacagttagcaccaccgttattgcgacaaacaaaaacactccgaaagaaacccctgcagcgtcaagcgcttcagccggcaacataggccttgtttagttcgcgaaaatttttttttcttttgtcacatcgaacgtttgaccgaatgtcgaaagaggttttcggacacgaatgaaaaactaatttcataactcgcctggaaaccgcgagacgaatttattaaacataattaatccgtcattaacacatatgggttactgtagcacttatatctaatcatggattaattaggctcaaaagattcgtctcgtgattttcatacaaagtatcatgatttttatacaaactgtgcaattagttttttattttatctatatttaatgctctatacatatatccaaagatttgatatgacattttttaggaaaaatattttggaacctaaacaagaccatagccattatagtggagtagtatacgtatagtttaagctaagcgccgtccgctgacggcgcgcgcagccgcaggcgccgcggaaaaaaaaaggcagagcagcagcaaagcataacatcgtcgcgttgcctgagccacaagccatcaatcacggtccacatccaagcatccgacgcagctgcagctacagaggctaaacgagacccaacatgcagcgatgccaccaccaccactaaacaaatactccacggaatatttcaccgcgtcatgtgccggtgcgtgcccgggtggtggccgcactctcaagccaggtctctgcgaaaactcgtactacacatgcaagtatccaacctgcaggttcagctcaactccaagcagctcggcgctttcggccggcctgcacagagaaaggcagccgccgacgacgagccgcctgcgtcaaaaaacgcttgccgacagcagcaagaaaggtctgacgctgcacccgccgtgacatgtctcttttgccgagagaagagcactcacccaactacatatacatcctcctaccaaaaataggttcattttcatatgtaaatctagacatagattcatcaattcctgttactactacgtacaccctccgtctaaaaataaaaaaaaatccattttatactgattcacatgtataaaagtgaacttattgttttaagatggagtgtataccgagcacgaaaatacaatgatggcatgaatacctggatataggcatccccttcattctaaaataaacaaattttgtgtatggagggagtagagcctcgtcagattgcaactgttattattataagccgaagctgtaggtgcactgggtgatgggtcaacaccagagaatcaagcataaagaaactgaacatgtggatgatcgagaattacagcagccacagtatcccagaagtccataacatcaggatataacgaccaatgttatctctcggacaccatcctgttcgtgctgataatgtttggacctcagttgataccgcgtcaaggtttactaacaaatgtgtaaactaccaaactatataccagcaatgtctaccaaaatctgacgtggaaatgatgcgaggaatatcaattgctccagaaaatgcataaccttgctagctctgattcagacatcatgcagagtaccttgatggttcctgctttaatctagcttatcagtaaataagaacttcgctgagcttttaccacctataatgaacagcggaggggtattcttgttggatgacagctgctttcacatcccacaacttaaccgcctaatctgcacatcataaaagtatcaaaccaaatatatgaataaatgttcataattccaaacatcaatctacagaacaacggaggatatcttacctaatttaaaatttcaatgtacaacatcacataatatcagggcgtctgactccagcaactttgtcccattcctctggggagagcatgtcagccatgtacttctcttgaccacgccaaaggatctgtaactcacacaagttaacaaattcaacatcttgcagagtgaaatgtgttcaaatacacaggcaatacaatttagcaagctaccattggagtacaacaaaaaagatcatgagtttcatgactgcattgtgcaacgaacagatttatatggctgactaaacaatagaaaactagtacggcttgaacttcagatatgccgaaaacagcaaaacaatagaggtttgatgaacggagaaacaacaataccttgtcaatgacaccaaactcctttgccttcaaggaatccatataaaatggtcctctcatcaccttgtctattttctctggtggctgataaaagataaatttatgttctaatgacaacaaggcaccaagtagttcaagaaatatattaaaaatatacacatacattccccgtgtgccttgctaaaagtctcactaaggtgttcctgttgtgcacaacctacaagaagcaaaagaaggtaactgtgactgattatgcaacataaaaacgggaagatgaacaaaggagaactaagatctcctgcatgccctgataaaactctcaccatagcagaaaatactaagaactaaaatcacagatcatacctctttcgcccgaataacaacatcagatgcttgcatcattccatatgaagggatacgaggttgctgaatcatagctggcatgatagaatcttttcatcataaaaaggaaacaatcaaggaaagaaagtactcctggcatattaatacctttggcatgagggaacatatagcgttttcctttctttcctgctgcaagtacaagacaggcatgacctgccgcagctcctatacaaagtgtatggatctgcaaatcaaaaggtaacttcattatcagaaaatgaaaaccagtaaaccacatgaacaaactcatgttcaacaacacaccctaattttctgaaaagataaacaacaggttttgacagttcaaagcatcagtgctcaaacacatggcaagtttgaagttacagtcatttttttattgaataaatccataaagaaactagggcaagactattatctttgaaagatttcatccagcaaacaagcaaatagcatccaccaataactcctaacaaacataggaataag

SEQ ID NO: 9880 - DNA, 26932 bp, Oryza sativa
tgtccacaacaaaaaaaaatgcatcatattaacccaaaacacggaagaagaaaccagacctcactctcatggagaaagaattgatgtccttgtcaagtgtatccaacaggaagatagcctgaatcaccatgttgtcaacgcggttcacattgaacttcaccttcgccctgctgtagctatgacccaggccaagctgcgccttctccaagtccgatttctaaagtaaatcacacaaaaccagaataagcaaacgggtgtacatacattttttctttacgagattttgaacttaagcacacatacaagatttttctttgtaacttatgcccaacgcatgcatttttctttgaacaaacaaacgcccacatatgcattctagtcgctatgctatcaagcaaacgaagcaaataaatcgttatatgctactagtaagagggtttgtggtgataaagcggaatcgtttatcaccttgagctcgctgatgaagcggtcgaagtggaggcggacgccgcggagaagctcctggacgaactcgttgctctggcacgggatgccggtgacctcggagatgtgggagccgaccttgggctcgacgacgccgaggctgtacttggccttcttcccctccttgggcttgggcaggttcagctccaggaagctcctcagctcgtcggtcatgatccctgcacgcggaatggcgtcagaaaaaaaaaacaaaaaaaaggagaagaagcacgaatcccgcctgagctggcggcggcggcggcgcaagaacgcgagaggaccttcggagatggcgttgcactggttgagggcgtccacggcggaggagaagggggtgaaggcggcgagcttgacggccttgccgaagcggtcgaggtcgacgacggaggcgcggacggcgtccacgctctgcccgatctcgtcgatgccgtaggcgtggaagaggccgtagccggacgccgactcgaagagcaggtacagcgccatctcgccggcggcgtcggcggcggcggcgggttgaggtttgggggcggcggcggaaggggggttagggttttaggggagcgaggggaggcggacaacggcgcgggggtggatgatttatggctcacgctgggttctccgcagccgttggatcgcgatcaaccattaggtgattattgccccttttttttctcatttctcttcctctttttcctttttgtttgatgagggtccttctttttccttattattgcatttttttttacaatgatttgaattattgatgagaaagtggttggttggatagtaacaaatagagtaattttcactttggtcaccttttattactactggtgttttgttttggaccacattttaactaatgtttttactttgatccgggtaattttgcatttatgttattttggaccacccttaacttctttttctatttacatcaaacttgtcgtatttcaaataaattgtctatataaagcggtgtgggtttactgatgaatttgagccggcgtacttgaaatcattcatatgcttgagataagagttagagtagtccaaagtataacaaaggtaagattacctggttgaaagtgaaaacaccggttaaagggtggtccaaagcgaaacaccagtaataaaaaggtggtccaaagtaaaatttactctaaaaattgagtaaatttcatcttccatcactttatattaccctagttacacgatgaaataagaatttataaatttttcacttaataataccatctaatcttaccaaaacatagtagcttcgaatagggtactgagttgagttattgcttgagtttctaccatggctatttggtccatccatagaagaagaaagaggtgaacacaagggaatatatgtgtagtgcgacattaggagtcagcccactacttgttcttgtgcagatatggcaaggagctcaacattgcttgccctattgcctagcccaaggttcatcactagcacctctggtatgccaacactcgagctaaaacccctccaatgttgctaatcccatacgttgatgctcctatctccaaatagggcgcccgatataatgaaccactatctctactccgtcctccaaatcaggacacaaaccatcgcccattgggactggggacgctcgctgctgccctactcctgctcccttgtagatcaggttgccaccatcaccactctcctctctcggttagatccaagttacacattgattgggctgcacaacaccgatagtcatgcttggtgatggcaatgtgtgcacgcgagagagagcacacacgcaatggtgtaggtgcatgggtgatgccatgatgtgttaccagatttggaaaatatgaggatgtggtcttgagtgaaacacatagtaaatagtaaagttacacggtccaaagtataaaatatgggtaagctatcagaaacaagggtaaaaatatacgagccaaactacaatttacttattttttttctttataaaacagctttacaaacacatattttgatgatctaattatgtgaaaaacgatcactttttttttgacagctttgatgccaaagttgcattatacatcgtggctttgtgtttctaatgatgcattttctattagaatttaaataattgatatgctaataaataattagtcccttttactttattttttattttttatgtcatttgtaaatttaaataattttttatttgttaactaactcgaaaaaagaatgtcgccgacaaatggcagacgtcgccgcgggtgatgggacgacggcccattacacagcccggcccggctggcacggcccacacggccacacctcaatcctcaataggcgcacgtgcgacgcacgcatctccctgtacaaaaccctagccttccccatcctcgcctcctcctctctccccccgcaccaccgcctcccctcctctcctctcctctctcccgccgaccaggagaaagaaggaaaaagaagaagaaaaatcctctgcgatggcgaagaagaaggagagggcggtgaacgtgtcggggaagccgcgccactcgctcgacgtcaaccgcgccaatgacaagaagggcgcgggcggcggcgccgggggcggcggcggcggccgctcggccgccacggtgcggcggctcaagatgtacaagatgaggcccctcagggaccgaggcgggaagatcctgaagcacgacctccagtccaaggagctccccaacacccgcatcgagcccgatcgccgctggttcggtgaggatcccagcgcccccctcttcgctttccccttttcttctctagttgggagttaaatgatactagctgaggagaaaagtgaagcgaattcgattcggctagtaactcggcacctagcagttagcatggctcgtatgcaccgtcgaattggtgtctgtttggtactaatttttgttgattcagctagtaactcggcacctagcaattagcatggatcgtatagaccgtcgaattggtgtctgtttggtactaatttctgctggaatagtagctaatgattgtacaagtgaaatttgtgtggtatgacttatggaagtgcgcgactcaatgtgctattcaattatggtagggacaatttgctggttgaaaccttttcgaaacgtcggtaaggtatgcttgattggtggttatggcttgatatacgatcaaaatgcgtagatgccttgaatgaacatttccctgttgcaatatttctacttccagtttgttccacatttgattccggtgacgtaacagcaagtctgcaagtgtgcttatttctgtactgctctgctcttgctacttacaggaaatacacgagtcgttaatcagaaagagcttgaattctttcgggaggaactccagagtcggctttccaataactataatgtgatactgaaagagcggaagcttccactgtcactactgcaggatcatcaaaaggtacaacttcttttggtcattaggctgtcgaaaatgttgggtcttcaatctattttggacattgaagaattaagtacttttgttaaaatacatggtgccttccattttaactgtggcgaagtgctctatagtctactgtctatatcagtgtaccgtatgttgcacttatgtatgtatgtttgcccctgttgatgatacagcaagctagggcgcatcttcttgacactgaaccttttgagcatgcatttggaccaaagggcaagaggaaacgcccaaaactaatggctcttgattacgaatctctattgaagaaagctgatgattctcaaggtacagtttgtatatatgtacccagtactttaatcgcttaatatttttagttatatgtaattactgatatttatgaagaccccaatttcctttaagtttgaaatcctattttgcaacttgggcaaatttatctcatgtacatgttgcactcatattccaaaaagatcttcaaattttaatttgcaggcctcctggccattttgctacttagaatcattaatgattgttgtagactattcttggccttgggtatttcttattttcagaagtcaattacatgagcttgtatgctgttatttatcaagaataccactatcaatgtcctgtactcttagtaaaatgttgagttttataggtgcatttgaggataagcatgctacagcgaagttgctgaaagaggaagaggaagatggcttacgagacctagtccggcacacaatgttcgagaagggacagagcaaaagaatttggggtgaactctataaagttattgactcttcagatgttgtcgtgcaggtaagtgttgtgacattttgtccttgcaaaaaatactctcactctgtcaaaccatccagacatctttggtgctttttttttttaaaaaaaaagaagtgggcattgatttatttgttgatcctattgttttgcacaggtgttggatgccagggatccaatgggtactagatgctaccatctggagaaacatctgaaggagaatgccaagcacaaacacttggtattcttactaaataaggtattgataagttccacaacaatacacagtgcaaaagacggactattttcatccttgtatggtggcacattgatgaatgatggtatacattttttagtgtgatctagtacctgcttgggccacaaaaggatggttgcgcactttatcaaaggactaccccaccctagcattccatgcaagcatcaacagttcatttggcaaagtaagctagcagaatcctgaagaagttcattgtttcaccataaatgaccccttacgcatttgaatcttttccagggatcacttctttcagtgttacggcagtttgcacgcctgaagagtgacaaacaagctatatctgttggttttgttggataccccaatgttgggaagtcatcagttatcaacacgttacgctccaagagtgtaattctcttttctttaaccggcttcacagatgacatctttttggtgaactttctgagtattttgtttgtatactatatccataggtttgcaaagtggctccaattcctggagagacgaaggtgtggcagtacattactctgactaaaagaatatttctgattgactgccctggggttgtgtaccaaaacaatgattcagaaactgatattgttcttaagggcgtggtatgtatctgcacttgttcgtttttgtcttcactttttagttagattgcacaaaacaaagcatctagtaaaacacctcactatattttttttcaccttgccggtacttttatgtacgacagatatatataatgcattttcgcaaacattatttcaacataagagttagagatgggcttgctgctgctatcttggtctgaggtggtatagaagtcccatgggtagcttttaccctggacaatctacaagactataactattgcctatctgtccggttgtccattaatgcttaaaaaaaattccagtaacacccaaggcaatccaaggatagtgtggattatattttatagttgtttattgcccttcagatatttttctgtggtcacacgctggagcactgccacttttgaagcatatatttatatttatatggatgtctatcctagttgattaccaggcattttaaagatgctacgtttgtgtacttatctagatgggtaatttcattcatcatgtatttgcatttgttgtcaggtgcgtgtgacaaatttggcggatgcttctgagcacattggtgaagttctgagacgtgtaaaaaaggagcatcttaaaagagcttacaaaattgaagactggtatgcttcttttaacatttagtttatggtttcattttaacaattgttctatatagatatgaacataacgcttattatttccacacaatgcgttccctattggataagtatgttagtatttgggttacttttcttttctcataaatctgaacattaagacttggcattttttatgacactattctgttagtttactcatagcatatttgctctcttttgataaagtatatccatgaagaggatgcgcttgcttgtagttagccttgtgatgctgttgtgcatggaaacaattaaaccattggagacagcacatatcttatgttggatatgttatctttctgcagggttgatgataatgattttcttgtccaactgagcaagaccactggaaagctactcagggtatggctttagcatatatgttgacatgttgtcagtcatgtttctatcaaatatattattcttgtggtgaggctttatgagattggggaattggagaattgtaattgtatactgatttacagtgttttacaaattttaacaatataatgtgtcaataagatgggttaattggatccatgccattctaaatatatgaacagcttaaattaaccatctatagaagattctgagcaaaaaaaaactatctttagaagattaaccaacaatttctgatggtgcttacacttgtggttcacagggtggggagcctgatcttacaacaacggccaagatggtgcttcatgactggcagaggggcaagattcccttttttgtgcctccaccacagcaaggtgaagatagtccatctgaaacagctgaacctgtggagaaatccgatgaggaaggggtgagcagtgacagaactgctgccgccatgaaagcgatagcgggaataatctcatcacagcagcagatgaatgttccttgccaaaaggaatttggtgtaactaatgaagatagtgaagtcgcggagcaatcagagtgatctacaaaaggctaggaaccctgcatgataaagaacagggcacaattttgccaaatacctagagattttatgaagatttggtgtctaacaggaatgttacgatgaatgttacgatcgttcagttcaccggtgcgttctactgcaacgaaagagcgttcactgcaacgaaagactggaatcaagggtgtgggactgggaaacttctgtaacttcatatattgtgtgggcctttgttgtagaccagatagagtgttttggtagcttaatataaccattttgttccaactgtacttgaaacaaatttattccgatacattaattccgcaaagtcgttcgtatttgtatggggtcaaaagtgaaatactcttttgttgacggtttaccttttcgtttcacctgcttggctgctgcctgaactgccccttgcttatgtatgcatccatatgggccacaaaatattggtttgttatcgttgggcggacctaaccattgaaaaagggaggaataagtctattatccatccctcaactttacgtcgagtttaatttccaatcctaaatcataacacaaaaaatcttcacccctatcttgataaaaccgtctgaatcaggtcccataacagtatggatggttgcttacgtcatcctagtcacggaaaataaaatgttacatgtaagtgattgagaggatgagggagaaagggtagttgttcgggctcccacgtaacagtgctgaggctgccaccagagccaccgccacccgaatcaatcctaacgagcgcccttcgaggactgcctcgccaccgttggctgcctgactacagtgaagctcacaactagccggaggagcttatcagtatgaagatgaggtgaagagaagaaaggatgtggaaagtagagggccactttgcaagtgagcccacatgtcttaaatttttttttactgattatgatgacacgtcagtaaaaccaaccatccatactattatgggatgggacctgacttgaatgattttattaagatggggtgaagatttttagtattgcggtttagggataacaattcaacttgaagtaaagatgagaaacaacaagtggacttattcaaaaaaaggatgaagtgttatgaaaatttccaactgacggagtataatttctgtaaatgtagcactattttttttatctattctaattttggtcattgctatgggtttagggttcatagggggtataaaatttggatttctaatttcttttagcatggtgtcgtagtcaacactaaatagttgaattaataaatatgaaaatttctaattaaactggcaatacgactaagaattgtttatgaaaaaataatatcatttatgtaggtttcagacggttttcatccaaagaaaaatgttttgatgctctgaaaggggaaaaaaggaatgtgtttctttaagacacagtacaagcatagacaattataaaacacgcaccctcactcttataaacatacacacaaacaccctacctgtatgagtgcctccagaagactagaccgctatcaacgggtgtgtcgcttaccgctgaaagaaaaattagccgtaaatgcgagcacccgtgtcagtcgtaagtctaagacttgaattcggatgagatggttccaccacaaggaacctaaccagctaaactatgtccacttcatggaaatgtgtttttttaagaattaaaaggaacttttaatagttcaaagcgcttggcatgtacaagttcacgatttggaagatcataagtgccacatttcaaattgtgaagtttaatttgcaaatttcagaaccatcctcgttaccttgtcttggtgggttaatcatgacatacatggcgcaaggaaatcttttacaagaactatttgaaacttcatagttatatactgtcggataaatacacacaatgtttaatattgtcgtgacatttcaatccttttgaagtggccaatgaaatggatgcgggaacacacactaaatctttagaagtatctaagttcttgaagtttttctcattctggtttcgttcgtaactttcttaaagttaaaatagtttaggctagggctgaaaggctcgatcatcgttcaaaaattgcaatttttgctaggcaacctctattgtagttgcatggtacttattctatgcttcattttctcacacatttccaaagctgtgtatacggggcttggatctcctggagttggcctcaactgcactaggtggatttcagtcaatcttagccattgtttctaatctatggtaagcatcatgtttgctacaaccgtttcatccacttagctcttcgtaaaaatcatcttctttagcggggtcaataataacccaatcatcaagccgggcggtgccaactcaacatagaacattaattgggtgacaccatgccaaagagaaaccatggtggtcaggcctaggcctagagcatgaaggagattagtagtgcaggaccgcatacagaagtctccatggacatctcgattgatcacgattaggtaggctagctgctagtcatcactgaaaactattggaagtcccattctttttagcaacaaaatatatatatcatctcaacttgtctcttgcatcaaatccattggctcgcacagtactatggcgctatggcaattggcaacactagatccatggggttgccttttggtttggcaaccaatgcttgggcctcagagtgtcttgcttggacggtttggagacttttgaggcgctctagggcaggacgattcaaggtgcagagattggtgatataaggacggagatgaatgatacgagaaaggagatgaatgatgtgaaattgtggaacaatcaagtttgtgtgaaaagaagtgacaattaagatccgctgaaatccatctcgtggagttaaggccaactctagatgatccggacctatgtatactactaaaaaatcgaacacgaataagtagggtctcaacatgagcccttaccttttgtgctagcatagttgccaaaattaagaatccagacgatgcatatcattcagtcaatgtttaatgcatatcccatattaaacaagtttcatggttctcaatgtgtgcgttattcataggaattaaaagaggaacttcaaaattggaacatagcatggcacaatcaatttaaaaaatgaggtcgttggacaaagtcatgcaccgatagaggctgtggctcatgcaatcttactagcaaaggtgagacgaataacatgaacacggtagcgtcgataaagagaatgctagagtgttagcaagcccaatcctgtcaatttagtggcctggagcgaagctagaaaaatgggccctctaatacaactatagtaatgtgcattttgggcaacatgatttcactctaaatttagaaataagcaagtgatttatgaaaattatgtcatactagattcaattcaacgttataataaaaatgagtgctggtaaattaccaagatgagaactagagaaaatgactattcactgtcctagttgcacagctgcaccgcaaggatccctaaatcctaaatcaaaatttcagaaattagaagaggagcaattgggagtaacattttgcatcccaaaatttaaacacataaacttagcatacatcaaaggggagagcaattgggtacctcctagtctcctagaattgaacagagagatcggatttttgcatccggctgccagttgcagttttgccgccgagcacgacgccgtagacatgtagccgcgcgcagtcgtcgacgtagcattgcgtagctgagacgcggctggaagggcggcgaatagccgaacaggcgactgcgagcgaaggcgaagcaatcggacggaatcacggaaggaagccaaatcgacacaattttttttcctgtacgtgtgcctcttcatctactgagctagtgggcttcctaattcctataggctattatgttagcatatatggggttgggcccccatcacttcgcgggccctgtgtggaggcccagctcgaccccctagggctgggcctgagtgttagctcagaagtcccacgaaatagaatgtgacatgagcgaatggtggtggcttggtggaagtcgacgaggagataataatgatgggaggttttggcgaatggcaggcgggtaattttctcttaatttaatgggcacttccatatttcattcgcttaattcttttggggaaggcaaataccacaccacatgccttgtgtaaaaggatggacagactcttgttgatattactggggaaaccgtgtaacaaatactcatttggtagaattcatcttgaaatttgttaaaatcacccaattgaagagacaaaatagtgggccgttcattagtttagatgaaaaatctggactcttgagtaaaattcgcatagttgcatgaccggatttaatgtgagaacgaaaaatcccgcgtccccccaacgaacccaagcgctagagagagggaaaaaaaacctctcgccgtcgcatgcactcccggttcgctttccctgctcccctctcttctcctctcgcgtcgtgctcgtgcctgcccccttcccagttccctccctttggcttggtttctctcaccaaatgccaaagccaccatgccttctctactactactactactactacccctccccaccacaacatcccgcaggcccccctgcccaccgcctccttctccctcctctccgtcctccccttttctccccccctccgctccccaaaacctaaccataatctccacgcctccctccccgccgccgcccgccgttgcgggggctcgactccaccctccgccgcggtccctcccgggggacctcgcgtgcgcccgcggccgccggctcctcctggttctccctcttcctgcttgcgtctctgcgcgcgtgggggcgggggcacggtagggtttcgggatggacccgcggcgccctccgtcgcgcgggggcgccgccgccaacggcggcgggctctcctactccaccctcttcaacctcgaggtactgcctgctctctctctctctccctctctgtatgtgcgtgcttcggtggatggtggttttgacgcgcgcggtagtgccggtgttggagtggggggcgcgttgtgattggggtgggtattggtagtgctcattgtcgctgggttttggagaattctctccgggcgctgtatcatcacttggttgtttttttaagcctcagttcgatcgaggttttagttgtgtctcgcgggattgggagctcgttagttgtgggctaatgcaggttactttgcatcggtgttgcgatcgtctgtagaagccgatgccccgtgctactgttctgttggttaggactcaaataagtgtgtgccacataagtgttatgctgtttagcagtatctagttgtttcctgagactggttcagtagtttgctagatcttcatgtagacttgggctactttagtggcttccaccgatcaaagtttcgtgtgtttcagatagtgacagagtgatacgagtatcgtgatcatctgttgtgccattcatgtcgctaatcaaatgttgatgccggtaacttggtcgttatattcatgcaacatttccaatatcgcatgcgcgacgatgatgaccttgttttgttgcgattgcatgccatttcttttttctgaatttagttaatgctatgtttcgttcatagatgagtattgtcagttgctggcatcatctgtgtatgttcctgtgttgtctgttgtgattgtggtctgcatggcgtgcaacatgctgctgcactgttatcattgttctggcagttttgttgttttttttatcgctgttcttttattatttttcttgataagtatggtcatgcataataaagttttttttcttgacatgtgtgatccttgcttcgggtttaaatttattttatttgataaggttatgaattgggggcctgcaagggtacattggtttactacgtaatcgcatcttttatcttgtcatcctttgtttttgatactactatagtgttattgttgcttgtctatccgtttggtctatatggatgcaggtctctttatttgtctttggtagggttgaaaattatatatagattttgtcattgtgaagcatatgtcttcccactcatgttaataatatggtttactttagttgaatttacctccattctgatgtcaagtttttacatgaactgctgatgcagcctttgctgaactttaaggtccccttgccggaagatcttgatcgctataggcgtagtagcccaaatgggagtatgagtagccaaggtaaaggctatttaaaaaaatccacctcctagcattgacactccatcaaattgtggtcttgccatttctttacatatatctacttctgtgtttgttctgcttaccctacttttccttttaggtcaagggtccttgtcagaccagtataatggaattaatgatgcttcccatgggctacatcggaagcgcaaaaggaatctggatggtgctagcgatgatgatgaggtagatgcctacagtaaccaaataactgaggagcactaccgtacaatgctgagtgaacacgttcagaagtacagaaggtcaaagtttaaggaggatgtttttagttctgatcctcctcaggtgatagttcctcagaaacacaaaaatggtagtgcaagagttacaaagtacagaagtgatacaaggaatgttgcaatgttgggtggggtagaagccacagctgagtataatgggacaaaatctactaatgcatatggtggtttcaataaggttgtagcttcactggattcttcctatttagatatgggagataatgtaagctacaaaatcccagaagggtatgataagttggcactatcccttaatctacctgttttttctgacatacgtgtcgaggaaactttcttgaatggcacactagatttacgcactctagcggcaatgctcagtacggaccaaaaatttgagacaaccaatcgtggtggattagctgaacctcagccacaatatgaatcactccaggaaagggtaaaggtgcagaaattttctcttcaagtaactgaggatcccttcgcaattccagaaggagcagctgggaggatacggagatttattatttcggaatccggcagtttgcatgttcattacgttaaagtcttggaaaaaggagatacatatgaggttggttggacctgttcaaatattgatagcatgcttttgttttctatatacttagcagttaacctataaatgcagattatcgagcgtagtttgccaaagaagcaaataataagaaaggatccttctgaaattgcaagagaagagtcagaaaagactattaaactttggcatgctattgctgttaaaggcattcctaggcaccacaggaatttcatggctttgctgaagaaacggcaagtagatgctaagcgtttttctgagaattgccaacgggaggtattgcacttctctatcttgttggctattttgtagtttggttcactctagtttttgatcttgctgagttaatagcaatgctgcagctttattgagttttgtgtttaaaatgtccaggtaaagttcaaagtaagcaggtcactgaaattgatgaggagtgccgccatacgtacacggaggctggctagggatatgttgatattttggaagcgagttgacaaggagcaggttttttttaatctcttaagcttattgttttttagttccactgaaaccaaattcggaattattgccttttattttttttctaaacaacagtatatggggctgaatactatttaaatacttaaacttatgagttgtatatggctatgtatttcagttcttccaagccactgaactgaaaccaaacaacagtatatggggctgaatactatttaaatacttaaaattaggggttatatatggctatgtattccagtcgttccaagccactttaatttctatatacatggttaaaacttaaaaattagcaccaagtattgtattgttttgcatagcacatgtttttctttttgctgatttttcttatgcgatcttatgatgggagttatatatcttttttttttgtctgtttcatagtatgaattgaggaaaagagaagaaaaggaggcggctgaagctttgaagcgtgaagaggagctacgtgaagcaaaaagacagcaacagaggctcaactttctcctatcccaaactgagctttatagtcactttatgcagaataaggctggtgaatcagcaccatcagatgaggcatctgtccctgaagaggatgaggaagatcctgaggaagctgaattaaagagagaggccttgagagctgcgcaacatgctgtctcccaacagaaaaggatgacaaatgcgtttgatagtgaaactgggaggcttcgtcaatcatctgactctggtattccaactgatgatttagctagtatggagcctaacaagattgatctattacacccgtaagttccactcgactggtttggttgtccttgttcagaattgagcatgttagaaagaatgaaaggacttctaacactggtttctttggggttatcttattttcagctcaacaatgcctgagaagtcgtctgtgcagacaccagaattgtttaaaggtgcactaaaagaatatcagttaaaaggtttacagtggttggttaattgctacgagcaggtacactgttaaaaagttaatgcatctgatcattttctgtgacttctctgctgtttcacttcaatattttctatttcttgcagggattaaatggtattcttgctgatgagatgggtcttggcaaaaccgtccaggctatggcattcttagcacatttggctgaggttggtgaatttgccctttcttaaatccatgttatctttctactattggattaatacccaatgaagcaatctcttttggcctttgtgcttgatcttggttgattcatgatttatcatcatgttctatttcttcctttagaagcatcacacaatgtgtaatttataggttcaaatattaacacgcgtgccaagcttttgatatagacatgtacaccatgcaggacaaaaacatatggggtccctttcttgttgtggctcccgcatctgttgtgaataattgggctgaagaggtaatcaggttttgccctgatctaaagatacttccctattggggtcctgaaaggatggttcttcggaaaaacatcaaccccaaacgtctttatcgaaggcaagaagtatttattatcttcatttgcgttccttccatttataggcgcgtaaaactaaacatgtgagttttgccctttctccacagagatgctagtttccacattctcattacaaattatcagatacttgtgaatgaagagaagcttttgagacgtgttaagtggcaatacatggttttggatgaggcccaggctattaaaagttcaagcaggtaacaattcatcttgcaagtcctttcattttgttgaaaaccaaaatttcatggctcatgcctgtcttcatttattcatctgatatttttccttcgttgagactcttatctgggaattattgtattttatcttttcctccctctgctgcagccagcgatggaagacattactgagttttaactgtcgaaatcgcttgcttctcactggaacacctatacagaacaacatggctgagttatgggcgcttcttcatttcatcatgcctactttgtttgacagccatgaacagtttaatgagtggttctcaaaagggtacttacctacattacaaattatacattctttgttttagtcattatctttattgcttatatttctttggcctgccagaattgagggtcatgccgaacatggaggtgctctgaatgaacatcagcttagtcgactggtaagatacacagccctacactgaacggaacttttatgcatgttatggtttagttaatcttttgaatagtcttgtttgagactgacgtggaattataatgagggcttgaattctcaaatacagtacatgactaaatgacagatgctcaattctcctgttttggacaaagttctgtatagctttggtatatttttgagattatataacttgttctttttctccacagcatgctattttaaagcccttcatgctccgtcgagttaagattgatgtcattgcagaaatgaccaaaaagaaagaagaaattgtgccctgcagattgagttctcgccagcaagtcttctatcaagccataaagaataaaatatctcttaacgagttgcttgatggaagtcgtggcaatctaaatgataagaaattacttagcctgatgaatattgtgatgcagctccggaaggtaacattagcacaacaccttcttgcatgtgatcaatttacttgacttaataatcattaaggtccctttagcaatttcagctaatgtttactctgttgtttctcattggatttcctcccaatgtgttatgtatcacatttaggtctgcaatcatccagagctgtttgagcgcaatgaggggagctcttacttttactttgctgacatcccgaactcacttctttctcctgcatttggggaattgcaagatgtgcattatgcagggaagaggaatccaataatgtttgaggtataattaaacatatggtcagatttttctgtttctaattggcgtacttgcagttaccttatgtattctccttaattgctaactaaactgataggcttctttctgaaccttttcagattccaaagttagtctacaaaggaatcgtctcgaacatggaaatgcctgtgcgtggttgtggatttctatatggatctttcaacaggatgtttaatatattttcgccaagctacatccatcaatcagcttttccagaagctatctcaccaaataatactgttctgttatctggtgcattcggttttacacgtttaataaatctctccccagttgaagcttctttcctggccacttgctcattattcaacagactagcattctcagcagtgcgatggaacaagaagtacaccgatgaacttgtggatgtattccttgactcagaaagtactgatcttgagtccactcataatgatttaacaacagttcgtgctgttgttcgcttgttgctttcacctacaaaagcagagtccagtttcctaagaacaaagattgagacaggcccgagtgatagcccatatgaagcactagtgctttctcaccatgaaaggcttgtgtctaacataagacttcttcgttcaacatatgcttttattccacctgctagagcaccaccggtaagttcctttattttatgtgatgacttgttttcccagttctatcatttgtatgttgcatcaggctgtgtatggagttgtcttacagtattcttaggctactctagtattaaaagtattcaaaacttccatatagtgtaggaaatgtatttattttatctacacaagctatcaatgctcaattggtgctactattgaatgactcattacccttttctttcgtttcagataaatgtctggtgcgcagaccgaaattttgcctacaagttaactgatgagatgcatgatccattggccaagaaactggttctgggatttgctcgaacttctgagttcaatggccctagagaaccaaccagccctcattctctgatagaagaattacatactgatttgccattccccgagccgatgctacaactgccatataggatatttgggtcatctccacctatgagtaactttgacccagctaaaatgcttacagtaagtgttctctaatttcctctgtccatgatgctagggtattgcctatttagatttttcttcatctgcacaattctgtcattcatagttgtatttttttttcccaatgaactgctcaattgctttgaaaagctctaagatttgtgtagaatataactttatcataataagttggttcaaacacctgaataaaggacaaattgtttgtgttttcattaatatgcttttagctgtaccagtgagttctttttactaacatgaaatgctcaatgacaggattctgggaagctccaaaccttagatatactgttgcggcgcctccgagctgagaatcaccgtgtgctcttatttgctcagatgactaaaatgttagacattcttgaggtagtactggtcacttcatgcttgtccactttacacttaaaagtataataccaccataaggtaattgagttttttcttaaaaaaaaaactaaaacaagtgacttttgcttgcgccttttactcataagtgatatagagattctctaagtgcctggagataagttgttttattgcatacaactttagatatgtttttggcattctgcaagtcaacaatctttggtcaattatcagatctcaatacaaaatactttatgctttgaaccgaagcatgttttgtaatatttaccattagacactgcatatgtcctatactacatgtaggccttacaatataagaatattcttgtagcattagggtagtgtcatgacttcaatatgtgagtcttcgcttagcatatcatctttcaggagtttttagtttccatttcttttgctggcactgtgaattgcatcaaccgaaaagtagatattggagtatttttcttgtatttttgctcactaaagttgagcccctttctaactactcagcaattatgcattgctattgttctaggactacatgaacttcagaaaattcaagtatttcagacttgatgggtcatcggcaatatctgatcgacgtgacatggtccgggacttccagaaccggtatgcattagtggataaaggataatgtacagtaagatgatctaacgccatgctattcaaacatggcttacctgaattttcttctctgcaggaacgatatatttgttttcttgctaagcacaagagctgggggcctaggtattaatttgactgctgctgatacagttattttttatgaaattgattggaacccaacacaagaccagcaagcaatggatagaacacacagacttggtcagacaaaggaggtaactgaagcttcagttataaatactttatctaatcatagtactatagcttatagtgtgctcctcagctacgtatttcttttggagcatttttctgccttttatggcaactctttttagtgatgcccctcctttttttttttggtttgacgttggttagctcaaaactgaactaaccaacgtcaaacatttggaaacgaaaggagtattaaatagcactggcacgtcacaaaatagctcaactctttttagcgcattgtccattatctatatttataaattatataacactatcatttgaattttggaatgaaatatgtggtagctcatttccttgtattttctttcaaattggtattgtaggtaacggtgtatagacttatatgcaaagatacaatagaagagaagatattgcagagggcaaagcagaaaaatgcagtgcaagagttggtcatgaaaggaaaacatgtccaggatgatcatctgatgagacaagaggatgttgtttcattacttattgatgacacacagatatcgcacaaattaaaagaaatatcaatgcaggtattttttatactacttccatcttttatttggcacatcgcattgttttcatctagtccacccatatacttgaaacgttgacagcatacatggatgacctagatttgagatgtaagaactagatttataatcgaactaatctccctttgcctaccaatcagtggcatgcttttgttcattttttccccatttagtaacacctgtttggcatatgctattcaaactctttgaatagttgcaaatcaccgtgttattaatgttctcaagatgattgggaaaatctatccccattgggacaataaaccaaccatagggcccaccccttattagattcagtgcaaaaaccttactacttttattgagttaagacttgattcatgattggttgatttctggttctgccaattatcaaggagtttatgtagtgtattattgaaaaacttaagaaaacaacctcaaaaaagtacgaagcttatttctcctgtttgtttttgagattttgcctagttcattttatggtttgcattagaaaacgtatcatcatgaaagcatttggaaacctttcattggtttatggaagagtttggcgaccaactttttttcttgttggtattgtactataacaattgttacacatgtcatcttattacatgttattaggttttacatgctgtagaacaacaaaccttgaattaaaattgctgcagtaatatggcaaaagatgaggttgtttgaattggtttcttaatagaatgtccgttgagttttcgttataatgaaatattgagtatggcatggaatgtcaacatgttttatttaatttcaatggaaaaaagtcgggtgacaatgtttttcatttctatttacccttttaggcaaaggaccgactaaaaaagaggcgtacaaagggcatcaaggttgacaaagaaggagatttgatgcttgaagacttggatgatcaaacttcaggggctgcagaacatgataacacatcaagcaaaaaggtgaacacaagaaatgcctccaagcaatgagttagctatttccatagtagaaaatagtcagaacaatctgcagtttcccgaatgattgctgtctatcacaaatgcacacaaagtcattgagacattaatttaaatacacagtacacaatcttgaatttcaattttaagctaagtagagcgtaaaagttcaaatttgtggggctataattttcactgcttgaatttgataaattgtccatgttaaactcagttgacagacctctataccatatacaggagcatgtactcctatatatgagtttggtgttaggctatattggttagctcgagtttgacttgaattataactcatctctataacctgtgcatttagaggaagagtactaatgcgtaggtttaattagacttgcaacaatttttttttatgaaattgtcatctttgcttctgtaagaccttatcaccttgagacttggctgttcttttataaactaaacctgtttaacagttctggttggtaggtttcaagcattggaaatgtgagccaaaaagagatatacttatcccgttttaagtttttgatgtgagcttttactcatttcttactaccaaactttttacagaagaaaagctcccaaaagaagcttccaaagttgcaggataatggtagtgtggacaagaatgcagaggctgaaggcggtgaagtggaggatgaagatagtattgcagctcctaggcctaaaagatcgaagagactgatgaagaacttgaacgaggacaaggaaccagaacaggaaccaacgactgatggtgacaatccggcagaagcagctgagaataacatatctcctgacgataatgatacagaagaggcaaaagatcggactccttcagcctaactgacaaattaatcggataacaaacacagggtgctaaatggcaaggctagtgtgatctatcctgcccgatttatgacatgggcacgacagattgcatggttcattgtcaagaggaatagtcgttggatcttcctgaaggtgtcacacagttcaataagtgtttatgtgcacatctttttcggaagcctgggaactgggttagttgtatattcgattgtgttagaaggcatcagtgcagtggcatcggttgctgttaatcgtgacatgggcgaatcctctagctgttgctgcggatgttggaattgtggagacctgaccgctgatatctgtgatgctggctgtggccattatgtaaataatcatgaaaaatattgcatcacatatagaaataattttgccgtgtaaagagagtaggtgactatattaaccataagttttgtattgatagctgaaagagaacatagcaggaaagctgctgtgcttccaaattggaaacattttcgaccatttatgaacgtctatgctaatccctatgctaaattgctaattgttatattttatggtcagcatagatttgaatgttgcgaaattttggtttggcaattggtatcatgtgattgcaaaacagaaccagccatgcttaaggaagtaactacaaaacatgcttaaggaagtaactacaaatcaggcgtctgattttttaaataaaaataaaaaatcgggtgcttcattccctgatgctggcggtactccctctaatctttttctctggttggctatctaacacacgcaagacgctatatggatgtgcataaattcatatatggcttaagcccattttatatgcttatcttaagctatttcttaggtctttaagtgaaattttcttctaaattaattatctaatttataggttctcatcggaaagttaaatgttttggctgatcagccaaagttgccttcttcaattcagccaaagaaaatccatcggttggtttgttttgcttaaatggttcgaagaagaatttctacgactggtggttgtagctcctagcttttagctcttgtatatccatgtatatctggctgaaagctctcagcctaatcagcgaggcgatgggctttcgctgaaaagcctcacctcaaacagccatcctatgaggctaataatccaatttgaccattatactcattgtaattaaatctttataataatatctcatagaattatattttgataagaaaaattgaacgttgtttaaccatttataaaaatttgtttcaccacttcgttaaatgttccagcttactcaataaaaatgtttcaaaaaaaatgcaacattttgaatatattgactgcaatactagcaatcattgtatgaagcattgagtcccaacgagtgagacataaaaaaatcatatgaaaaatgcagtatatttgcaaatacttaatattgttgaaacatttttatatcatgtataaaactaacttttgaaacattaaactgaaatactaactaaaacattcaaagaattaatacatgtaacatgtgcaaattaactagcactagttgaaacatttaagtaaaattagatgcaatattaaaaaatctattgaaaaagctaaatattattttcatcggaatgtgtattcttgttgtaactatttaattataacaaatttaatagtatggccggaccataaattagagaagtaatttaagaaaaaaaaccatataaagatgcattcatttgtacataaaatggtgctgtggggaagcaagtgcataatgagatgagagagagaagaggggggagtggtttccgatatttctccagagtgtcgagcgcctgacgtagggtgttactacatgcctaatataagtcgaagaggttaattgtttatgccacttctaagttctggtcaaatggatttacatattgcaagcaaagtgcaaagcaaacgatttaatgaactggaaattgattatccatctattttctgacaccttaaaccgatcatgttgagttgttttcatcacataggagtagggcgagggattataatccaaataaggagaggccgagaaagaaatgtggagatgagagttgggggtagactattcctcttcaccaagaaggtgcaggcccttcttgtctgcttcgtctgcctcatacttgagggtgctgaccacttttgtttcatggctgtggtcatgagaacaatttcgtttttctagaggagtattttttacctggcctctacattcaactggacatatgcaacctttttaaattaaaaaattagctcctaaaacaattcagaaatttaattctatgaaaatttaaactcaataccttagggtgctattcaattcactgcaaccactgaactacatgagcacaatctcctaccgtggcatgggagaaggccaatgtgcagaggatgcagcaggcagtggcaagtgtgagtggcatttcggggatgatgaggagcgatggctcgttggaccccatttaagtgtggttcattttttctaggttgggcggttttcatttgtgtcggtctatttttggtcagagcagtttccatgtgatacattgggtatggtggtcgaggggatgacatgaacagaactctatcttttaacagtagaggtgaataaatactatttgcattaattagttacttggatagaaaccataagttagtaactcctcgaatgaaataattaaagagagaagaggagcaagaggaaagtcacctaagagcatcatgtgcgcgatcattccatgatccacattaaactgtgtggaattgcaatgttttgaaaagttcaaattaacatttttgtttgataaattactttgaactgggtttaagctttaatgacgtcaagatgaatggatggaatacgtagtactgacccttattgcaccagcaagtacatctaattaatgcattgcctgtcatcatttattgtattttttttgccaatcaattgctcagttatagtttaaaggtaaaatatacagtgatgaaaattcattaatttcttttctttgcgaggaaaaattcattaattttgacacaagcagagagagcacaccacccaagttatctttgcctgaatcacatcatctctccagataatgcaaatttctttttaagactccatgtgggacacattaattctcatcactaaaaaaacataaaagtcatcaagtaaataaggcaaacaccttgaaattaaggtgaaaatcagtaagaatatgttcttttgataagattaaaaaaacgtgtctattactcgccttttcctctatatatagcccattcatcacctctctgtataaactcatccaatgatccctccattctccacacctcaaagcctctcttcctccaaagaagcgtagaaagcaatggtccacgatgtccaccagtggctgccgttggagatccttagggacatcagcatttttcgacaaacgtgcagctgaggggcacaacctcgccatcgtcgaggacctcgccgcacgtctcaccattgtccttcttgctcccacccctctctggttaggtcggccaactcatatggtcaaaaattttgtgccccaccaccgatgaaagtgtggcagttcatgagaaacgatgaaaatctggtgtgcttgttgcaccgccgaggttttgctccggtgatgcggtcaccacaaccagtgctagcgccgctggcaccctgcagacaccccatcttgcaaattaagtggagtgatgccggatgcaacggagttttcttgctgcaagagccaaggcatacgataaccgggcgatccaccaatgtggccatggggatgtcagggttggccagcgtgaagcggccacctcgtccatgtcaagagcgtcagcaatacgaggaggaggcagccatgatgagaattggcgtccgtggacggtgaattcgaacaccgtctgcctcaagcatgcgg

SEQ ID NO: 9881 - DNA, 47126 bp, Oryza sativa
  unsure (1)..(47126): unsure at all n locations
tatattagtatatgtattatagatctataaaataaatttgcttagaataagttttctaagcaatgcggatacagaaaaactttgggtgaatacccaacatgatccttgaactcaggggcagagctagagtgaaatggagggtggtgccacttagttaatttactcactttagatcaagtttaagcttatgcggatgcctaagtttgtattgaggagggtgcatatatggtgaaaatagatgaggtatagctaatttttttttaaccaggttcctggacaccccctattatatactagctccgcccctgcttgaactttcgtttaaggatcaatctagtctctaacatttcgtattgtccaaacgagtaccttaagtttattgtgtgattcaatatagtccttagaccctctaaacatgccatgtgtacatgccacatcatctatgcatgcaaattcaatatttaaatgtcctttacacccttatgttttcataggaaataaagaaaaactattgagaaaacacacaaaaaaaaaagcttttgaccattggcaaaaatatgtagcattgatagataaaaaaaattgacatttttctttgttttatgattgcttcttcttgtttttcttttctttatttgatagaaaattgaagcttaaaaatggacatttaaatattatcttacatgcacgaatgacgtggcatgtccacgtggcgttttaagtgggtctaaggactatattaagccgcatgataatctttagggtcttgtttggacatttaaaacatcaaggactaattcgatccctgagcaaaagttgaaggactaaactggctatttacccaaagactttggaaaaatggtgatttaagaacagagcctcagaccggttaacatttgatgcatttgtcagctctgggccatcgaagcaaaacacggtggcccatactccacatggcagaggtgtttttgggctgggcctgcggccactttcaccatcgccgctcggctacaggactcgaacacacacaacgatagtcaactgttatggctctcatcctctgccaaatggtccagcttctctctgcttcaccttcacggatcccgtcctgttcttttgtgattaggccttgtcagtgcaagtttcaaaagagtttcaatcttatcaaaagatgatataacatgaaatttattaagagagaatgaatgagtttcatttagatgaaattaatattacacacgaaacaatgaaactgcgttgggactgaatcatttcatcatatgtcttggaaaagaaaataaaccccattataagtttataaccaaatagtttcataacaccattgaataattaaatgatatgggtagcatatgagaaactatgaaatgaaactgtgtattggagacttttgtttcattcatcaacccaaatatttttagattatgcgacactcctgaaaagaacaaaatgaaacacccaccgggaatggtcttaaggtatagaatttatattggttttcgttatcacgtttttcaaactgctaaacaatatattttgtgcgagctttctttatagaagttgttttaaaatatcatataaatttatttttcaactttgtactaattaaaactcaattaatcatgtactaataggtttcttgttttccatgctctaacttcatctttattttcaatagaaagaacaccaccatagaagtatgtcaatcaaagtagaaccatatataaatattatatagagtatatatagaaatccatagcaaagagaacacattataaatccacaatatgcacagtttcacagccaagttagactgataggtgagataggatggttcttgatataggatatttctataagatcctggttgacattatccatgaaaaaactaagaaaccaatccaattcatttttttctctcgctgatatataagccatcacttggaaagtaggaccatcccatcccccattttaaacggatagatcaataggactctatcccatctaaagaatagggatgaacctaacccttttcataccgatcacacaaaggaaactataatttattttcttaaaccctaatctacactaagcaatcaataatgataaatgttttaggacagaatgagtaataccatggtctgtatagggctagaataatcctactatcccaacaatcactacaatggttcaggtcatcagtgatgagctcagactatcacctcttacgggtagggcactggtgagagataagtggtcaatgatgactaaacttatctctattatgggacacctcttatgagctacaaatggtaacccgtcagaggtgatgttgacccctttgactggtgacatcataactcgtcacaggtaacacctgtgacaggtagcacaatgcggcccatcaatgatgtagattaccaatgaaaaaacaatatttgttccattctattgctcattcagttgcattcatctcacaaattcacaaatcataaaaataatcacaatcacattctcaatcacacatccgagcatcacggaatcaacacgaaacacatcacaaaattaaccagaatagaacacggggcaaaggaggatatatccagtggtccccaactacctggacaccggatctagcgccaaggagctcggcgtgacggaaaggcggcagtccgtgaccttgggcgcaaggtgaaggaggctagagctcagggatggacgagacgagcagacaatggcagcggcgaccgacgctcgaggggccatcccgatccagtggctcctaaccacctagagactagatctagtgcaccagagctcgaggcggctgccgacgaccttgggcggtgggtgaaggaggcagtggccggagcttaggggcggagagacggccgacaacgcttgggggtgaatgagatgagcagacaatcggcagcaggcgaaggagacggcgatgcttgtggaggctgaatccgatggctgacgatcgtgggaaagaggtcagtgcggctgatggtcggcggttgcatgagggcatgggaagacagctcctaacaatcgacgacgacgataagtggtcggagaagaagaaagggagaaagagaaaagggagagagatcgggggagagagatcggaggaggagaggagaagggacgggaggaggggaggagaaagggcaagcaggctagcgggttggcaggcccggggggatttttttttagtcatcactaacggttataagaattgaacatatttgagtggggtatctcatctgtgatgaatgcaaactcaacacccatcatagataagaggtcatctgtgatgggcctgtgtgtgagctcatcagagatgttatgtgtcggtccttatataaatctatcatagatgagttcttacatgtggctagtcatttccttgagcttcattacaacgggatttagtttaactcgtgtcagagacaaatttttttggtccatcgtagatagaccgtcatagatggattggtctggcgcaatgaattgtgttgcttgatctggatctattggtcaattaaaatgaagtgctcccagctgagtttaattcttcgggtgtggtcggtgagtatgccagatatccctttcacacacactgcttgcagcagcattagtgtcaacaaaacgtggttggaaatccgtcaaaaaaaaaaacgtggttggaaattgccggtcctttcagaatcggtgtacacacaagacgatggtactcgctcgggagagtaataacgtaagagggttagatggcagtattacggccatattcagtagagcataaattgtaaattcaacgatgaagattattatacgagtagtatttgaagcctaatcttcaagctcatctatcgaaaattattgccgtgcttctaaaaatgaaatttcttccccgaaaaaaatattcttaaaacactttattctaccatattatttatagtactactctccctccgacaaacattagatgtccaaaaacatcaaaaaagtcttttcatcagaggttatttttcagtattaacatttaaatcgttaagaatacacaacaccgtcgtttctcttattcgggaaaaaagcgaaacaacatatttacaaacgaaaaataatttataaataaaacttttatatatgtgtttttagcgatctaaatgcaaagatgaaaaaaaaacttcgatgaaaaaaatcttaaaataaactataatttaagattgaaaatttcaaaatttggttgtgataaacatgagcgaaaagatgagaccccaaatttttttaattaaattattattataataaataaacgagggccctcaatgttggctggtggctgcaactgcaagctgccagtttgactacaaataccaccgcacaccgctggagggaggggaaccttccagaagctccagattccaaaccagcaggagtcgcctcgcctcctccttcatcctcctcgtcgtcgccgcgggggtcgcctgaggtaggaataccaacaaccccccccccccccccccacccaagcaagcttctagggttttcgaccgcgcctcgcttcctccggtttcgtgggaggcggtgggtctccctccctccctgcgtgtggatctcagatgggatcggtgtttccttgttggtcttgctgcttcgcggggatttggggcttcgggcgggctgggggtggggggggggattgttgtggatgttgattgatcgatcggtgttgttggttcggggcgattggttggttggtggggaggaacggctcgtctcgtgtgtttgaatccatatgcaagttcaagtgatgcgagagtgttttgatgcgtggacctgctgcttccttttttttttttccttttgagcgatgattcgtgctgctgcggagggatacggatttgttagttgccgattactagtaataatcattggaattgtgtactgggctctggctgctcatgatgcgatgggctttgtgatatgttcatgattagatttagacatgttttttctgcaagtgtggagttgattgcagagtgtccttccctgatatgtcgggggattgggtggatgtagagaattgtagatttgggagttattggactagccaacagacagtttcctcgtgaattcgatcccttcatgcagaaatgaatggagggataggatgaaatggggtgagaagaatggatagctaagattgaaacttaccctttagatgggtgggaaatcatatcccaaaccgattttctagggataattcctctatactagacgtgtgttttgtttgtatctagtatgtttgcagtgggcagtggcatttgttctatgatgcctttggtttacatgctttggaaaaaacaatagatcattgggccatattgttatctttttctgactagtagtaaatgatgcgtctgtgttgcttctgctttaacatcttttcaatcttcactaggataatttcatagttcaatatgttctttgggaacttggttgggttttaggacctctagaggctacttctgccacttgctaagtaactgttttgtggaatttgtttacagatcacattaacaatggtgaaggctgttgttgtgcttggtagcagtgagattgttaagggcactatccactttgtccaagagggagatggtatgccatcagtcatcaccattttcatgattgtcttgaattgaattttagtccttgaatcgttgagatttactggcatgtttgattcttaggtcccaccactgtgactggaagtgtctctggcctcaagcctggtctccatgggttccatattcatgcacttggtgacaccaccaatggttgcatgtcaactggtaattattattgttattacatatatattggcttctcgcctgcctagatgtaccatcaggattgatacaggctatcatcatctgttgaattgattacttatgatgcacttgtttcataatgtagggccacactacaatcctgccggaaaggagcatggagcaccagaagatgagacccgccatgctggtgatcttggaaatgtcaccgctggagaagatggtttgttctttttccctttattccgaatttttatttgttccatacctgttaatgatttaacataaccatattagttgtggtcttgtagtccttaactcattgtcaatttgtagtaatactttattccgaatttttatttgttccatacctgttaatgatttaacataaccatattagttgtggtcttgtagtccttaactcattgtcaatttgtagtaataattgttgctgagagtttatttctctgctgtcaggtgttgctaatatccatgttgttgacagtcaggtaagtaaacattcagaaaaagaacattctccgtcatttgatttatggaaccaataccacacatccccttattattctgctgttaccttgtcttttccttctttctttttcctgtgtgttaacatggataaccatttatctgtgtcagattccacttactggaccaaattcaatcattggcagagccgtcgttgtgcatgccgatcctgatgatcttggaaagggtaatattacagacaactgtttgtgctcatttattttgtctgtgtgcttgtgtgctccttttcttctcttttgctaaggaagatctcactactgttgggtctatgatgacaacaatcactttctattgaatggattgcataaacatgctgagttagtagtcagaaatgtgtagggtccttttgttttatcataccaagttgcacacgactgtgttgtaggcatttttacctttgggggtaaaggatatctgaactttacatggaaaatttgaataagttgttctgctatgccaggcactatttgacttgaatctcctatctgtgcacttcaccataaactatttgacttgaatctcctatctgtgcacttcaccataaacctatctgtgccaattctcattgcagtgagccagttatcagtgcagcttaaataacattcattggttttggtgctcttttaggtgggcacgagctgagcaagaccaccggaaacgctggtggccgtgttgcttgcggtaagttcagaggccgtacaatccagcccacctgaaaatcagcttcgtgtcacatattgatcgactcaccacttcatctccttttctctaattctttcccaattttacttcagggatcatcggacttcaaggctgaaacctggaggtgtgaactcaccttccatctcccagcaccagaagcctgaaactctacgagctcttagccgtttcgtctttacctgagtggctactctagattctacaataagcacctgatctctgcgcatggtttttggtgtaccattctgtcgcccgcatcgttggcgcccaatgaactatgtgttttgtgttaaaccttaagctgaagggtaccatttgtagactcgatgttgctctcttcctcggaatgtcgttacatctgttcgctcgtttcgtccgtacttttgcgattggtcattgttcgctcgtttcatccctctgcttttgcgagtaaacggaacgcaagtaagattggcaatcagtccccgagtccaattgtgtttcgcttatgcttataagtcaaaaattaaaatttaaaatttaatttggagttgattttgtagttttctcaatgtagtttattttttagtatttgttttttaattgcaaaggaaacgtatataaaagtttttctcaatgtggtgaaagagaggatcggatcgtctaggctattgcccaaaagcgtttttctacggggatacggttgtatttcttcaccgatggctaggccagttgcccggttggtctctgccatccaagtggggcgcagcttaacgcgtaaaagtgcagttgaaacttgaaacgagtcgaatagaacgtgcacagcatgttaataagtacacaagtacgaaacgtaggggaaaaaaaagaacaaaaaaaagatagccgggggcattccgagaatcgaactcgggacctctcgcacccaaagcgagaatcataccactagaccaaatgcccttgtgtgatagattacaaacataaaattatataaatttatcaatgttccagtgaaacatataaccaaaattcaaggacacgcaaacacatactcacctatctgctagtgcggccccttgacacacgttaagaaggcggagaaaatgtatttacgtggatgtaatattggtagacaccagcatctgaatcatacaacgacagtttatacctacgaagtttgacaaatgtcacaactcacaatatcgactcatcaagccggtacgaatcggtaaatcggtcaagcttaaaaataaattgaactgaaattcaatttttttttggtagaaaattttttcgggtttcactcgttttcgtcgataacggagatgtaatcatgtctatgcatcgacaaaaccactccaaagctgttttcagttaccgaattgctttgtaaaccgcgtcgttattagatgatccacaagcattacaagatctgttctaactacaaataaagattacactggaggtggagtcgtcgcaacttcttcaatgacactagcaatggtcgcagtagagctgtagaggataagatttgagagcaaagagcaaatccattgttgtcaacttggctgcgcctgcgatcgatcgttggacgcacgacgagaatcactcaaccttcagttgagccaggaagcttcagccgcgtcaacccttagtcaaaaagtagagcgaaaaatcctgcaaaaatccgtcaaatcctgcactaaactcgtgcacatgagatgatcataagcaagctataactacgccatggtgctagccgtggcagatcgaaatgcgcctagtagaaaacattgcatctagaagggcatgcaagcacaagaaacgtttttgttctctctaaaaataccttgcgtgcacacatgactctgcaatctacatcgatcttttgctgaaagtatatgaagatccacaaggcatttttttacagatcgaggaccggaagaatggactaacgtaagtgttttacgaggaagttgcaaataatttttacataaacctcactatgagtcaacacttggtaaggacaatttttcttcttttctgcaagaagaatcaaatatttagataaaaacgatttcatacatccaatcagggctcgcaatatcatttgaattccgtcacccaaaatttaattttaattcattcatccaatcaatttgaattccaaattatattcagctttttattgattggatgtttgaaatcaatttcaaaatttcccttaaaattcatgaaattgatttcgaagtcaactaccataagacttcatacctccaactagttatgttttttctaaaatcaaaatttcccttcaaattcatgaaatttgtctgttttgttccaatataaaattatgaacacttgtccaaacaagccacacatagctacttacaccatctgtctcaaaataaaccaacttctagatatgtatctgaatataacctagatagctaaaagttggtgtttttttttaagggagggagggaatatagtctatagtcccttgcaagaaattgtgcagggatcaaaatcaattgcactccatatgcattaggatcatgctagttagtgtttatttttaatgaagatgaagacagagttatagcacgaaaaatatgaaattaaactattagtgcatgattaactaagttttaattattataaacttaaataatagatttatctgatattttcaaccaattcctactagtatactccctccgtactcgtaaaggaagtcgtttaggacaatgtttaagtcaaaccttgggaatataagggccgttttggtttgataccaaaatgttgccataccaatgttttggtagtttaaatagtaaatgtgatgatttggtttaaagccaaatatttggtaatgcctatactcaatttggcacaattctagaatgttcttcaccataatttgaaatttggctctcaattggcatcaatccaaagacactcatttacaattctaccctaccaaaatattggtagtgccaaaacttgcctagagtttggcactaccgatatattggtagggtactaaaccaaacaagccctaaatcataaataactctcaagttgttgagtttgaaaaagtaaaaattatatgaatagatttgtcttgaaaaatactttcataaaaatatacatatattatttttaataaatatttttatagaaacaagaagtcaaagttgtattttgtaaatcgtatcactgtccaaaatgacttcctttacgagtatggagggagtatactataaagttttcatacgaaatgtacagtttaaccgtttggatagcgtggtgacgaaagatgaggtgaaatttgtatctttatataccaacagcaaggacagtcattgggacagtttgaggcccatggcacattgctttttcctaatttcggaaccaaatcaatcaggaacatgtgggaaacgtacaaagatgggacgctggaatccaaaagaaaacgtaaccgaggcaaatcccgtccttccttcccgtggccttctagaaggcagcccagccctgcactgcacagctgcacatgccgtttgcctaaccctcgtatccttctagaaggagatcaggaggaggaatcaaatcagctggcacctgtcagtatcataaagcctgctgttttcctctgcaattatgcatgcatatccatctaataaaggggttgtacaattaatagacacagtgttccggctggtcggctgatgccttccgagagcaagtacaatagcagactataaactagctataaacagatatctaagacacaatatgcatatgatagatgagaacatacattaatagtataatatatgtttataggtaactattctataaattagctattaagttgactatagatgatttagagctagtagttggctatactattaaacttacttcgaagaatatttatcatatcgaaatgaagagtaattgtttgcaatttaattaataaattataagttatccatttgtcttttctaaaatataaagtagttatattttaaaacagattgagtacataataatgagtggattgtaaattcacgcagcacgagggaagaggggacgaacagttctctaaatttgaagagtactagtaaagataatgatcaaataaacactataatttcacaaagttcatagtaagagtttgttcatttactctcctctgaaatgtggcaaacattttacctatggactatatggcaaacattattctgctgtacgtgttctaattttttaacccaactgatcagacgagaataatacatagcttttccaccgaacaatggttgaccaatatattgatattaacgacctgctcgaaatataatttgacagcgataagcacacgtgatggtaactccagtgtttatgggtgtcactatgtcagagcttactaaatgcaagattagatggagccgataacaaatggtgcatgtagaagggatacttcgaagtatatagagcattggagcacacttttcacatcccttcttctaaagctgcatctcattaccaaaaagaaaaactgtatctcattttgaatttcaaaataaatttaggcaggctttccttcatatatatatgtagcttccgttgtcaaggtttactttcagatggtgtgttcgactgttattttcgcaatagttgcggttgcagcagttcaaaattactgtagcttacagtgattttgaactgtcacagccgcagcggttgcgatagtcttagctacccaacatggccataatttgctaggaagacaactcaaaaaacctaccaaaaattatttttctgaaaaaaaatcacatttcatttttttgtcttttattaagtcacaatttgtttttttttcatgaacgcgtaaaaagattgcatatcaatatattagaagaaaagagttttagttacataacgcaatcagctagaccggcttatgccagaggaagggagaaaagtcaaaataaaaaaactgaagcttagaaaactacggtggctaaacacaaactccaaacaacggtaaggggccaagctatgttacactcctaacagtccccaaaagcagcaacacattttgttttttgatcactgaacaaccaaattgctactccagcttgaactgcttgcttggcagctgcggccgcttttaattattcatcaggagcaagcacagcttttattatcagttaatattcggcaaaacgtgcatgcatgtgcacgtagtacacagaaatactactaatattccctattaactaccactacttggctaagccaagtaggcttctccacgtgtgtatatatatatgactatgtgcacacgtacacgcccaaacttaaccaaaatccacaagcattttcttttacccaccaaacaaacaaatcgatctcttgtgtctcatggccaccgtgcgggcacacccgccggcgccaccgtctccggtgcaggcgccggcgccggcggcgccccctccggtgagcgtcgccgcgcggccgcaggcgccgtactactactactgccacggctggaaggagggcgtggcggagtcgcgctgcccgacgacggatgcggcggcggcggctgcggcggcgaacggtggcgtgatcgagctctcgtcgtcggacagcagcggcggcggcggcggcgccggccgatgggacgatgacgacgacgggtgcagcagctgcgtcgacggcgacgatggcgcggcggccggcggcggcggggcgggccggcgccgcgacgaggaggagaaagggaggagccagcagttcggcagctggtggagccgccatgacagcagcagcagcagcagcttcctctggccgccgccgccgaatgacaacggcgacgacgaggacccggcggcggcggcggcgaggcggcaggaggaggaccgcaagttctgggaggcgtgcctggcctcgggccttccatgaagcctgaaagggtagctatagcaatcgagtatcggatgcgacatacaaatccgtataattctagattgatatattatgatatcggaaaatccgtatagtcgtagattgatatattttgatgtagattgatatattttgatgtcggatgggacgtacaaatccgtatagtcctaagttgatatattctagctggagggagtacaaaactgaccagtaacgtatgtgtgcaatattgcttgttttttgttcagtataaattggttttgtgtttctggattaaacaaacagttttaatcagtaacaaaccctgtggttttggcaacgttgcaagctacaattatgtgagtttggtgcgtgaggtgatggaaagagaacaagggtggttaccttaccttacttagtactagtagttgcttaggaactaacctcttgttgttgatacatagtgcgtgagtgcaatcaacgtgtaggacagattgttcctctccccttttttctttctttcacttttttgcacaaaaagaacattaagaaatttcgttgatatgtaatgcgtgttagcgttgtgttttcccctttacttccttttatttctctatgtaaatagagagttaaattaacgcacatacacacgagtgtacctcccctaacgtaaatcgacgcctaaaatcagattttacaaataaatccacgacaaatttgcatcgcatgcatgtaagtcatgtagctcaatcactaccatgtactagtgttgtcctttgaagacttgaacaagaatggtttgaactttgaacaataatggttggtgggaagcgccaacgtgcttaattttgctgcttccatgactccacccaccagaggcgatggttcttcgatgtttctcattgtctgcgactgcatctggacatctcatctggttcgtctgaacaagaacaactgggtaatcacagtaacaaggggtaagtgaggatacgacgtcgacagaggcgtcggaattaagattcaaagcctaccgttaattttgattaaaaaaaatagtaaccttggattatgtcattatgccttgcaaatgatgcaagggaagtatctcaagtcaggcatggttcaagaagaataaacgaggttaagaaagttaacttggagaagttgaaatgagcaagcggatttgacccaggatttgcattttcgatttcagccaaaaattcggttggaccaaaattttgtgattttcggcactctttggatagttttttttaattttaataaattttgactagatttgaataaactttgaccaaattcaacaaacatttgagaaaatccgaaaatttcggttgatatattgattagccggtgggggtctaaaattaccgaaattacaatcattgatttgaccatagaaaatgtgcatgtaggatcaggttatgtcagcacaaattctcccagcaacggagatgcatgaaacgcacaacctcgcaatgtaaggtcatatgctttgtaacctgcaagtccctgcacattttctcacagttacagggtatcaatggccttacctacaaccaagccactcaggagctgtgcaaatactgcaaaatgtgtatcaagttaaacaactggtaataaagaaacacataaagatgcgatggtaccatccaaatggcaaactgtgtagtatcaagtgaacaactggttataaagaaacgcataaaagatagaacagtaccatctaaatggcatcatgtcttaccatggaaagtgaagcatcctggggacagagttgcttgtaccctccaaaagagaatgggttcctctcatagcatggatgatggagccccaatcaaagaactcttgcaagtaggggagaacaccgtttgtatttgggcaccgcagagtagatagtaatctactccctccgttagccgtttaacatttttcctagtcaatcttctttaactttgatcaaatctatagaaaaatatagtactattttcaacacaaaataaacatattatgaatgttagatttaatgaaattaatttaatattttaggtgttgctaattttttctataaatttgatcaaacttagtaacaaaaaaattaaaccataatatgaaatggatggagtacttagtattttaagcatatctgctggctgtcgcagagacgctcaaatcactggaccagtttgagatgtcggtcgcctgaatgggacaaccgcacatcgctgtcggttggagatactgttctccaattcagaattcagggtcgagcaacttgaatgacatgaactggcaactagaaaaaaggcagcgttcgtttggaggacatcgagggagaaagcatctcgttttccgtacgcacgcttcccaaactactaaacggtgtattttttgtaaaaattttctataggaaagttgctttaaaaaatcatattaatccatttttaaaatttaaaataattaatactcaattaatcatgagctaatggctaaactcgttttgcgtatcttctcaatctcctcaatccccttcttctcaaacacatagtccagcaaaggtctcaagaagaagtcagacagataacagtcgcaccaacaaataagcaatttgagcactgaagaataatatatcttaaagaatcagaccagcaactagatatcatatgctgatatatatgataaaataagttattgttgattcatcttttaggaaaatagtttcttgcaatttctagaattggtaggaagagctaacttactggattttatttatgagagaagatcagcagaatcacatttattctttttgtcatcattcgttcagtgtcattgtttattccatttttgctatgcttttcccttgatggttcaccattcaactggaccttaagataagttctctgcacttttcttgattacaccttccttgttctagccctgaaattacctcccactacctacaactagatgttgatagtttctttaatgactttattataaccgatagaaaagttttttgggtttcaactgattgtcacgccacatttggaatcaaataaagaaggttacttgaatgcttgcttactttattctgtccaaaggcaaatctatagtacagccaatgttttgtatctgaaatgtaaaggtaacctatatacatgtgttggtctcttgattctgtcaagccatcaatctactacctccattttaggataaatgacagcgttgaatatcctgttcaaactttgaccaatagcaatttctatgttgtcattgttggtaggttaaggccctgtttagttccaaatttttttttcaaacttctaactttccatcacatcaaacctttcatacacacaacttttctatcacatcgtatcaatttcaaccaaacttccaaacttcagcgtgaactaaatacagcctaacaatcacactgcttagatttatttcgcatcatactgccataatggtattgtggagttccaagtatataaattcttttgttgaaaaaattgtggtcaaactgtgtatagttcactcaacactgtcaatttggagtacataaaagggatgtagtataatttagttacctgaagcagtagagagcacacacgtggagtacaaaatgatttcaactatgaggtgaaccactgagcaaaatcatcatgaaaaccaccatgtatctgctatgctaatgaagattaaggtattccggagattaaaaaatccaagcacgttggcatgaagattattagagcaagtttaatagtatagctcactactagctccaatttatctatagccaatctaatagctaattcatacaataattatttactatactattaatatatggtcacacctgtcatacacatattgcgtcttggaatccgtgctgcagctggctacagatttgtagcacgctgctcttctctctcatcgtttatctcattaaaatatgtttatagctaactaatagcctgctatctcattacaagcacacagacttacccagtagcttttgagaaattcaatgaatacttgcatgatttcataggattctgtccaaacagtttcctgcttctgtttgaagggtctcagtctctcagcaaatcttgacacagattctggcattgataggtagcttttccacaaagcagaatcattgttgctaccagagtatcaacagacataaatagtgatactgtattactgacctcttctctgaattcacaaaaacaagtgagaaatcatcaacatcatagaagtaaagaaattgcttcccatgctgctgatatctctgtgtatgctcccggatgaatcttcctgtattgactatagtattgcaaatttagcttcataagaaaaacttcaagaatgtttctgtttcttaatgtcaaaagtagaataataacatgatatccccaaccccaccagtatccttttatgttctcagtctagaggaaattcagctcattaagatctcaacaaaaacgccatatctttatttgatctgcagcatgattgtacaaagcagcacagagaatgtaagccgattaggaccggacatcattagggctttgaccacgactacacccccttcagcttgcattatacatgtatttacataaggatcaccaaagaaaatcatctgaagttgacagccaggtccatttgcaaaatggtgatccaaggttttcaggaaattcaccatctgggagaaacatctctacagtagtcgcatacacaggtatacgagtgatgtaatgacccagcagggggacaataggccagaggctgatgctgcatcgtgttagtgcaaatgtattagaaatttaccaccaaagagaagatattgagttcttttagatagagaagggagtgaagaagtcatcagattacatacacaaaagataacagtgtaaagctccatttggcatagcagtgggttatcataatctcgtttagtgtaaccgcttttagtcattttggtgtttgacaaattactttttatttaatccattttgcaagcaataccattattgtgttccaaaaatatggaacaattgggatagttgataacaattttacctaacctaaatctgttctgcgaaaagtataacgatcataggttttcatttccatgacaacttaaaacaaataagcagggcaacaaagcaagcacagaaaccacaaactaatcctttaaaaaagaagagttcgtatatctttgcgcttgtttcattctatgccaggaaagttcactttatacactatattcagatctgaagaaaatatttgttatccgaaaaaggaattaatagttagcgacataagaatattgtttacggaagttttagttgctgtaaataagacatgtatgatgtatgctgacttcacaattctagatggcattttgtggagttcatgaaacatgctttactggcaaaaaaaggaaaatcaatcatctttctttttttttgaacggacaaaaaaaatcaatcatcttgaaaacaagacggtgttccttaattgtcaggattttcatttcatggatacaagatgcggtgtcatggtttttcattatactaaaggcagggtagtctacctcaactatcatcctacacttgtatagaaaataaaaagtgtcaagagttaagacccgtcataaattcaattttgcaatggcaatagatgatctgtcagtaatggtaaaaacatctatagctgaccttagttaattacttggagggagagatttcaagcttgtagccccaaattttagttggtaaaaagaaacacgaatattagaaaatgacctaatatcaaataataagaaggggtgaggtttcgaacccaggttatctagcctaccatcttgtgaagctagccggagcccgaaaaacctttaggtgtttctcaaattatagttggtactcaactgatttatgcgcccaggtggtcagatgctagccagtcctcaagttttaattgaagtctataacaaatcctaatcctgttatccaaggttcgattaagaagacaccaaagaaagaggcaaacaaattgtggacgagccgacggcggcacatctctgagcttgttcacggcaagggtgtagagattggaggaggccgagcgctgccgaggctgtcggccgggtggcgatggcagtgtctcggaggaggagaggctaggaaacccgctctcgctagtccgggcgccatttctttggcttctcgagggagcatggttgcgcgagacataaggcagcctaatcaacacgttacgtcagctaaaactgtcgtagaaaccattaggacccccaaaaaagaagtaaaaaaaaagtaaattacacccacagtacaacaacttgacatatggatgcgatatagtgcaagaacttgataattgaacgtccgagtgcaacaacttgacaagtggttgcgttctagtacaagaacttgacaatttaatattttggcgaatcaatttggctaagcatatgctaggtaaggtttttcacgatgtcaatatgccaatacacagtaatcctatggatattaccttataatattgagtttaatttttaagaattatattgcacatacaatttacattcagttacctttaagaatttttttgttttcttcaccttatcaaatatcaaccgaaatataatagtttctacatccagtttaattgactttcagttattaattattaggataaaaatataaatatgtttatacaaatccacgctagtatattgtcaagtatttaaaattttgaatttatataaaaaaatgctccaaataattaagttatcacaacttcttaatttattgtatcaaaatcgtacctatcttgcaagttgttgcatttatacgatcacttataaagatcttatactaaattgcacattcttgccaagttgttgcactataacgctcattttttaagttattacaccaaattgcatccatctgccaagttgttgtaccgtgggtgcaatttacttaaaaaaaaagtctctttcataatatctcgcagaatttctacatttctgttccccaaaaggggccatgaaactggcatgcaggaatccttcttttatgccaagcaacacggaacgcgaaaaagtaatcacaactcacaagcgcaaaacaagtgcttcattatttgaggaacaaagatgatttttttttgggacatggctcgttcaaagatgtcgtcatgattggtttcaagtgcagtttggtcgtaggatactttagcctaatctaaatcgtcgttgtccttccagccgcaattatcctaaattcccaatcaaaattcaaagccttttcggaagcgacactgccatccactggaagaagaggggaacaaaacaaaaaacaaaacgcagcaagattcctcgcagtctgcatcatcagcccatgccgagccaggcagctgaacccaaaatcattcgagcccgtacgcatcacgcacagcaattgataggttctcaattccagcgaaaactggtcggatcagttcaataagacaaaccactcaatatcctgttcatcttttttaaaaaaaaattcaaactgtttttcttgttttgacaaaatctatccaactctcaatcttgttttgccggtttaccaatgttttccgaaaaaaaaacccggagatatcggttcggtgaccggactgtcaatcctgaacccagctcaccaccaccacttgtaggcttgtggcagcaacaagctgaaaatgacaaggagaaatggaagaaaaaggcagagtctcgctgtgatcacagctcactgttggggagaatgaaaaacggttgtactcccttcgttccataaaaaaccaacatattaccagatatgatactccctccatccaaaaaaaaaaaactaacctagaagttggatgagacataatcttatgtcccatcgaactcctaggttaggttttttttttacggaaggagtacctaaacatatatctatattaggatatgtcacattgatactgatacgttttttatgggatggatggagtactaaaccatttgctaggggcataatacagggatacaggaggaccacgtgaagtttccaagtgattaatgcactgtggatagacaaggatctgtctgaagaaaccagcacggatggatcaggacaggaagagggccatcaccttccccatgaattcatatcaaatcaaaggcttcacatcataaccaccaagtccagttgagataagctcaagaaactatcaagaggagaatatagttatcttaatctaggtagcaaaagcatatggagtagcagtaatcaagagaacatcaactgcatcagctgagagtttttgagctgcaggtcaagtttccagctgcaaaaatctgatgaacacttgacataacagtattgtcacagagcctaccttattcttttggataactatccaatgctgcctgcatcattgactggttcttcacatgaggcagtgaccctattggttagtggagtcaacaagataacaagggtaatatatagtttaccatgacttaaaaaggaaatcctacttaattaacgagagattccagggcacagcacaagtggtctggcaaatcatttagacgccagtggtcaatactatacaagaaccaataacatgccatagcacaacagcgcaactgttcttgggaaactttgtataaaaatcaattcatgcctatacattgagaaatcagtatgaagatggcattttttttttcaaatagacaggtttaagagaaaacaggattgtaagcagttcaattcaaccttataaaacgcacaggcaaatagtaatcaggcagaatatgccaacatggatgacacaaggacacaacctagcattaactagtacttatttaactgaaatttcaggcaacttgcttctatattatatcatcatgcttgctaccattgatcccttgagatttacagctaaaaaaacgtcttaatgacagttgacagaagtatattctgctgtagaacattaagtaatacaacattaagaaaataaccttctctagctatctaaacaagtatcatactatcgttaaccttttatgtaaacagaatagtaaaagaagtatctgatatgaagctgtggaaggatatacttgcaaggaaaagcattccgtggtgatcataacaagccatacattacagattggacgataagatgccatgcataacacccattttatgagcatcttcgattaaacagtcttgaggactccaaccagattaccaggctaatctaacgagagctagagcttgatgatcggaaaggccataggaacgagaacggattccttctcctttgacgtccattggttctcccattgctacttgaactctgactttggttggttgatcttgtgcgcgagcagctagcaccagtagagctctgtggtggcaactcatatcggcaaacagggcaggaattgtgctgttccagccaaggaactatgcaatcagagtggtataaatgcttgcatggcatctcccttgcttctgatcccagctcaaacttgtccttgcagacagggcaatgtgagtctccactgagatgcctctgtgtaatcttcacagtaggcatagcatcaatcgatgattgagtggcaggtggcggccctcgtcgatcattctgagttaattgctcaatcagatcatccagtccaggtccaacaaagtagtctgcaatgtttgctctgcgcatgccaacaccacggcgtccattgatgaatacatcaaaaccattgtcttctgagagatgaccaggaagctggccacggaagagcaaccatggccctgagccaaactccatctccaggtcagaaaatatgtttggccttcctctcacatcaacttcccggttcgttcccgccatgccatgcctcatcacagcagagattgcctccatgataccgaatcttggatcacgatggaaatcaggatccatcccaacaaagtggcgcatgagagcatcaacatcatccatttcagacacaaaaccggaatcacaatagggacactccatatcctggccgcggggcctcacccgctgtctacattggtagcaccagtatgattgcctacctcctgacatttcttccaatcaacgtactgcttccccaaaatccaaaggtgtggtatacctcctccgcactgcaaaaaatggcacaatttctaacatatcagggcaacagctccactagtaatgttacataagcatatcattccaatgcaacttacaaaatccaacaagactgaatacatgaagtttcacaatggtaccaaggcatatagacaagtcaaaaaggcacacagatgggcacctaccatccagtaccagtccaaatcactgaactgtcaaggattacttagaattattcatcaattatcacaaatccgcctaatcgaagtaataattcgctcatgaatgataaagcgattgtttccgaagatataaatttttcgcatgacatttgttaatgaataatcctcctaattaagacatactgcaacatgggaaatttatacatgatccaaactgatgatctttgcctgatctttgcttttttcagataggaattcttgaactcgcaacttctttcagacacatcaggtttccctcttatagagccagggatagtttgtctcacagactaatactagatacttatgttcggttcataggctgcctcacactgatttattcccaaaaaaaaaaaagaaatcaaactggatcaattacactagatgctgcaaccaggctaaaatccaagaacaggctaaattcccactcgcccgtagatcaatcagttcatggtaagactaaaaactctacaacagccaccttttccacacgattcactccattcaaaatgaaaaaaaaaaagaaaaagaaagaaaagaaaactgattgcagataactcccaagattacgcggcccgagcaaacaaattgaatagaaaaaaaacacgcacacgaatagcggtttccgctggttcgattacgataccagataggagaggaggaggcggcggcggtttgtggtggcgaggagcggtgggaggaccggaagaggggaaggcgagatgaactccaccacgaacacacgaacagaaaaggcgaaaaaataatattggaagaagaggaggggatggatccagagagaccatattttatacccactcgagtcgccgagagccccactctcctccccttctcagtgctgcggtggcgcccacgctgtcctcccgggcccacatggcagtggcgtcaggggggaggtgggccccacaggcctcgattcctgagccgcgtcgtccccctcgctttccgccgcgagaaagatgcctcctcgccccgtagcccacggcctgcccggggccagcgcagtgactggcatgtggggccagagtgcgcttcgggcccacgtgtcagtgtgggctttggacatggtgggggtgggattttgcgtcggggacgatgtggagcgggggaattttaaaatattcggagccacggaatacgaggctagatcggccgtcggtgggaggaatggacggcccggatgggatgtcccgtcacgtggttgcctcgtcaagctgtcgagggcggccatttcggtcctcaccgagaaatcggtccgggcaatcgcgcaaatgggaaaaaccgaacttatctaaaaaaccatgttccggttaaccgaaccgcagtttgatcttcggtctaaaccaagctgaccgcgcagtggcactgtggcagatctcgcattggggtgaatctcctctgcggtattaacctctgacttgggtcaatgacacgtgggcctaatgagcatgggtctatatgtcagtcactcaaagtcaaaggatagtactgcaaatgatatgtttcccttgcattggaccaactgcggtcttattcggccatccgggtaaccaataaataagagctaagaaccgagaatttgattggtcttctcacagctaagaccgaacaggagaccagtgactaatttatctgttttttttaatcgtgatacggttttttcattgtcggtcttcggtcttgatttttttttgtccacccttagtagggagtagggtgtccaagtcctatttggtggcttttaaaaagtatcgcttctcaaacaattcaattcagtttgtcacaatgagtccaaattaaagcaaagacaagtgtcaatttcatcggggtctttaaatatctttgtttttatagttatttttaatatctaaaattgtaaaatatgttttttataacaattatatatcagttttaaatttaagtcattctcttgtaaaaatggaaataaggccggcaaccaaaatgtaattttaaattcaaaattaagatatatagcttttaggataaaggtatgccaaaagccggctctaaatatcaacgttctcaattttttttagataatcaacgttctcaattcttgcaacatttttgttataattgaaattgtcgacgggggttaccagtagaccggatatagagggtattggggtacgctggtacgaggatctacgtaatacgacatcgagtaggcagaaaacaaagattatactggttcaggccccttgataggtaatagccataatccagttgatatgggattatatgatggaaaccacagattacaaagggaatagtggaactcgacgataccgacgagatcgtagtcgagttgattcgactagatcacccggcgacttggctcctgtaggctccggcttcgtaggctgtggtggatgtgttggcggtaagattcgatgcccaaggtcctccccggggggtcccttttgtaccacaggtcaactggtctccaagtaagactcggagacatcggacccgatacgatacaatgacgacccagttctatccgagtaggactccttccatctgtgaactccataatgaatttccttaacgtatgccgaaaacgtccgtatacgcgcaagtataccatatcaatatgtgacgtatatcgaagggtaaagggtataccttacccgtaaccctgacagtagcccccgacttctgcttatatgaactcgtgaaaccgatcgcgacttctgatgtcgaagttgtcgtcgttctcggtgtgaggactgagagacaaggagtgatcgacaacgccaggtgaagctcaacggtcatgagtgaatttaaattgaagtccgaaaaactgccgcgcgtaacggacccagaaatttccgacggccatctctctcctttccttggaattcgcaccgtcggaagtgcgtctatttaagggagttttggggatccaatttgaagtccgcctgttgtgaaaaaactctccagcccccaagcgtccctcgtcttctccgctcccgcaaaaaaccctagctagctcatctcggtcctttctccggcgatccccggcggcaatggatctcgacaagtctacctccaccagcacgtcgctaaagaagttgcaggaggatggcgcccttcccggtcgcgggaccgcggagagagaagtaggaggtactgaaccccaacctgtcctaggtcgcatggttgtgatcgaggactttattctctgtggttttcttcctccgccttctgaatttcttctcttggtcttgaatttctacagtctttccttgctccatttgaaccccaattccatcgccttcatgagtatcttttcgcatctttgtgaggcctacattggggtagagccgtttcttgacctcttccgcttttactatgagttgagttggatggaacccaaaaaggtgtctggatgtgtcggtttccgacttcgggatggcctgaagtcgcgatacatcctcttccagtgcccctcatctcgcagcaaatggcgggggaggtggttctatcttcagatagaagattcggatccggtttttattgttcctgaggagcaactagacaagatttcatcttggaccgccaaactcgccttgaccccatccctccaatctttcatcgatatcattgatgacctccgagtacggggattgtcggggtatgaagtcgctgccgacttcattggtaggcggatctagccgctccaggctcgagcccatccagcctttgattattctgggccggaggacgcgacccgggtttctcctcggggtatttttctttttagttaaattggctcccttatgtgcgtgttcttcccgacttatcggattctggtctcgatctacaggcttggacagcgcaaccgtggagcgccgtgtcggccaactgatgatcactggcccgacaacggcgagcaacgtccaagtccccctttgcgagaaaggggcagccgagcgcgacgttgccatcaatgtaagtgtactcagcggtccttttgcatttttcttccgggatcgcattatgacttcatgaagcgtaggctctccctctgactgatatcatcgggccgctcgtggaccatcaggtggcggcgtcgctgaagaagaaagtcgccaaggaggtgtctgacgctgttgctgctgctgccacaacgagtggcggcaacgttctgaaaaaggggaggaaattctcttctgtggtcggacatcgtcggaagacacccaccccctcggtaagttctcctgttctttcatcacgtagtcagaaaacttccacctcacatcatatccgttatactccaggcctcggacgcgtctcccccgcctccacgtcggcaacggctagtgacgcttggcgagaagcaagtggatgactttgaggttttgtcacttcgtcaaactgttgcagcctgtctcagttgcagcttttcgcagggcggcgtgggcgaaggcggcgcaagacgggtctggagggacctccagcgcgtctcctatcgtggcctcgacggatgtcgtggtcgtgcccaggagccgcgaggcaacacctagcggcccagctagcaatctcgccactggtcgaggtctgccggctgccatcctcacctgggaggagctccaggttgagatggggtgcctccttgaggctggtgctcgcggcattagccgcgagatcgcggaggcgagggcggcggcggcggcgtcggcgaatgagcgcgccgaccggctggcgcatgatttggcggaggttcgcgaggacctccagaagatgcgggagctggtggccggcaataagcgacaacggcagggactcgagcaccgcatgtcggagcgcgagaacaacttgtcggaaatccgtggctcgttgcgagtcacctatactggtctgcaccagctcgccggggagtgcggtatcaagtctaccatcccggcgaatcccgatgagttctcgccgacgacttctcttgcggagctggcgacggcgatggaggagatcccctccaagcacgcggctaggattggagaggagacgtccaacgggatctataccggggcgtgccatgtccttgcgtgtgtgagactggcgcaccctaaactcgatctgcggaaaatcttggatcagggggcggctagcgacgcgcgcaaggatgtgatggaagaagtcggcgatctgggggagtctgttctcccactttttgaagagtaggattttgactctcttgtactccttagtcatgctttgtaaaactttcattggttccaaccgcctttgtgtatgcagtcatcgccttagctttctttagcattttgatcttgagtactttgttgtcgtctgtagagatgttgatgtcgaggatgtccagcagcgcgggcagcctgagttgccagtgatcgttccggcacttgcgttcgagccacatgtgccggagggcgatgtagctcaaaattcgcctgtggaaacgagcatggcgacgactcccttaggttggttatctttgttttcatctcctttactcttccgtctggatcgacttgatttgttgtattctcgtgagagaagagcagtttgacttagtcgtttccatgctgagcagacctcgagagtgcgcttgctgaccaggatcgtcgcatccagtattggaggacgaagtttgaggtcgcggaactcgagaggactatgctggaagtgaagaaggaccaggccgtggagacactccggggccgcgaggtgtggttcaactcgtatctgaagagtttctgcacctccatgtcaagggtctgtagagagctccgggtaccccgtggggatcccgagaaatcggcgactggatacatcccgtggctgaatggggcctgcgcccagcttgagggcatcagccagcgtatcgacgaggccctgaagcaggagtgtcgtcgatcgagccaatatgccgggggcatgtattggcctgtatatgagatcatcgtccgcagctgcacctcgagttcctccatgaagggttttctcgttctcggagaactcctacggagatagatggcctggcgaagtcgatggcgccgctggcggaaaaggtcttccagtctatggactagcattggccttcctggtagtctccgtgtcctatgacaaatgtcctaggggaagagtgtaatataattttggatttttatagaattgtaagaagtacttgtgaaatagaaaagaaatctatccaactaagctttcttactctggatgtattgtgtatgagtgtcttctcacttcgcgacttcgattagtcgtttgagttatacactctccctagcccccagcattgtcatcggagaattcttctcggaagataaggctcttggacctttgacctgcctcggttgaacaagcactgatcctagcccccagccgtgaagttggaaagtttatttccgattacacggcttggttaatacgcatggcgagaactcttacacgaccagatcttacatggtcttttgtctctacaggatccgacaaggtcttatcggctctgggcggccccagctgaagttcccttaggttcctcggaggccttgttaagacagcgtaaagggacatgagggtaggtttcaacgctaggtgtcatctaggtaagggatcatcgggaaggaacactttgattttggtctggacctgaaaaataggctttattgaagctgtaagatgtcttacaagtatggatactattgacttatacatagaatttacgtaattgatgaatgttccaggaatttgccaactcgcgacaatcgccatctgcaattttgaatgcgcctggccgcagaacttgtgtgatcgtgtacggtccttcccatttgggtgagagcttgtttcgccctgcttggctttgaacacgtcggaggacgtagtcgccgatcgaaagcgtgcgtgctcggatgcgcttctcgtggtaacggtgaagggcctgttggtagctggctgctcgaacggtaactcgttcgcgatgttcctcaaacagattcacatcgtcatttcgctgctcctcctgatcctcatcggaatatttctgtactcgtgtactttgatgtcgtagctcggtggggagcatggcctctgagccgtacacaaggaagaagggtgtctccttgttggatgttgtcggtgtggtacgcacggcccatagtactgatggaagttcttcgtcctacttcttgtcatgtgacatgagcttgtcatagacgcgggtcttgattccttgtagtactatgccgtttgccctctcgacttgtccattgctctgagggtgagaaaccgaggcgaagcagatcttgactcccagcctgatgcagtaatcctagaaaacggcactgatgaactgggagccgttgtccgttatgatacggtggggcaatccgaatctgcagaatatccctttgatgaatttgatggcgttgtcggccttgatttcccccgtgggtgtcgcttcaatccacttagtgaatttgtcgatcgccacgaataggaacctgtagccgtcctgtcctcgtgggaatggcccgagtatatctagcccccagcacgagaacggccaagtgagagggatagtcttgagtgcttgcgctggtagccttgtgtgtttactgtgaaattgacaggcttcacaccgctgaaccatgtcgcaggagtctttgagggcggttggccagaagaacccttgtcgaaaagcttttccgactaatgtccgaccgggcggcatgtgacccacagatcccttcatgtatgtcgaggaggagatgtctgccgtcgtcggacgagacgcattttaggagtaccccatttgatgccttcttgtatagatcattgccgatcatatagtagacctttgctttacaggatattttctcagcttctgcgtcgtcctcgggcaactctttgctgcctatgaatttgatgagtggggtgcgccagtcgtctgtggtctcgatatcggcaacgacgcgctctacctctgtagcccccgagctgttgttgagggagaccgggctatcttcaccgcttgcgtctttcactgatggccttgtcaggacgtctagaaaggtgccaggttcgagtggctctcgtctggacgcacgccgtgctatatcatctggttcaatgttgtccttgcggtatacatgtcggacctcgatcccatcgaaccttttttctagctttctgacttctgcgagatacttggataatgtcacgcccagaaattcccgaatagaattccaagcagaatgtgcattaaactccccgtccaggaccagccggggtacacaaacgacaatgttgacattcagatccacgtcttacaaacatcataaaagtcttacagaaatgcagcggaaaacaaaagaaactggagctaagccttgactaaactgcagcgggaacaccactccacaggcatcctcgacggcacggacgaagcctactcctcggggaaaccttcatctgacacatacccgtcctctggggttgggaaaagtagagcaagactgagtactacccactgtactcagcaagtcataccggaataggggtatgatgcagggaattaacaaagaagagctaaagtggttcatttgcataaatactggcatttataaacaggaatttaatgcgaaaacagttgtaataattaagcagtattaaacatccgctgtccaacgctaacccacgttgcgacaggcccaaccttccacctaaactatccaagttcaacaaattacactagggtgagactaatcacggtgaatctggttgaccgcccataaccgcgggcacggctattcgaatagttttactctgatcagaggtgtacaactgtacccacaggacacagccccacgacacgtttccgtgcgccgacatgccaccacgacataccggaaagaggccgtgacaggacccttcacataaccccctctaaccaagcacaccacacctcaggtttcacccccactgctcgcaaggcagcgggcagtcccctctcgtgcctaggtgaatccggaagccgcataggccgtcgcagggcccatccaaactccatcacgcccacccttgcctggatgcgtcggctagaggaaagctacactacaagcccagccgttgcccacgctggcttgtggtaagtacgataaattcttccagggcatcccgcgaaccggtccttaactgccatgggtgcgaccagcaaaaccatgcacccacagcccaccatgtgattcattttaattaaccaacaccaaagcggtgccgctaatccaacattatcataaaaacctatagtctaggttttaaatgagatctccccattgtgtgctagttgaactaagcatggctaagcaaaccctagtcctaactctaatcatgttataacccaagctaacaaaggagcatggtatcaaaataacatggctgtaacaaaaggtaaccatcccatagtataattgcaaaacaaatgcgatatttgaaagaaaacattaggacatttgcaatataggatcaatatgatcaagtgacaagcatgacttgccttgctctgctgctggaggaacctcggcgactatctcgaagtacaccggagcgtcgaaagaaccggaatctagcgacatacaaagcaaacattgcaaacaggctataagactactgaaacagagaacaaaaccatttttaatggattctacacatttttcttgatttactgagacttgaatgggattaaacggagctcggatgaattagttatgaattttagaagattcactgtgtttattactataaaagaaaaaccttaaatcatttattgcgcaatattaaccagggctgacgtcagcacggaggggtgcggcgccgacatgcgggacccaccggtcagcgacccgggagagagagaaaggggcggcggctcgcgggcccactgtcagcggcacgggagatggaaggggcggcggctccacgtggcggccgaaccgacggccccgatctacccaagggtagatcggacggcggtgggagctcgcggccgggcgcgcgggcacggcgcaagccgaaccggcgaccatggcgccggcggcgcagcgctcacgcggcggcggtgcgcatgcggcagcggcgcaaggcgacggccgacggcgaccgaccggcggcggagagcggcggctagaggaggagcggcggctacgcagctaggcggcgacgcggcggctaaacggtgcgggagagagagaaaacgaggaggagggcctcaccgacaacggtcgacgacggcgggcgacggaggacgatggcgacggcgggacgagctcggtacctcctaacgaacaaaaggagagggattagagggagaggaaagagcgcgagagagcgagagcgccggccgaaggccgcggccatggcgtcactcaccggcgcacgacggggacgggtctccggcggcgaacctcaacggggaagaggcggccgaggtagatctcgaccccgcgaatctaacggcggcgacggcgcaagacggcggcgagcctagcggcggctagcggcggccgaagtagcaaaaacggcggcggcgggtggttgcaaggcgcggggacgattgggagctcgggaggggtcggcgaaatggggaaaaagcgagagggggtgccggcgatgcttaaataggggaagagagggccggacgtggccggaagaggcgggattcgccggccgacgtgggggagtggggaggagagagaggcgggattcggttttcgaatcccggccatctcgggcgcgggcgcgagcgggagagagaggggaacgggcgcgggaaacgcggcgcacgcgcgggcgtggtcgacgtggcccggggaaggcggagacgtgggcgcggcggcggtttcgggcgcggcggcgcgccgggatcggcgggaggagggagacgggcccgacaggtgggccccacctgtcggcgaccccgagaggagggaggcgggcagccggctaccgggctgggcctcggcctgcggccggcccaacagagaggggggggaaggaaaagggaaatgggccgacggcccatttgacaagaaggaggaaaaagagaggaaaaaagaaaaagaaaaagaaaaaggattttccctggaattaacaatattgcttgctcaattttaattggttaaaattatttctagagctctgaaaattccactaaaaatcctgttaatgaattttgacatgtagaactcaagaaaaattccacatgtccaatccgattattatttgcattactttattagggttttctcctgatttcacctgcattttcttggggtcatttgtaaattcaatttttggcttgggaggaaaacttcggggtgtgacagataactcggggttagagcacttgtaatctttatgcacctggttcgtgactagttcggaatctcctttcatgattagtcgcctgactccgagtgcagctgcagctcttatcccggcgagtagtccttcgtactcggctgtgttattagtcgccctgaagttgaggtgaattgcatgcttgaattgatctcctaaaggtgatgtcaagatgaatcttgccccctgctccttggctattgagtgcgccgtcgaacgccattgtccacgtttcgttgtctatttggttgtctgacctgttatcaggcatagtccaatcggctacaaagtcggcaagtacctgggacttgatgactgttcgtggcacaaagtggacatcaaactggcttagctcgactacccatttcgtaatgcggccgacaacgtctttgtttctcactacttcaccgagagggaaggaggatacaactgtgaccctgtgggcttgaaagtagtggcgtagctttcttaatgtcatgattaccgcgtagagcagtttttggatctgttgatatcttgtctttgcgtcgtggagagcttcgctgacatagtagactggtcgttgcaccttctctctctcgacaacaatgacagtgctaatgaaatatggcgtggcggcaatatagagaaataattcttcaataggttagggggcaacaagtacaggtggatttgataggtagcgcttgagtgcaatgaatgcctcttcggctttctgtgtccatacaaatttgtcttgctttttcagcagagcgaagaaaggttgtcctcgctctcccatcctagcgacgaacctgcttagtgccgccatgcatccggttagcttctgtacttccttgagtcttgtaggcgacttcatgttctcgattgccttgatcttctcgggatttgcttctattcctctgccagagccgaggaagccgagcagcttgcctgatggtactctgaacgtgcacttctctggattgagcatgaggcgatatcgtcggaggctgtcaaacgtttcccgcaaatcatcaatcaatgagtcgcttgacttggtcttgacaacaatgtcgtcgacgtaggcctcgacattgtttccgagttggtcgctaagtgagccctggaccgtgcgctggaaagtgtttcctgcggttattagtccgaacggcatcttaacgtagcagaatactccgaacggcgtgatgaatgctgtcttctcctcgtcctctttcgccatactgatttggtggtagccggagtaagcgtcgaggaagctcaacaactcacaaccggctgttgagtccaccagttggtctattcgaggaagagggaagtgatccttgggacacgccttgttgaggtcggtgaaatcgacacacattctccatttctcgttggcgttccgcaccatgacagggttggctagccactctggatggagtacctctctgatgaagccaactttgagaagcttgtcgagctcttctcgtatggcttgttttcgatctagtgcaaatctccgcagtttttgctttactggcttggcgtcgggtcgcaccatgagtttgtgctcaatcacctccctgggtacccccggcatgtcggacggctgccaaacgaacacgtcagcattgtcgtggaggaaggtgatgagcgcgagttcctatttttggcctagtaatgccccgatcttgacggtcttgtcggggttggcactggagagtggaaagattttgattgcgccatccggtttcagtgtcttgtttgttttgctcactttcttgggtggctcagctgtggcgggtgggctgggtgtgtgcttgaccatgttgaggctccgcttgtcgcattgcactaccaacttagcattcccttgaatagtgattgttcccttcggtcccggcatcttgagcacttgatacgctagtgagatgcgaccatgaacttcgcgagtgcagttctcctaatgatggcattgtatgctgcatcgaattcagcgacatcaaagttgatctgttccgttcggaacttatttgcttggccgaaagtcacaggcaatgtaattttacccaatggtttggacgatgactggggtgtgattccatggaagggttgatcggtgggtgtcaactcgcttcgtgggatccccattgtatccaaggtgctggcgaagagaaggttgattgagttgctgccgtcaatcagaactcgtgcgaccttgatattccgaatagtgggttcgaccacgatcggatatcgccctgggatgacagcagtcttgaggtggtcctcttcagagaattctatcttctgctcagactacttcatcttgggcgcagctccctgccacgtcgaacagacttcacgttccaccttcttatattctcgctttgaggagtatgtcgtggaacctccaaagatgtgcgagacatggagatcagagtctgggtatgctgagtccgattctagagtagccgcttcagcgtccttctcgaccacatgcactcgcttgcctttttccaatgccatgtgtattgcgagcgacttttttgaagacgaggcaatcttatagagagtgtctatctgacttgtgtatagggcaccatgttttcttcgtgtcgctgtcttgtgggtctacgcgcttgggagagtccgcgtattctgttgtgagaacatccgcttgagcttaacttttcctactcttgcaattttacttcttgctcgactcaggtgcgtctttgactggtttcttctctcctccggtcttcggtttgtcgttcttgcgtctnnnnnnnnnnnnnnnnnnnnnnnntcgatcgacaattgctcccatcatatttcactattgctcctggtcagaatctttcaggccatcggacatctcgaagtgaacgaccgaaagctctacacccatcgctgggggcggtgggttgtcggcgatcgtacatccttcgtggatgtctatctgatgttgaggatgaggaagatgacaacgatgacgatgggtcgcttggttccggcgtacgattacgaggacatcggctgggttctcgagaatcctgtcgtcgtctcccgttgttgtttcggcgccgatctccatcatcgtcgtcattatggcgacgtcctcgaccagtatcacccagcacccgccgttcgcgatcgtcgtaatcgtggcggttgtggcggttatcacggtctcggtcttcgctcgaatggcctcctcgttcttcgttatcgtgacgccgtgaagagacgcgatgtcaggaatggttctcattgtctcgtgtgcgtagcgcctctcggcagccattcaggtgatcgcggagatcaccggtgctgcgaggtggaggggtggctcgatgaggcgattcccgctgttcagggttttcaccattagcatcgccagttggtggctgttccgggtgtgctgcagcagcggcctcttcgaacgcgttgctgaggttggtcactgattcccgtaaccgttctgtccatcgtgcgagatcgtcgttcagaacgggatcgtaggtggtttctcccagtattgcattgacaaccctgatgtgctgggccggtggtcacttgattccctgcttccgcattggcgcgcgctgacgtgctggtctcgtcgataaccaatacctcgcgcggcgtattcgttgacgatgagccatagtcttcgagcaggtgcaagactgatggttcgtggggatcgatgtcgattactccaacaaatcgatctaaaattagcgtcgctcctttttccttgtcctcatccctgagggggatgtgtgactgctggaccttagaaggtgacgttttcatggcgctgagaaagaccttgcagcttgagaggtcgtgattctttgttttgtgaataggacaatagacatcacgagttggtaaagtacgctgaattccacgctctttgcaggcatgaatttcagcgtggacgttgagaaaaacccagcaggcttgcgaggtgtgttttctggttttgtggataggacaccaggaccttgtcacctcggaagtcatcctcgtcggctcgtgattcttgtcggaaagacaaggtttggccgcactaggatccttctcaggctcggatgtcgtcgacgttccgatctccgcttcggcgggaggatccttcaacatgtagtcgtcctgggttatagccactgcgttctcgtttccggccattgacggaccagctgagatcggcactgtggtgtaaaccgggaagacgatttcgccgacttgagtccacaccagtgttgttgaagtaggaactccttggttgaggttggtgttgacgccgttgtcgacgaagctggatgtcatagtagtagaaccttgagcaccaagtgcccctacctggcgcgccactgtcgacgggggatacccgtagaccggatatagagggtattagggtacactggtacgaggatctacgtaatacgacatcgagtaggcagaaaacaaagattatactggttcaggccccttgataggtaatagccctaatctagttgatatgggattatatgatggaaaccacagattacaaagggaatagtggaactcgacgataccgacgagatcgtagtcgagttgattcgactagatcacccggcgacttggctcctgtaggctccggcttcgtaggctgtggtggatgtgttggcggtaagattcgatgccctaggtcctctccggggggtcccttttataccgcaggtcaactggtctccaagtaggactcggagacatcggacccgatacgatataatgacgacccagttcaatccgagtaggattccttccatctgtgaactccataatgaatttccttaacgtatgccaaaaacatccgtatacgcgcaagtataccatatcgatatgtgacgtatatcaaaaagtagagggtatactttacccgtaaccctgacagaaatgcagagctttcaaaaagaactgctcattcttccaattatatttcttgtatttatttatgcccccgtctcggcaagtgttttatagatgatgcattcacaagtgcgtagactatataacgtgaatatacatttttttgtgtaattgaaaaaaaaagttcccacatctcagtttgaacctcaaacaccggtacaccgtcttgcctttaggtttttgaatttttatgattcttaatcttttaattctaaacataaatcatctctttacttatttctaaacctgaatatttgttgccacgccacttcgtctgtgcgtgacgaaataatattgtcacaccatcaataatcgatttattgatgtgaaaattttgctttgtcatgtcaatatgaatggcttggcaagagaacgttgccacgtgcccacgtcagccagagtgcgtgtggcaaaataacaccgtcacactagccagggtagtgtgatactctctccgtcccataatataagggattttgatattttgcttgcactgtttgatcactcgtcttattcaaaaattttgtgaaaatataaaaaagcgaaaagttgtgcgtaaagtacttcagataataaagtaagtcaaaaaaataattaataattccaaaaaaaatttaatacgacgaatgttcaaacggtgcaagcaaaaagtaagtaaaaaataaataataattccaaaaaatttttaatacgacgagtggtcaaacagtataagcaaaaagtcaaaatcccttatattagaggacggagggagtagtattgttctagatgacatggcaacggtatttcatgacaccactcttgctgacgtggtcgaaagattcagtttaaaaataagttttgttatgatttaggctgtgtttagttccactctaaaattggaagtttaaaaaaattagaacgatatgacggaataattggaagtttgtgggtgtaggaaagttcgatgtgacggaaaagttagaaatttgaaaaaaaaattggaaaacaggacattactttaaaattaaaattttaaaaggttaaaaaaaaatcttggcctccccccctctctctctccactaaaaaagcatgttcgtttgaagctccattgttccactccacggttcaactaaccaccaaattaccagactacccctcggagctcgaggccaagggccgccatggatcgccgggacatggcgagccaccgcggccggagttccactcgtggccacggatggggccgaggctggcgaggtcggggagaaggccgcggccttggtctcagccgcggcgccggcccctcaccgccacctcctccttcctcctccacctcttccttcccggcggcggccagcgccaccgcggctggtaccggcggcgacgccccgccgatcgtgggcagctgccccgacatgtgcccaggtaacgcgcttcgtccaagcctcccgtgcgctcacgccgacgctggctgacctgacctgacccccgtttggcggggcgaattgccccccacctgttcgacgaaattgcgcgatcagttggcccctaattggatggatttggttggcgcgttttagctcatggatgctactgttttttttcctgctgcagcgagggagagggcgcagagggagcggctgagggacctggcggtgttcgagcgggtgggcggcgaccccgcgcgcacgtccccttccctcgccgtgaagaaggtgagccatccatttttctccgtactcatgtggaggccattcctgattttttttttctttttgaacttgcggttgggtcgtggtgatgcttcactgctggtcatttttggtgcgtatctgcttggattgttctctccatgcaaatggacaggctatagcttggttccattccatgtggtggtttagtctgttttgattggatttgatatggagctggaagcttttttttgtgcatgcaactgtgcatgtatttttgcttaaaagggtgatcagttgccgttaagcatgtgttggaacaatcaacactttatgttagatgtagctatatagttacatatgccaccaataatgcaataacagcaatgcagcactaaatctgatctacgcttgtcttgtccaatcactgccagagtgtaaggaagctattcgggtagcctagccttcaagagattgaatgtacgatagtgtcagatttatatttattttgtttgatttctttttatagtttattggatgaaatataaccctacttagtacttaccttgtactagtatttttgcaggggtgaagatatgatgaaaggacaggattatcaattcatttaatacttatttttatcttgaatatgtggtcatgtttgcagataaaagaaagcaatgtgcaaaagcagattatgattttttttacattatttatttagcatgccattgttattaggtaaaaagagcttgtatcaacgaaaataatagttatacaatgagatatcatgttctgcacacttgaggtgaaactgtcggaattcatttacttgccactgcaaacttgagtaaaaatgccactgaaaaatcataaaaggtgtgtaagataatgaatctttaccaaccacatagaatagccaatttgccacctgaaaacactgttataattacaaatttgcactacagtttcatgtggtctgaaagatttcatgaaccgcgtgtgttttaagagaatcaggtagctatttgagaattctgtgtatctccgttccttttctaacacttggtttcctgctagttttgcagaactatctcttccacgagtgtacaggcatcagatatacgccctctcccagtcctgcgagaaacaatggattatcttttgcatttattggattcctcagagcatcagtttgagatagttcatgattttatatttgataggacaaggtctgtgaggcaagacctcagtattcagaacatagtgaatgcccaagcaattcaaatatacgaggatgtggtacactcatatcatccatgtttttatcttattgtatagacctctgaattttagggtacttatttgtctggtttagattgttgtgtctggaatctaacttttaacattatagaattgagcatccttatactctatcacagaactactactcaacaactttctctttgttttccttgtaaggttatgttccatcctttttaagtagttgaggccagaaaattcactcatccaaactcttgttagatagagtaatactcgatatgcataaaatgttgttgaggttctcgccttttctctctaattggtttgggagaaagtatgtttcttttccgattatgcatgaattagttctttcaggcattttctacttggcatctgtgttagccactaagtggtcctttttgttcgttagatgctgttatcttttgatgttatgctgccggatgtcattttgttaaggtggaggaacatatttgcttcaagtgcaagcatatagggtagattattcctctttcacagctttatctgatgcatgcccctgccttctgcagataaagtttcatattctatcccatcagaagctttctaggtcttcccaggattctgatgcttcttccctgtgttacctaaacatggagcagctaatgaagtgccttctttctctgtttgatatgtatgatgtaattcacaagaacaattcacagagtagtaaagagactgaatattattccttctacgtgcttctacatttgggctgcaagatacccaaaatggtttgcccccaatttttattgccttctaaataatctaatttatgttattctcttgttcccaatactttcttcttactccagctagtgaatagtagcctaatttcctgtttatctccaggtagattcactctctttgtggtatggccatctatctgcttcaattatacaatcaaaggaaatggtatttgctagatctatattaaggtaactttatgcatattatttgtatcaacatacatagagccttcatttttgtcatgctctaagagccatcatgcttcttgagtcttctttgtgcacagcagtatgatttgggacaactcagaagtgctaactattgagacacatcattttaaacttaattgatatatatatgttctgatcttctttctgcagattctaccacctaggaaacttcaagcgtttcttctgcgccatagcagctgaaggaaccgatcttcagctgcgtctgttagaaccttttctcaatgaggtaagccgaacagcaattttgacccttttaatgataaggtgatatccttgccttctgtatgtacatttgagcctgttatatccatatggtatctgttatctagcttttacaaacatagttgttaagtgtaaagtaggtgcccagttgcccacatactgctgaagtgtttaattgtttgtgcaaaaaaacgaattgctgcaattgttagttaaattttcctcacccgttttaaaattgtgttctgatcctttcagtatgaatgagaattatctcaagtttgtgttatgctagtggttgttaccagcacatttctttattcacaagctttaatattgctggatatatttcgttctgacatatcaattttttttgcctgctttgctgccaaaggctcgtgttagagcattaatgtacttcaatcatagtggctacaaacttcaacaccaccctttgacacatttatcagaaatcctaatgatcgaggtacgcggacaccacccttcgacatatatttttactgcagttgtgcattttagttgcagctttagtgaacagttctaaaatcatcagctggatgttgattcttgttttggaacttctttaggagctggacctggaaactctttgtagattatgtggacttgaaattagcaacaacgaagatacgaaagcttttgctcctaaacaggcgagtttctgcgtaccagcatcaattcctcaaattaatggcatttacatatcaagggagaatcaaaggtgaaaaaaatattgtagcgaatgtaaaatgtactccattcttcacttgttcagttgtgtgctaaagcacctatacttccaagtatccaatacggaaagcaattgatcccagtaaaagaaaattacgaatgataacagtacattttcttgtattctctccaacaaagtgtattttgtgagcttcgatgagtagttcagtattctcttctgatgttctcacaatatgctaatggttgctggtattgttggtgatttgattctcgtctattttgcaattcgatcgcatctaatgccattaccagaattttgctttctgctatgcaaaagtaacagtggatttgtcgattccaaatttccaatcgattctaacaccccgaactaatgtttgaatcaagagaaaccagagataccctgtcactttaacctgacaaagttcgtgcgattctgatagcccttgccgccggcgagggagatacgattctgctagcacttgccggcggcgagtcgagggagatagaggacctggacgccggcggcctggagctcggacaagctcacggcgccggggaagttcaagagcgataagatatcaagtgaagttttgttataacggcagcgatacttcgctcccaataattccggagcatctatcacacacaaaattgataacatcgaatgagggaaagaggatgggagggcaatttcatagttcaggactgctcttgtcttcaggaactaggaatctaggtgttttttttaactctgcttccaacaacactaatcagaaagatcagccatgcaagtaggcaaaccgatcactcagtcgctgtcctccgtcttggacttcttctttttcttcttcccttcagtggccgtcttaggctcagcgtcctccgagacttcacggttcttcttcttcttcttcttgggagtaccgttctcctcggcgtcgccattggcatgcgccacgctcttctcctgctcctgtggctcctcctccagcttgtgcttcttcttctttttcttcttctcagttccaggctcagcttcatcagccacattggaaggcttgtccaggtccattgcttcgccgtcagcttcagctttagacttctttttcttacttttcttggcagatgcatcgaccttctcgccatctgcacaatgcacagtttataaatgatagtaacatgtagctcaatgttagcatttctggcaaccgaagttagccaacttaccatcaacatcatttgtggcatcattaaccatgctgtctatcgcagctttcatcacatcaaggtttttacgaggtgcaacacccttgtcatagaagtctaaccgctcctcaacttgctcacgaagcttttgcccaaagactgcggtagctgactctgaattccaaaatatggcagcaagttctttcagcaaaagcagtaactagtggacatacaaattggaaacagaactatgcaactaacctgaataacaatcaatgcgtgatgcaatggagcacttgttcgccagatatctagccattctgcctttgttcttggttgaagcacggccaatgaaggatgagtggaatataaggccatactttggcgtattccccctagttttcaatgccctgggagaaagtaaagaagcataagaagttgacgtatactctatgatcagtactttgaaacaactttccatacagttacttggaatttgagagctaccaagaaatcagtcagttttaacaacctgaaaagtgccttttcagcaccaagtatctggagagtggaggcaggacacttagcaaggtttgaaagactgccagcatgagagataaggcgtgctccaacaacttcaccaattaatgatgttagattcggtgcaatatcattcatcttggtaacaagatactcataaaggtttttacgatattcagacagattcatgactctttgagcaaactgcttcacattcatcaaatcaacttctgacagatcctgacctgaaaagcaaaaggatcaataaaccacaaaaactactacaaagaaactactagatttatattacaacggaagttaaatgtaatcatatctcattacccattgaagcctttgctgcttcgacaacttcttttg

SEQ ID NO: 9882 - DNA, 92449 bp, Oryza sativa
  unsure (1)..(92449): unsure at all n locations
taaaatttaaaactttcatctcaaaatttgaaactctaaactcattttgttaaaaaaaattcaactcgaaatttaaactttcaagttaaatatgaaaactttcgactcaagatttaaaatttcaagtcaaattttaaaaactttcaactcaaaatttaaatttgtaagacaaattttgaaaactttcaactcggattttaaaactttcaactctagatttgaaactttcttcagattgaaaaactttcaaagttaaaatttgaaaacattcaactcaaatattttgaaaacacttgtgcgaacgattaaaaaaatggggaaaaaagggaaaaaagggaaaacgcatgagaggagggggagccaaaaaaaatgcgaaaaagatgaaaaaaaaaagaagaaaacacaaaaaaaaggcaaaaagaaaaaaaagaaaacgtgtgcgggagggacagtttcactcgcacgccaatttctgtaaaaaaatagtcgatttttagaccctaggatctgtatcaagattcgtgctaatgctttccgagaaaaatgaaggtgcggtgcggtggcggggagtcgatcccgtgatcgacgagttacaggcttacaacaccaggcttttgaccaactgagcacaaagattctattcgttatgtcctcaaagtaaatcataattaatgaaaattacactatagtgataatttatgcaattatatgccacttacattgtaattacatattaaatacatatgtaattttgggacttacatatgtaattttaaaacttgcagtgaaaatatattaaaattacatatgtaattttaagggcacttaaatatgttattttggaacttacagtgaaaatacattaaaattacatatgtaattttggaacttacagtgaaaatacattaaaattatgtatgtgattttaaatttatttaagtgtaacttttgtgattgttagttttctatcgtaaatttaatttatattgtgtattataataaagttacttatttgttatattgccaaggctcattaatggtcaactttgtgtttgaaatggcggtaatcagtatgtagtccaatccgactgttttggactaaaatttgtggcgccatatatatagatggacccaaaatgttggtctgcacgtgtggttggtctgaaccaagtatccccgagagttcctgccgggaattacccagtttcacatgttccctacgaactgaatgttttgggtgcaaggtattgaatcagcacttgtgttatgccgagtaaatctatggatagttttggtaaatattgtcatcaacacctgagatctgaatatgtgaattcatcgatagtgtaaaaatcacagtggtgattaatgcgatcaattagacatgctgaatctattttctaaaaaaaaggctccaattataaaaagtggtgataacatcacaactccttgagccttttcattgttgattgacattgcatgctagatttaactgcttctacagtactttgtagaaaattgcagtgatttttgcgatgcatgcttattgcagaggtccaagaaggatgagctgcattatggattccatccccgcatcagctgttcaagagggtggaaaagctccaacacagactgaatttcctcttagtggcctcgactctttcccatcgatttcattcttcagatcaaaatcacctcgtatagagatagtgcaactttacaattatctactcagaaggaagaaaagctggttccgaagaataaatctcctaggtggcatgagcaactgcaatgatggtgcctcaacttccgtggacggccacgggctactcttgcctctgtgaaaaactttcagctggtgtcgtctgatgaaaatggaccaactaaccaggagcaggacaaggtgattcctccagtttggaaagattgagaaggacttgttcaccatggactaccgttatccgatatcagcatttcaatcatttgcaatctgtctgagacctcccacggtggcctttctggactcactctgattgcaccttagactcagatcagacaacgcgctcccgcttagacgaaggggcaaaggaggcgaacgaaagcccgaacccgaatcatacgaaggaacgatgttttttcgcgaatgtgcaaaaaaattgcacgtcaatatattagaagaagatagcagagtttgattacacaatgcacacggtcagaaaaccgttgacagggggtcaaggaaaaaaaaacaaatacaaggaagataagctactaagaaagaaaaatactcctatcacaagagggagggtgggttagggggtcccactacactccggcttgcacctgagacgaggagctagagaagagtgaagatagggccatggcgtgatccaaaggaaagagctgcgtgcatgaggttgtatcactcagcacagcgagcgcgagcttggccacaatcctcttgctacacttcggcactattccacggtggcaatggcaggcaccggaagcgggggcagcggagagacgtaccaaagattgtggcaaaaacatcttcaatttttataatagtagagagtaaagatagagacagagatagagaagagaaacaactagccttgaattgttgtgtacttcaatatcaattaatctataccagcattacagaagaaagcaatatctaaaaatttacagccaaaactatatatatagagataccatcagtgagttgtgttcacaaaacgcactttcaagttgcacaagtacatacggtacggctacctagccgcaactgctatctccgaaccaacaacctgcacaccgtgatctctgacgacgacattgacgccgccgctctcgtcgtcgccgccggcgagttgccgtgcgtgctgcagcaggagcgtctcggcggcgctcctgcccaggacgatcctgcaggtgctccagtcgtcggcctccatgtccactccaaggtatgtcaggtggtctgacgcgctccagaacagcaccagcacgctcctggaatcaatggatatacacgcaaaatgttcttcaggatctctactagtacagcacagctaggcacaacaaattaagccattattctgaagcactgcgctggattgagatgccaaaggatgaacgagcgacgatcagtcagtcgtcagatcagatgatcacctggagcagtctggatcttcgccgctgccgtcgcagacttggtagactgtgctgccatcgacttcatgttcccagacctgaaatttcagttagtgcgtatgtataggtgatatatatgcgtaagtgagaacattgtttgggtggtgaaacgatgatgtatgatatatcagagttcagagggggcgtttggtttctgctatctagcaagaaaaccgttacagtttaaattatatatttaatttatacaaccacgagtggtagcattttttcattcttcaagcagataaaataggctggcaaattagtttaaacatttcatgatgccaagatggaaagaaaaaatactgttttgcagaaaactacttgcattgtaatctagttcaatgtgaagaaaaaattaagcacaaacgttgtgactgcagtttagtagtacttcctccgtttcacaatataagtcattctaacatttcccatattcatattgatgttaatgaatctagctagatatatatgtctagattcattaacattaatatgaactaggaaggtggcccgcgcgtatgcgcgggcacttatattattgaaaggtaagatttttattatttgtttaaagattttgtctcatagattaagggaaaactaaagttcggataatgtaattttataataatttaaggtttctatttttcttaaagtatcttaaaaatccattcacaaatttttaagtaggagatggattaagtacttacgacttttgaaacatgttattttctcgagtaaataataaactatatattgcttgtagtatggctacaaattaaaaatgtgagagcaagatactcaaaattcttgtgattaaatcgtctcatgaaggcgcatgatatagtaagaaagagagggaagcgtatatatgaagaaaagaagaaagggaaaaatgataaaagggaggggaagcataggtacccacgcgtacgtaggtgcgtatcgaaggtggagaggtgggaccttgtagtatttagtttcttctaagatcaatttaatctaatggtttataatattgaacccaccgatttaagtgaaaatcaagtaatagataatttgctttttttcttagaatttctaatatgttctctaatttattagagcaccaagtggtagcttgagggtatttgaaattttaatggacttaccacatgtaatgagaatattaacatgtaatatatatgtatgggatatatgttaatattcattctagctttgtccatgtttatatacatgtagagagaaattaaatatgttgctagcaaaccattagatgtctaattaatagcaaataattttgacacatatttgcaattgttcatagtagctcttaagattcatgttaccactttgattattcgttgatcaccatgattcgcacgaaaaaaatatgtactacttagggtttaggaaaactgaaattgatgaattatctgatttatgtgatagctatttgagattataaacaaatgaattaacttctaaatagttaaaaagtcgtttaagaaaagcaccatttataaacttggaaaagcgtggagcgtgcaaacgaaaatgcaaaagatggaatcaataaaaaaaataaggccttaaaactcccttattactcttatcctagtacgaattatattaatatgtgttaatattatgctgaaaatagggaggagattggagaggaatgaatagcatacaactcgagccagagatgggttggcagtgtaacagtgttatgcacatgtgattggagagggaggtggaggggacattgtttttctaatgtttctaaataatgtaggtgagaactcgttgttttctcattctaaaaatctttaacagttgatatatatgtggtggcttaagattttttattaacaaaagcggtagcgttgcagcgatcgtgatcacctaagatgcctcagacacgatgctttgtcacacgtgcgaaaggcaaaggtgtagatgtgcattgtgcagcggaccaaaaagagaactttggacactttagttattaacaatagatatgttgatttaaataatgggtccaccggttctagtgtaaatgtaaattagttaatatatattttaaattgttaatttaatgggtacacaatatgatggtgtagaatttattttaaaatagtatattatttgagaataatagtccaaattaataaaaaaaaagatcccatgatttaaataatgggtccatctgtttaagtgcacgtataattagttaatatagatcttaaattatttatttgataagtacacattataattgtgtaaagtttattttaaaatagtgtattatttgaaaataatagtacaaattaatgagtacaccggtttaattggaaattatattgatttaatgggtaaacatataatggtgtaaattttattttcaaagattgtagagctaatttagttaactgtgtttataaagaattatatgatggtatattctttgtttgtaaattatgtttatttagaatatatatatatcaattatataaatggaaaaaagaagagagaaaaaggaagaaataattggagggaggcgtacatactacataccaaaataattggaaggaggcgtacgtactgcatacccatgtacgtacgtgagttaggtgggacccatagtatttggtttattttagaatcaattttatctaacggtgtataatattggacccaccaatttaagtgaaaatcaaggggtagatgttttgcttttttcttagaatttacaggattttctctaatttattagagcgccatgtggtaacttgagagcgtttgtaggaagtttaatggacttttagtatataatagatagatagatgtggaaaatgctagaatgacttacattgtgaaacagagggagtagcaaatttcctgtttttatgcaagagctagcatacctctgttgggaagtgatggtatgtttggtctggaaaaatgaaaaaatatgggggcaaatgcggcacaatgtcatgctcatgtgtcactcgaattgtattgggcacatatttggtaaagtaggatgcaaatgcagcgttgccaacgcgcggctgcccaaaagtcatcaggtaaacattgttgcctccatgggtaatctgcaaatgtagaaagcatttcagagtttaatgaatcagcggtgaaagaatatctactgtcgaaacaaggtatcttcttaattataacatcatacttaaaaaaacttgtgactgttttttagcaattcccttgcaaacatgcaacgttagtgaaactacattacaatcaagctttctgaatttgttcagttcggattgttttggcctgttcattgtgattgtggtgatatttctccctatttcctttaactgatgcttaaattcagcaagtatttggttgaatttcagtagcacttaccgcaagatcaagtgcacagaaagaagcaagcgctcctcccattgaatgccctgtaactattatgctaatatctccatataacttcctcgccttgtgaacggcgtttgcgatggctggacgtaaaagtgtgttattgtaagaagagtaaaatccagtgtgaacctttaaccagagtagaaatctcatcagacccaaagaaaaaaaaactcatgtcctattcttcagcaaaaaagtataattacattaacaggtcagtggcaaaaacctttgcgtcgggcatgtccgggtagttcagatcagattgcttccatagcatatccttaatccaattctgtacactgagcagaaaatttaggcatgaatacagagggatatcataactcccgtagaagccactaagaacaagaaaattgtgtagagttatttcagaacctgttctcttgagttcccctgattgaaacaatgatagcgttgagattgtgatcgacaccaacaaatgcctgtcatattgtttaatgtcatgtagtagcattttatttaaataggattgatgagaactgtattgtaaaacagtattagcatttagatatagacctgcaagcagttctggacatcaacgattagacgtctcatctcgaacccctgttttcggaaaacaagcgcccatgacaaaatcaattttaatcgtgatcaaaatgaaactaattaggcaccaaagtgttgggtatcttacttggattaagtcattgcattttgagcatgtccatgtatagagctctgttagatctgtcatatagacctatatatacgagaggaaatcatttttttagataatgggtaacgcctggcctctgcatcctaaggtggatgcacactgccaaatacgagaggaaataattgagggtaacttcatgtcgagaaaaaaaaagaataaactaaaaaggggttgactctattcactgcaagatacaatttactcttgaattacaccaaaaaaaaaattggggggtgggggagtggtgcattgagtattgtatttgtatatgacacatgacacaatttggaaagaataaggtgatgataacttacagctgaggcatactccacaatagtcttggcaagtgtaaggttgaaaccaaagctctgctcactattctggacactggattctgtggagattggaacatctagcctttaggcatgctgatagatatcttatcgaaaagaacagggatgctgatatgtgcaaatctcagttacacatcatacattcatactcatcaagaataaatgctatcagacaagaattagaacataagtaaactttagtgttgcatttgtgtattccttagattgtctgggtgatgaaagcaatgttcctgctagggtaccattccttcttcatgccattagatgaaagaattgagatacaaaggccctgtactttgctatacatttgaaggttcaagttcaactcacgcgtgcaaaatatcctttttttttttgcttccaggtacaatagttattgatttcatataccctatccgtttcacaatgtaagtcattttagcatttcctacattcatattgatgctaatgaatctagacagatgtgagaaatgttagatttacttacatcgtcaaacggaggaagtaaacaatagtcaacattattaatcgtcttgcagaaagccagaaacaatagtcaacaataacagtcaacatcactgtcttccagaaacagccacactactagtgattaaatctactactacagtacaagcaaaccttgcatgagcacattgagatataaaattcgcctcatttttccccccttctcaaattgaaattaaatcgatgaagagaaatcagttgcataaaaaaacaaaattgcatcaaagaaaacaaaaaagaacagaaagaaatcaaataatcaatccatcagctgccgcgctagcagcaagtgataaggctgaggcagagatgagctttacctgttgctgctacgatcccatggggtgggcgcgatgcagcagggatgagcaccagaagcatcgccgccgccgccggccgcctccgcttctccatatgccaacgttgcacctccgctactttctttttcaagataatgaaaaattttattgaatccagtcaattacatcaagatgaacctcctaattcggaggagttagctgcagagagagagagagagagagagacgatggagtggaggaggagaaatcgagaagcagaggaggaggttgcaggacggatggaaggaaggaagaaattggcaggttggtagggcgaggtcgtcagacgcgcagcacgagatgaggcgagaagaggctacggagtacggagtagtactagtactagactactacggttgccgcggctgtgtttagattcacgccaaaattaaaagttcgaacaaattggatcaatatgatgaaaaagttgtaagtttgtgggtagaaaagtttgatgtgacggaaaaattggaagtttgaaaaaaaaaaagttaaaatctaaacaaggctgctgttatggcgcaacaacgaccacgtttcggcttcgctaaaagaaaataatgtttgagcggatgtcagaaagggtttttgacaagaataaaataattaattttataactcgtctgaaaaccgtgagtaaaataattaatttcataactcgtctgaaaaccgcgaatcttttgagcctaattaagccattgggttactgttgcatttatagctaatcatggattaattaggctcaaaagattcatctcgtatttccatgcaaattatgcaattagcttttatttttatctatatttaatgattcatgcatgtgtttaaagattcaatatgatgtttttggaaaaaaaaatttgggagctaaacccggtcttcgttttgttgtaggccatttgtgtctcttgcttttctccttccaactcctacctaccaacatctacatggcatgcaaggataaatctagaacgaaatatatgatgtgtctacgcttacaaataatcataggtataatataatgtttaatttgatctaatacttatgagatttcaaaatttcccctatgtcaagtgaacatcacctaaactttggatttattcacttcgctgccaatttcaatcttactaattttagcaataccaaattttgatacgtttttacgttgtcaaattttgatagcgctggatttatttagtttgatttctttccaaaattcggtagtatttctatgagagaaaagttccagagctaccacgatttgataggataatgttagtaaaaggtagtgtttagtttgttaccctattaaaatttgagaacaccaaaatttgctatggttaaaagtggtgttaaagtgaacaaacttcacatgtacatccgcccctagctgcagtaaacccacttacctctaaaaataaattgtggttgtaaactgagcatggctactcatgctttttttttaacttgttgcacaacattatattaatagtacatactcgtaagggtgtgtttgataaagcgtatatacttatcggaagagggcttctctgacatgggtcactagcatgtgggtccttgagctatggggctcgcatgtcaaccccttaaagtcagagggcaataagttagagaatctctttccatatttacgttacttatggctatgttatgtctctaatctggttaagacgtgtgcaaggcacactcacttgtgacattttgaccaaatttgcaaaactacgaatttagacaatctatcgtaaaagctatcggtttagtaccaaatttaccgcaaacctacatatatttttttagataatggcaaacctacagatttagtagtgaaattctaaatatagattttagctcctaggactactattatgttagaattataaacgttgtacttttgcactaaaatagcactaaatctatagattgcggtattatgctttacatagtttcatgataagctcaatactaaatctctagttctgtgagatacccgctttaaatctatagttttacgacagtttgatttatacgtagttttacgaatttactatgaaatagaaattaatctatatttatttaaagtagaattggctaataagtatccatgggcttagcccactcccacctctctaatccatcgccttggcctcttggggtgggatggtatggtcaacaggccgcctgtggccgaatgaggcctgaacaggcacaaaggcaatacgtaccctttttcaggcccagaaaaagaacagaaatgccaggtgtcctttagtgtttttagcttggatctgcactctgcagaccaacaaaaattgggcacatccctaactgtttcttcgcctttcaaattcaccttgctttgttacataaaacgtgtataattcgcatacaagatgtgacccatgcagttcatgttggactgaaaatacacttaattggctacttaaaataacccagccaatactactgaatactaagtataaatcaataatatgatgctgcggtgctgacagcatctgcagctgaattttatatgaaatttactcaatttaattaagcagggagcaccggggcagccaccctgcaggtgttgtgagactggcaatggcagcacttgtgccctgccaccctcgcgtacacctgcgtcgtgtccctgcagtcgttgcacacgatccatccctgcaaaccaacaccaatcagcaacattagcgtcaaagtgtatgtagtattttatactgtcaaatggcacagggtgagagttcttggatggaggcaagcttacctttcccatgtaatctatgtgcagcatatttgcttcaatctgcagaggttaaaaaatgaacatattatggcagtattcctacaaattaattatcactaaggctttagattggtgagactactgcaactctgcaagtttgaaacctttccaaaatgtaattgaaatgatgagccaatatctggtccggttttttagttcctttgcatatgatttgtattttggtttattttatattcactatttctgaacctacaacaggtctattaaataaattgaaagatgaagtctagttgtataatgctattgtgttaagcaagctcactaagaaatttaatacatacctcagcgtccaaagccctcaagaacttgtccatgtcaaagataggcatcgagcatatgggacaagagaacctacaattatcaggcatccaagaagaacaagatcacacgaaagagatgactaatctagcacacaaagtaaagaaacaaacaaagaaagaaagagccacatggaaacagatcaacacagcatgggcgattacttgtcgtgcttcagcatctcgtggaagcattgcaggtgcatcgtgtgcccacatctgagcacggacgtctcccttagagagtcaaacagatactgcatttgtgatgacgatcgacagtttcgtacataagagactgcattttttttaaatgaacagtatgcagaaggtagcgnnnnnnnnnnnnnnnnnnnnnnnnacattagaacacacacctcgtaacagatggggcagttgttcttcatggagttctcgatgcagcagtgcttgtcgcgcaggctgaccgagtagcatgatcctgtgtttcaacagatatttaaaagtggaattgagagattcagattcaaccatctcaccagtaaatagtaatagcttgggatttcagtaccgagtatcgagagatgtaggatcacactgactcaccacatttttcgcagtggaagaagttatccttccctccaactctattgcaaatttgcaatgcatcccaaattcagtcagctcagaaaatttgaaatgcattcccactttttaagtgatttttttagatggtgtggtaaaaacatacctgcagatgccgcaatcttggcagtggaagtgttccctgtcaacctgcagaacacgaacgtgcatctcatcaacaaccaaatcgaaaatcaccagatccagcagaagcaaagcaagcagcatcggcatctcacgtcgtcgtcgaagaatttgcacgcgctgcagaagtactcgcccatgcaaacgccgcagttgtagcacacttgcgcaacctgctcaaaaaaaaaatcaccggtcagaaacaaaaattgatccaagaaacggaaaggaaagcccagtggattcaacactaaccggctgttcggtgtcacagacgagacagataacctgaagagcagataccccaagataagttttttcagtttttttcagatcaagaaacaggatcgaattgatgtgatataggagcacccaccgattcaaccgcgtgccgatcgagctcgtggccgtctttctgatccaagaacagggagcggcacatcagaaaggcaggagcagaaaaaataaaaataaaattcaggattggtgatgcaatgcaagcaagcacgcgggggagacgaaaccgtggactcgttgtggcaatggcggcagtggaagacgtcgttgcagcacggcgcccggatcctgcacctcctcctgtagtgcttgcatctgcgcgcgcgccaacgactcgatgagctcaaaaacaaaacgaagaaagaacacgaaagcttttcttgtccaagaacagcagcggcaaggaggaggaggagaagtgcagagcagaggaatttacccaaatcccatcctgccgaatccgtggcgagacgcgtcgtcgagctccatcggttcgatggccgcggcgagatccgagcagcctcgcgcgccgctgttgctgcggcggcgcgccaagaaggggacgactactattttatactagtgaggaggcgagctgtgctcgcgagtgtgtgtgtgtgtggtgggggcttggaaggaagggctgccgagaatggcaagaaaatggattgagatcagctgcagtggtaacttccactgtaacttaggactgcacgtatcttcaaccattcattttgatgatgaatggtccagatttatcgctacagtgatcaaaatagaatcataaaactaatattttattctacggtacttttgctatagtgctctgactaacctgtgccatccgattcagatcaaacggtagcaactatgactgcataagttgcagtcagtactactactgcagctgatccaaatctcaagaaaatggagattggggattgggtcgccactgtcctgtcagacacacggattctctactgtaaaaaggaaagtcctgattgagatgtttagtaaccaaatttatgagaatctaaaaacgttaagagttttttagcttatggcttttaactcatatctttaaattctactactacactttctataatctgatggtcctatagtagcaaaacagtatatttgtaaacggaaagtaatttgtgaataaaacttttatatacgtgttcttagttatctaaaagcaaatactgaaaaataaatttcgatgaaaaaaccaaaaatcagctttaaaattaatgttgaaaattttaattttgactaataagtataagcataagcgaaaagatgatgttgtaagttatttggaagagttcgtgattctgaaagaagctgcaattgtttttccaaacagtccaaaagttgtcttcagatgttgcatctgtttggagtaaaaataaataacttctctctctttgaggttcttggtggtcgcctaggaggagccttaaatgccagcactgttttgtttacaactcttcttttttttcaacatcttctgcttgggaaattcggagctatcttttgaaagtgtacttttttaaaacttatcaagatgcaatggcctttgcatttcttcctctcagagctttcaagaattgtagtatataccagcaaggttggattgaggaggtggcgtgcaggtagatcaaagtgacatgctgcccgctccgctccgcaccaactgtattcaagatgacgattccttgcttcctccggcagttcattcccacgatccacgcatcaacccatgacaaactaaccgatcttatcagtttattttcatcgttgtttattttatggcattagcttttaaatcattaaaaatatatatacagaagttttataccaaaatattattttttaataataaatgttaggccttataatcaattgtaaacgaaatgactgaacggtaggactcgatgacctctaaaggtctgcagacacgctacattatcttatctttcttgtaatgggtgaaatttttagaaacaaatccacagaaattgatttattccttctataaatttttaaatttcatgtattcgaaaggagtcctaccgtttagcgagccatctccataaaatttgcttccaggagagtgtttgtgcggttcccctggagcttcttcacctgacactcgacctgcaggctgcagcaaccatcgcgcttctctgcttaagcatttgaccgaacaaaattaggtcgataaatcaatcgatcaaaacaaaattaggtcgatggctggtcgaaccggcaccttccctgatttttttttgctgcttctactggaaattataaacggactttttttcttctcatcagggggtcacatctgggaggccagagaggatgggggcaggagtaaattattcacgaggatgagaggagtcagcataatgcattcaatcactcactgccgtgatgttccgcccaatctccagttagcgaatcatgtgtataagcgataatactccaagatgatcttccagcatcttctttcaatactgtatggagtaattccatgttgcatcatgcttaggcttgtcgatcctgagaaagtagtacgtgcaaaaatagaacattcgaaaatgacgctgttagatccgagataggacgcgggattaagtgggataagccaacagaatgacagtacaatagagccgcagataatctcctcgaactaagcaacagtgcatttggatattcagaaactgctttacaaccatggattaataatacagattctgattggtgccattaagtttcacatttcacacactacacatcagatgacccccgggcatggcatatatgttctcttttggctgatatagctgagtgatcaaaaggatttgcatccaccagtctgaaacattccggttcggaccataagcacatcaccagcacaaacacagaaaagcatttccgcgtgctttcggaagcttttgatagtgtcaggtatatggccggacagatccccatcatatgcactgcgccaccttctgatacaaatcctgtggccagttcctgctcatgttgcttgccacgaggtttgcgatctgcccatcatgaaaaatattgcatgaaaaaaatgcagggggttgcattttatattatagcgagataatatcagaataatgctaactaaaagaaattaaattaatgcatgtctaaaacgtgataacacagcatggtgccctcctctgcggtcatccagataacttatttgaaataaaaatgtattaaaaacaaggttaatggacgtggtcaagcttgccatttgacaatgaaagtctccagaaggatgtgtatatgtggcagatagctagcatttagcagcgtagtgcgtcatgatatgaccagattttacactaagattggacattgttggaaaactttcttgtgcaagctctctatagaatattttaagtgcttcttgggcccacaggctgggccgcaaggtttacggccgtgacagcaatctttacaactacaacagctaaagacatgtatcagcataagactgcccaactgcaatcagccatcaggtacgtaactgtctgtgtgcacacacaagagaatgcttgcgagtggtataacctgctagttaaggtatgtggatgtgttactaaacaggttcttcaaattatttatagtttacttatctatggtagtttagcatcacattttctctgccattatgaagtgcagtgcctacatgctcattgtataagtaaatgcgcaaaagagattgaatacctttgacttgactgcacgcaaggtcccatcagtatctctaacattgtccatacaatttagagcaaccttcaagagatctggcacacaagcttgaacatgcggtgacaagtttctgaacacatcaactgtcacatttggagcctgaggatccaaatgaagaaatgggagtttgatggtttccctcaaagcatctaaagtctgtccagctcgagcaagcctatagatatggagaatagcttcaagctgtctcagtacagtttgttgctcagatatgaggtccttgtcttgaacactgtaagaacgtttccaataaattgatcaaaacacagctttaaaaagcataaaggattaatgctcaacttgtgaaaaaacagaagaggataataacctggcttccgaatatctggcagtttccataatttcattaccagaatgaattagagcagcagcacgactttcaccatctaacatactgcgtgccatggcacatattgcatccgacaggcacttatttattgtctgaagtgccatggcaaaagctccaactcttttatgaatttccactgactgagctcatgcagagcgtaaagtgatattagacggatatagaacaactcaacaaagagagtaagaccaaagtgcagaaaacatagacatcttcaaattcatatggtaaatatctacttctgtaccatgtagcttgccatcaatagtttataaaattatagtcaacggttaaaatgcacgcacatatatcagatttgatgaagcatgtgtgatatgtcctacatgtgacaatcaagacgagtttttactactactatcacaagaaaagagcatttacttgtttacttactttgtcatagaggcctgcctcatgacactgatgggcagcttcaagtaagaattgctgcctgcttctccaatccatcatatacttctttaattctccttcttcccccattccacttggaccaagcaaaagttgaatgccaccatcccttagtaatatctctgtcagcagttgcttcaacattagatttcgctgccgctgctgatcagcattccctcgaccaatccatgatacctctcctccacccattgcagcagcagactgtgcataatactccaaggccaaatcaaggttaccattacgcaaataaatagagccatactgccgtattatactggcagcttctgcacaagcatccatgatacccatcttctggcctgacccaacaccatcagggagaacaccatgatcagataaagcaattgaaatatgcacagcatctacatggtatccttcctctccaacttctttagacaaataaagaattgctggaagcaattggatgcttaacagcagaacatatggatagaccaaggggtcttttccattctttgtataatatgatggttcaaatttgtttaagtaactttgcagatcctccagagtataaggcaccaagccttcatttgaaacattagaagaagatgcactggtgtactcccgcagagctgacaatttgaaccacaagaaatcctctatagtattgaaaagtgttggcagatctttaagcaatctgtcgatttgacgtcgacaaccacagatcatggcataaaggagcaacttcttcctatcataaccaggacggccaggtcgatcacccattctcagcattttgtcacattcctcagaagctgtcagagcagtctctggggatacagcaccattagtagtaatccattctacaagctgcaaagaacatattatttgcatgtatggtatcaagaacaagaactcatcgcaatttatgacatgtcaatagtttaccaggggagcaaagttgaatgcagcacgagatgattgggcaacttgtcttgcctcatcatagtatccggttctcaagcagaaataaatctaaaaaaatgtcaaacaataatacttcaatgttagcagtacaagattaacaagttacatgaaaatcaaagagagagaacattccatgaaggcgcaactgagaaatatttgttgataaattagaataaagcacatgtacccacagaaaactttttatgcatcagatatggctttactttagagtattatagcctacacttgaataaagtaagtcatagaataagccgaattgacctagcataggaatgataccatgaaaagcctaagctagagttgaaaaataatgaataataaaaacactcatggccccagtgttgcactatattcaacacgatgttctcataaaagctccagtattcttcagttgctgcacttactgtattttggtggcacggttttatttgaatgtaaccaattgttttttcatgattttaatatgccattactagacagattgaaatggcaccaattgcaattttgtgttaaatacccaaaactaaaaagggaacctgttgccatgttgtgtccactggtggctgtctacgcagatcagttgcatcaaagtctagcacaccatgatcccgcaaacggacctgccagtcataaggacaaagatgcatgaagctcatgtagaacccaaattgtacagcatcatttcacttgaaaataaaatgatgtacagaaacaatgaaaagggagagaagcatcaaatttaaaacatacccgaagaaatgcgcgaatcttctgaagattgccaacagatccaccaagagcagcctacaaccataaagcacaatcacagcttaattaagatctattgatacaacagaaaagctcttgcatgagtaggtttcctaaaacataagccacatagtaaagtgagagtagggaacatcatttgctaaaagactaatggaagatcacaaccatgtgttaaaaaatcaaaaaataatgaactattctgagttgctcactaacattaaatattatcttccataaatatgcacaattggtagaaagcacatatcacatcacaattcaccttcaggacattcaagaaagaaaattaatgctcaaaaatatgaactaaggtgacatgacacaaaagagtggaatacccataggcaacataagaaaacaggtgtagtaactctcaagagttcagttggatcaacaccaaaattattgtcagaatcttacatgttatattctattttcataaggaattttgaaagaaatgtcagaactaaaaagtatgtgaaaatactcactagagccggatggctattgatggtctcaagtatgtacttttcatgaccccactcaaggtgtcgtctagcaccaatcactagtgacatttttcttgaaatgtttcgatgagttgacccttccccaactaatgcctgaataagacaaacaagaagcaaagtatagctatgagggaataatagataaggatatatcatatatattggatggaaaagggccaacagatgtcagcatgagtgctacacaaaaatcaattttattacctgaattaaatgccacactttatgcatggtcactgattttgtcccaatagcaccaacagataaagactcataagcagccctgaatgctgtagcaggctaaccaaaagataactttaataagcattagcagaactacaagtacatcaatagaatttgcttatgctctgatgataacatgtcgaggctacataaaaaaaaaggcacttgatctatttctcaaattaaattatttggagaatagaactatggatagcaaaaaccacaaattcaatctataaatgaataaatgtccatagagggactaagtaacatgttgaatcatagcatatgagtttaacacttacaccaaaaggtaggctgcgccctctagcatcattaagatctctcacaactgcagcataaactgaagatttgttttcaattatagttttgttaggtatgggcatgacttccttagatggcagaccggacgaagattggggactggaagctgaagatggcatcagagcaggacgagaaatcccactggccatgagattagtgtttcttttcggtaatgtagagagtcggcttagactctgcaagaagtctcgcttctccttctgccaatcatcctacaacatagatgttatataagttgagaaccaaaccgtaaaataatttgaaacattcaccactgagcgacataggagtacaagaccaatataacactgaaaaatgtagacatcttagttacctgaaatggtagtactgtactgttcaattaaatcaaatcacaagttcacaaccctatgacaactgattttgttttctaatgtgcaatgcaataatacatataggtaataacatatacaaacccccagatgatacagaaatttgccgagaaacttttaacatataccaagatgatataagaaagtgcaatctgaaaagcacttcccacaggcttgcaacaactaaaccagatcatatatatatatatatatatatatatatatatatatatatatatatatatatatatatatatatatatatctactactacttaaaaaataagaggtgcttccatcgtccgtcaaaaaaaccgggtgaaaaaaaaccggaacgaatccgattcatcaacgcggtaaaagaaaaatcgggaaaaaaaaagaatatgtccgattccacaaaaataggaaacaaactcccatctgttataccaagtcctattcggttagcatcaccaggagaaccgacaccattcacagagagagagagaaagagacgacgccgccacctctcccgcccccgtcggaccgcagccgcctccatgccgccgaatctggcggaggcgaggtccggcccgccgcccctcccacccccgccgggctgcagctgcctccacaccgccggatctggcggaggcgaggcccaaccagcgttccatgacgtccgccaccaccaccactgccgcacctccccaccatgcacagagagagagagaaagagacgacgccgccgcctctcctgccctcgccggaccacagccgcttccatgccgccagatctggcggaggcgaggtccggcccgccgcccctcccgctcccgccgggccgcagccgcctccacgccgccgttgttcggggagagggcgccgcgccgttggttgtgggggagggcgccgccgccgccgctcgggggcgcggaggggagggcggcgatgtgagatgggagggagggaaatgggctagggtttcggcggctgaggagaaggaggggttttgtttccccgatatcgacgctcggccgtccgatcaaaaccctaaagatcggacgatcggtgtcgtccaggccgaaatcagcccaagagggatcgagagtgaggccacttttctggcccaagcccaggttgtggcctggggaggggaagtgcacttgcgcgtgcacaaaaggccgtggaccgaccggcaagggccggaaataagtctattttaggtccctcaggcccaaaaaaagagaataagttcatttttagtgctcattttttcagaagcattacaattataagttattgaatgtgtttatttcgaagcaaacctaaaaggaagtattttctttctttttccaagtaaataattgttaaatgacgtttgtattaataaaattaacaattaagctctgaaaaattcaaatataatttcaaagagcgtaactaatcatggagaatttaaaaaaaaaaattaaatttaaccatgtcattttatttctcacacttgctttacttgtaaatttatttaattatacacatacctacttaaaaataccaaatatttcagcgaatttgtattttaattaattgcatatttttctaatctgtacgcttcacattgtaacacacaggcacttttgctagaccaaacaacacttttggtcaatatacacactccgtaatcacccggtgcaacgcacgggcacttttgctagtatatatatatatatatatatatatatatatatatatatatatatatatatatatatatatatatgtaatgaagttagcagcaggaaagggtaaacaacctcgagaacttgcatcatataattgttaaaactccttaagttgtccttttgtgcttcttgaatggatgagacgattgccatttcatgaagctgaaaacacatgacatgtttcaggatatattccatgaaattaggagaaaatgcatgtaaaagatgtatgacggtatgaagtgtgcacctgctgcaggtactcctcgacagtagttgcttcagatggaaaaacatcctcaaatgtggtctacaaaacctcaattttaatcactatgatgtatattcaagtagtctagcaagatagagtagaaaacagaaaatatacaataagaagctgcagattcacatacagcaacagagttgtaaatgtattaaggtatactgatgaattaggagtgaattttagagaatgggacatggggcatacatagtgaacagtaaagttatggtggatatataaggtgaagtgcgaaaaatcgtgcgctgttattgagtaatgatttccggtcaagttttttatatcaagagcccgctgatccaagcaaaaaatagtagcatttacccaataggaaaggactgattcttacactattattataatgaatacatgctatcgttatattagctgcatttaaatacacaaagagaacattgcatagataaagcatagaaatatgagctatcaatttcttactcaagtagataactgtatgttaagtttcttctacaatttaagtagaaaattgaacgctaatctggagcagtataattgaaagtataggaccaacgagatcttgctgcacctcgaactctagagtcgtttcttgtttcaacatagttcatgggtaactatttcaccaaagctagctcacagatactaactaaacatttcgtcaaaactactgaactaaactatttactagtaagttaaactgctcttccaatttaagaagacatgatgtattggtaacaaacaccaaactatcatcttcacttcttcatttgaaattgtaaaggatgtttttcaacaatttggtgcaaggaataaaacatggcaatgcttatgacttgttataattttattacgttttaaccctactttgtgataaccctaggttttaaccagcagtacagtaaaatgtctaatctcaaaccggacaaactgctcgatctgataatcagcaaatgagattagtataatatcactctatgaaatgggatatccctcgccggccatcaccttaagttcgaaggatttgaggtccctggcgagctgctccgcattgatcccctcgcgcgccaacaacctgcagaaagcaaagcccaaaaccctaagtcccccgtaaacccccaacaaccgcctacccccgacgaacccgacgcggagaaccgcgctgcgagcctcgccgaggcaaatcgaaggggggctccggggagaagacaccgacctggtggcggagagcgactgcacgggcgcctcggcgcgcaccgtcttggccttgagcttggtggagagcacctccagctggtccaggttcctctgcgcgcggggacaagcacacgggggaacacgtcaggcggaagaagctatggcggcggcggaggaggaggaggcagatgcgggggggaggaacgggagaggaaagcggcggcgcacctggaggggagggaagtgcggggtgggggcggcctgctcgaggagcttagtggaggagtggaggagctccgaccacccgcccatctccacgtcgccgccgccgctgctgctgccgccgacgccggccatcgccgccggggggctaggaggagggtttggttggtgtcgtagggcgtggtgcggcggagcggaggggggagtggagcgggtttttcctttttcgggggtagggaaaagagggctttgttcttgttgtagatgggcctgggcctaccggctcttgcgaatttgtgcccgattcaggtcagatcggcccatcttctcttctgcatttttttttaattataaattgtgtctatggtatacgaacttgtgtgatggttggaaggctgtgtttagttccacgttaaaattggaagtttgaagaaattaaaacgatgtgatggaaaagttagaagtttatgtgtgtagaaaagttcaatgtgacggaaaagttaaaagtttgaagaaaaaagttggaatcaaaacaggccctaaatcggtacaataacatgcaaatcgtttggcccggtaaaacaacttgcttcgtcagtgcgaattggggtcaaatctcacagtgaaaattcacttcacgtcagtttccacgtgacacagttcgattgcatattgcttttctcgaatgcgtctattcttgtggtggttgtggcataaaaactactccatccgttttaaaatatagcaaccttatactgaatgggacatatcctagtacaacaaatatggacatactcatgtgcaagattcattatactaggatgtataccatccagtataatgttgctataagataattattatgtaatgcaaaactagaaattaaacatcaccaaaaaaaagtttgagattatttgcaaaagctaccagaacagatgaaaacaaatggaagcaagctgaaactaaattgtgctgcatggaaaccaagtcagcgatatatcagttcatttagattgtgacacccgatttgtcctgaatcttgattcgcatgaattcagcaagttattgtatcggattaaacgattcgcaagttgttataccaatctatacccaccacacaacgcaagttagtgtaccgtggtgtgtaatttactactccctccatcacaaaatgtttgacgccgttgacttttttaaaaatgtttgaccgtttgttttattcaaaaaatttaagtaattattaattattttcatatcatttgatttattgttaaaaatatttttatgtatacatatagttttacacatttcacagaagtttttgaataagacgaacagaagtttttgaataagacgaacggtcaaacatgtttaaaaaaggcaaacgccgacacgcctgctcactatgatattgtgaatgtggtgtatagcatatgcgctcttaaagagatgaagatcagcaacaaataactaaccttgctagattcttaaaattcttattgaaagtagactgggagtccgcattttcgtttttgtttcatttttgaaaagcttctgcatgctactacgatgctatcaggtaattgacagttcacctctctctcataaaaatgaaatagttcaaactatcatatcaaaaatgttgtgtataggttgacgtgaattcaagttcaaattaacaataaactttccccgagaaataagagcaatgattcattctaaaagaaagaaataatattgattataagcattaaaggtgtaccatctttgctgcagtacaactggaaaattcaggtcaccatgcaacagaccaatcaaaacacaagatttgctttggatcgatgaggaatgattacacaggttgcaattgaagaaaggtgttacaatggaaggggatgtcctgaaatgctagagatctaagcttccactcaaatgaatctaacaccaaatgcaccagggctataagaattgaaaaacagaacctaatgtacacaggtaaactacctgagctccctccacagcctatacaaccgatgttcgaaaaataatccaatgacaataagtcaagaagaaatcaagttatcatcgcatgcctcgtttgcgaaacagcgcatggtagctgctgaggagtattttctccataactgaagactctgtctataaatattactcttcagttccttttccttaccgagcacgggcagtggatggttgttttgatgagcggccaaacttgtgtttccatttctgtttcccaactgcagagagatcagccaaaggaccggaccaagtaggaacagagcttttctcttgtgtaaatacagtgctaaacgaagagggatcttggggttcgtataacgggtccatgtgatttgtagaaaccaaagagaccgcaccatcctgatgcggaggaggaaacttttcactcttgctttttgcatttgcatgtgttactaatctccttttctgtaagatataaataaatgggacaaattagagacattgcaaaatttacattaagagagtgccgggctccattttgggccatagtaaatcaaatgagaccagtataggtaagacaagaaaataaagtggtgataaagtgttactgcgacggagatgagactaagcaagtggtttcaccacctccaccttaaatttagatcgctagcctagtctttaagtaaaacagctcaaagaaacaaaaactaaaacactactggaattagtcagggagcaagtatgttcacatacatcgatatttatttgaagttcagcatttgcctctggagccggtactgccctaggtcgatcgcgcgtctttgtcttcttagctccatcattagtcctaccgccagcagctctcaaactgttgatcatgccatgaataggtcaggtagcaatcaaatatttctatacacgctcaactcacatgagagcatggacagaaaacatgaatcaaacatcaaatatactaggatatgtgggcatttggatcacttagtgagcaaaaattctaaatagctgagcccagatggtgagagactgactatcagcccaacgatgaggcatgtgtcagacaaattctgtgaaatccagggacattagtaccacagcagtatgtctacttaaagtttcacctaaatcagcacttgcattgcactaaaattacatttgggcaatgctttcataatttgattatatataactttgctgcatgaacattgtgtgccatctctttaggatatatttctatgctaataatattgcttacgggaaaaaaaaacatccatattaataccaaatatcaacaaacttttggtgaactttactgttttagcacttattagtcattttcttgtaatccgacaaaagagagtggcttccattctttttataaaaaaaacaaaagaaagagagagtggccctgttatctgaagacagcactttgtacaaatgtttctttcgaaaatagtgaaattgtttttagtttattgaactattccatatgcatacccaaatattagaataaatacatgttttttcttgtcgtaggtattaaacccgagcaagcactcaagtatccaacctaggtccccagaaaaataatgtgccatttgataagcaacagttatatgtttaaagttaaagatgctatttctcaaatgccaatttaaaaagaaagtgctacaaccacagagtgtccagtactagagagacagccaaggaccaaagcgaataacaaacaaataataaaactaatgagtatcaaggtgacaaaccgtctggcttcttcatctcttcgttttgcatccatttctttgcttggaggatatgctgggagacttgatggttcacatgcataaggttcagttgtaaagaactgcatagattgtaataagcaattctttagtaaaagtgtaaaacaatgctacataatttcaacaaagatgacaataaacagatctacttcacacattatccagtgagatatgtcattcaaaccaaatgtatgctattgaaattcgaaaatcagacttgcagttatagagtgctactatagcctagattgataatatctggtaggaagatgcttccatgctctttataaatcaaaaaatcatactttattaagcaaatagaaggcctaaattgcagccacctctaaataagatacaatggtccaaatgagatcacaagcatcatagtgtcatattgcacaaaagaattagtcatgtcatacttcttggaatatgggataggatgcagaaaaaatatagtggtcataatgcttgcaagtaaattattggatattggctaaatctacactagtagctacccagaacaaaatctagccaaagcaccatgttctgaaaccccaattgcaaactaagttattgcaatgaaaacgtaaatcacctacacccaagattttctaaaaatattgtgcttatagagggcaatgactttgaggcaaacacagaatcgcagatttcagaacttcaaactgtgtcgtaagacaccaaagccaacttacatcacttcttaatgcagaagtcgctgttaaacgatcagctggatcaattgcgagcagtgtttcaatcaatcgcagtgctgactgtggaaaatctttgtaagtctctgatattcgccttttgtatggttgttgaggcttaaatattgttgcatgaggtagcttggactttttccaatattcttctgtgggggagccgcacagcttaaaaattttatgcagctgttccacctaaaagggacagatgattattaaattaaataaacatggaacataaatacaattggcattcattagattggctggaatgaacaacattacgtgcatgaacagtgcaacaggtcatattggatctagcataatctcaagtacgaataaaaaatatagtacaaaataagggttcctttggaacacgggattgaaaaaacgaaggaataagaaagtcacaagattgcaaaacacgggaatcagatgagtgagatagaatcaaaaagaaattttccaagaggttggagctcttgctaattttcctccgaaatctccataggattgtacattccataggaatttcaaaggaaaagataggatttaatcctttgtttcaaatgccttcctaggattttttccaataggatcgaaatcctccatatttcctatgtttttcctacaaaccgaagggggcctaaaagtgtaatacgttgaacatgtggtactacagataaagttagaacttttggtagagcaacgtttccagtttccacatgaaaagctactggttttatcaaccactatgtttacctaaattgaaactagtttagcactccaaggcctccgaccaaattgaatactgtttcaaggcatttcaaactgataattagacaaatcagcatgctgttgctaacctcagtacggcctggcataataggcctcccagccaacaactcggctagaatacaccccgcgctccacaggtcaacgcccaccccataatccgtggagcccaaaagcaactccggtgggcggtaccacagcgtcaccaccctgctcgtcatcggctgattcttgttgggatcgaacaacgacgccaggccgaaatctgcgatcttcagcatgccattgttatccaacagcaggttcgaccccttgatgtcgcggtgcagcactccattgttgtggcaatgctccagcccggacagcagctggtgcatgtagcacttaacctgcatgtcagcatgccatggaaaacctcaattaatttcacgacattgcgtgctggaacatgaggctgcacaaagatcttggcggggggagacctgtggctcggtgaagctgatgtcggggctggcggcgaggccggcgaggtcgtgctccatgtactcgaagacgaggtagaggctgcaggacatgcgggaggtgacgaggccctcgagcttgacgacgttggggtggtggaggcggcggaggatgaggatctcgcgggccatgaagcggacgctctcgggctccaggttgtcgaaccgcaccttcttgagcgccacgatcttgcccgtcgccgtgtcccgcgccttgtacacgttgctgtacgtcccctgcccgatctgcgccaccgacaacaccgcgcgctgttgatgagctcagctcgcgacaatggcgagcgcgagggcggggggagctcgtaccttgtcgatcttctcgaaggagtcggcgcggcgaggggtccagccgtcgatggcctcgccgacgacggcggagagccaggcgggccagccggccgccacctgctccccgcgcgccctgttggcgaagctccccccgagcccgaggcgggccgcctccgcggcggaccgcgacgaccgtgcgcgcctctccctcctggccggcttcggcggcttcttctcctcctcctcctcctcctcctcctcctcggccgccgccttctcggcggcgacggcgggcgggggcggggggtcgggctgctgggggtggtcgggggagggggcggaggggcggccgtggacgcagcccatgggaggggaggggagtcggggggtcaccggcggcggcggcggcgcatggggtggaggcgagtggggagtggggagtggagtaaagcggaggagtgaggtgtgggggaccgagctggatgcctggctggcttggttggctgggctgcccgtggaggctttgactctctcgctcgctcgctctacgtgactctgtgcaagtacagtgtcagctcagctgtccgtgccgtgcttccaggcctatttttttcattcgtaataatttattattatccttaaattaaataaatagtgatccatccgtctcatgaggagtgtatttttagttttttgatacgacgtttggattttcgtcttatttaaaaaattatgattagtaactttatacgtaactatttttttaagttttttttataattttttaaaataaaacggacggtcaaacgttggacagaaacccaaaaatatgtttttaggacgttggacggaaaccaaaaatatgttctttgtaggacggagggagtaagtattaatatggattttcacaaacaggatggacactgaacgaacgatgtccaggtgtagactatctcatgaatgacaaagggtgtccaggatgatgcggcctttgactagttcagtctatctgtccggtcgccccatctacgatctatgatgaaagaagagaacacgaaaaagtaatgaaacacgttcctattgggatatgtcgatgtggggctataattgattgggtgtcgcgcgtgtccttttacagatccgccttcagtaacgtcatgctgctatcgtaaatttgtacatacatagtgaataatatgatctagctttatccttcatgccttcattcatgcatggcagaagacacttgcaatataagctagcccatgatgtgctcatgagcatcggtcaatctagtcggcatccgccaatgatacaggtggatgtgaaaaatgaaacctatctacatgcaaaaaaaaaaaagaagtgcagtggcaagcctttgacgatgacagcgatgacgcggacggagccatggagggcgtggaggctgccacgactggagcgctaataaacgcactatccatatatgtcggacgtggaagacatgtgaatggttagggcaagcagccactacatgacttgcttgtgatcataagtatgttcggttctgaattgtttgtgatacaacaagtctgacccccgccatatggtggacgccgtcgacaacaacgtccacagcgggacgaaatatgtaatagcatccaagactagacgttgttcgtcccagtatccaacctattttttaaaatgaaaattaaattactatttatttaattcaaggattattatttattataaataagaaattcgggttttgaggtgaacaattttattttctaaggggctaaaatcgtattacttcatctattcgtaaaagacaactagcagtacaggacacatatttgctgacctcacttaccagctagatcgatctaggaatctgaaaggacacaagtttcacggtaatgtgtagcgttaagtacctgggaaagacacaaagaggatacatcctccacaatgtcgccgcacacctctctcctcacagcgcacgccctcatttcgcttggagaatgagtatcccattttagctccatgttcttggcatggaaatggtagatgcgaacatggtgtggaatattttctacgacatgctcaggcaaaatgacacatcgacgcattgtgatgcccaaaataggagtataagcatttttaatgaggtagcaaaagtcttctctctttttaactagaggagtagaagtaaaacaatagtttttggacaccgtttatgtaaaatattgcttcctttaaccgtaaggatgtgcataatttttcatttttgaacttttaattgggtaaaaaagctatatcttttgggaaatgttaaatatgtttaaaaaatattaagaaaagttagtgtgggattgattttagaaaatgaggataattattgatgttgtttctttcctccggctgtttgtttagggtatatttagatccttggtaatttttttcaccctgtcacattctaatgtttggacatatacatgaagtattaaatatagaaaaaaaaaactaattaaacagattgcgtgtaaattgcgagatgaatcttttaagcctaattactacatgatttgataatatgatgctacagtaaacatttactaatgacgaattaattaggcttaataaattcgtctcgcagtttacaggcggaatctgtaatttgttttgttattagactacatttaatacttcaaataagtatctgtatatccgatatgacacgacaaaaaatttcacccttaatctaagaacagccttagccctcctttattcatgagacaatggtgattacgagctcctatacctcctactactagtagcttggtgatgtgaattgatggcagcatcaaaccaggtgaaggtggcatggactcacgcgtagctcgcccttgagggcttgaggaggcaaacctgacttgccccttctttcttaagacccaaagctaatatatgtggttaagtcacgtcacctcaaattaccatagccattagatgaaatagcaacagtttagattgcagtctctacttagcttcccttccattaacagtagcccaatatacatgggcaagcccaatccactgcctaggcccaattcgcccgttcccactacactgccgagcgtttccatctacccgcgccacctgaataacggccgacgcgccggctccctacctcccgcgcgcctccccgcctcctcgaaactgctcgcctccttggtatttggagagacagaaaactaatcgtcgccgcacatggagtaaaatttcattagaaaccgtcttccacagcataacagtcttctcgcattacttcgattggtttcctacttcatctccgtcactggaaacggcctctccctcccatgaaacctggagcagcccctcacctttaagaaatcacacgagtatacaatcttctcccaaaggtctgcttcctcctcttcttgaatcacatatatgttcattcaatttatggcctttatttctttttccatggacgctagatttatttgttcctcttgccactgaagttatcaaagaatagaaaaacagacagatggatttggttttgtcccttctttatgtttctactagcaagattgaaatttatttggtctgtatacttaaaggagtcaattcatggtatttataaggtttctactagcctgttcatggtatgtaaaccattttttcaactttgctgtacctataatttgttgtgtttctaaactcctattgcagttcgtccctacacctattgcctactatcattgtagcagcagctatgggctattactgaggtcagtacccataacattcccatccaaagcagcgactgattgggtttttccatatgattcctctatcaagaaaatatcccaatatattggtacctcatattcgttcatggtcaccggctttcaagatattattatatgatcatcctacgatatcttcttttcaagatattactaagcatttcttctgtaaaaacaccgtcaggattttcatgtatatactatcatagattgcaagtgcaaggttatgtgtgattattttaacaatgaacttaatttaggtacatatattggttcctggatctgtgcatgctatccttccttgctatatgatgtttctactttaagttcagaattgtaagctacagttttgtgattgatgtaactttattcttcggattttgttctgtctgaggtttcaatgtagtccaagaatgtaaatcacatcagccaatgtgatcaaccacaaaacagaaatgcccttgatcgccatcggcagtaatgcatataataatttgattatcccggtgctcaaaactttttctcgccaacttctagatctcagattttttccaaccccccatatggtaagtttattgatattatggtcattaatttctgtttatgctacatattgctttctccttgctttccggagtcatccgtcagatatcacattttctctttagttcattaaaattgtattaaggtacaatgttgtatcaggaataatttcagttatatatctgtttagtcagtaaaatatatatgtggtactcaagcatgaggtaaagctgaccctttcaaaacatgaaaatatttcatggaattgcactttgttttgttgttattgcatatgttctacatgttgcaggcacctactttttgtgtcatcttaacacggtgtttcatctgtagacttgctacattgctccaactccacagatcaaagttagtactttagatggcagcttaattagttttaaggcactagccctagagctaaaaaaataattacagtttaatctgcttattccacttagacatgatttataatataattcacttaaaaaactatttcctttaataatctaatctatatatgcattagattataccacaacatcaccaatcttttgcacccatgaatggtactttgatgcttcagactatcacataatatttctgtactatatgaatcatgtatttttcttattacacaaatgtacttttgatatagtttttaagtttacacatattgcacatgagtattccgcagcaacgcgcggggtatcatctagtattctaaataaaaggtgttaattatctcctgaggtcatactactcttttttttaacaggccaaattatccaataaatttagtgggttacatcccatccaagtgcactttcaagtcaacatagaaatctatttaagggcatttagttttgtgcaaatacaagcaatccggctgagtttgaaaagcaggggatcgagaagatacgtaaaacgagacgatcaattagcacatgattaattgagtattatctattttaaattttaaaaatagattaatatgattttttaaagaaacttgtctatagaatttttttgcaaaaaatacattgtttagtagtttggaaaacgtgcgcgtggaaaacgacgtgttttctcactcaatgtcccctgaacgaacgtgtccgtgtaggagggtgaagtcttactctaaaccagcggcttctttagaacaaaagaaatttgtatggttcaaatcctataataaaattcatacatgcccatttgaaacaaacgaatagccataccaaaatcatacgaaattccttatatttcctcaaatcataagaattttaaagggttttcaacgtaagatccaatctcttgaaaaatccaattgtgtctaactcccatcagatgacaagacttatctttgtctatccatgtgtttctaaattcttacgttccggaggaagctatatattttgatgcatctctatgcattcagcttttgctgttagagtgcgtagcccggcccaccaaccgtgagccgtctaggtcacattgggtctgctacagcataggcctaaccggagccacaactttaggtcttgtgtctacacaacctaaaatactagtctgatgggtaaggactgcccacaccttttaagtcgtgctgtcccatcatcaattaccgatgtgtgactaaacccaacatttgcagccttgaaaaaagtgcatatcaaccatttgcttttttttctgttctgaaataaaccaacctactccctccgtccaaaaaaactcaatctaggaggggacccctcctagtacaatgaatctgggttgagttttttttaacggagggagtatgttctgtctatagcagacttcctttttctgctctaaattttattctttttttttttttgccttttgagatattgcgtttgtcattcatgtgtatcactaaacaaatctaacctgccacgctcctgttgccggtgttcgagaaaagcaagaccacgaacatgttacctacaatagaagtagggttgtgtttagttcaacgcaaagtttagattttagtagaaattagagatgatgtaattgaaaagttgtgtgtgtataacaggttgatgtgatggaaaaggactgaagtttggatccaaactttagatttaaacacagcctactacgaggacttgtgcaagaaaatgtttctgaggtatttgtcacatgtcagtaacttggacttgtgcatttcgaggtatttgtcgctgagaaacttgttacatctgttcccttgcaagaccaagctgttaagtctagtgccacaatatacggctgtcaggcaaagcagttcacaagtaaaggctgtgattttcatcatgcagttgcgtagttgcgtcttgcgtcagacaaaaaaaggctgtgattttcatcatgcagtgtactggtctgctttaaaccaacaacatgtgtatatgtaaaaaatcagttactattggaacttcgtcgatattagagtcatgtagcgaatctacttactattaaagtaaccgctgagataggactcttaacacaacgaattagataggtcctcccagtacgtagtacataacaaatccaaacaagaagttgtctagattcattgtattagaaatcttatctcaagctcggttgctttattttggatgataagggtaataactttcatatggacagtgacagttcacgcatgggatgcttaacaagttgaacctactgttgtactctaaagcctaaaaggcagtagctttttctaaaattgttgtacggagggggacttctgcactacaatagaaagttgttatagctaaaaaaggcaaaacacaatcgagttcactgatgcacgttaatgataaagatttagttagtggtgtactgatctaatgcacatcaatgataagatttagttagtggtgtactgtatttcccgggtttggtttggttacataacatgtgcttaagttgctgtcctgcaagcttctttttgaaacataaggcggaacttcgttccacttttatatttagaagaagagaattgacccagtttataaggataaccggacccgaaaaccatacatccgcatggttaattacaggaaaaccggctaaaacccaccgctacactactaaccatgatggcggagcccaaatgcaggacgtcgtcgccaagctaaacacaaaagccacccaacagctcccacaccgcagaagaggtgttatcgttgccgagctagccgcccaagcgacccagcagcgccgacttcacaaccacagcgacactaaagccatgaaagtcgccaaagcaaaaagcagctccgacatccaacaatggacatcagccaagccaccgaggagccacttcctttacacggccagcaccacaactcctaggaagagactgcaacatgtcatcgttgccaggcgtcaccgcaccccatcagcgagtagctccgacttcatctgcagaaacaaccaaagagcgtgacacccaccacgagaaacaaagcggacccaagaaggcgaaggcctcgccgaacacaatgtatgagagcttttgaaccgaaaaggaccatcaacagtcgtcaatgtgttggaacttctccgaagcgacgccccaaaggaggacacgacgtcgtaactccgccgccgccgctcgtccgaagccggaacaaggttttcacctggagatttgtgggggatatgaaagaaacgccatgacaacgcctccaagaaggaaaacggcgcccacgggcgccgtcgtcgtcgaaccggccaaaggcacggcaaggctttcgccgacgtcttcgtatcacccacacaagcacccccacaatgacggccacagaatagtccatgacgtctcacaagcattcatacctcgaccataacggcaaagacaggccctccggcgcggaggcgacggaactggtcgcggacggccagatccagccagggcggcgcaagccggctcgacatccgcgccgctgcagctccgtcgtcgtcgcaaccaccacgccgccacagcctctatcgccaccgctgtgaccccgcgcggacggacgccgacgccgacgccgcgaccggcgcgagcgagccgccgctgcccgcccaccgtgacgccgcccctgcctgccaccatctccgcgtcgtctccagccccgttgctgacctcccgtcaacaccgcgacctcggcgcaagccgctgctgcccaccgcgaagccacccctgcctgccaccggtcttcgcaccctctccagccccgacgttaacctctcccccgccgctagccgccacctcccagcgcctcgcccggcccggatctggacgggaacctgggccgccggtgacgggagcgtcaccggcctgcgcgcgaacgtcgtcctcctcgcacgtcgccacttccgccgcctcttccgcgctcctcgttgagcgtgcgcctccttcctgtcgccaccggctgagacgcccgatccagccgtgtggggaccggatccggtcctaccgacgccggatctggccgccggcgaccgctgcacccgcgagacctctctccggtcatggcatcgccccagccgccgcgcctgcgagaggaggtagggagcctcgccgccgctgtcattgcgtccccccggctttgccggcgggcgctcgagcggcggcaaggtggaggggagaagaggaagaggttggcggcggcgcgctcgtctggtcgccgcccgtgccgccctggggctgagcggcacgagggccttctcttaattagattatttcacggaaatttttctcctgcaagcttcgactccttcgaaatacagcaataggaaatacagaaataaagtatcgtattggtcgaagcctataggaaaatttggtaaaagacatgtttagctactgcatatgagaatcataggaattttgattcagacgattaaaatagacaaaatatatcagagcaattccaataacatagctttgctattagctccaataatatccacatcaagcatttaagttaactagtaagagtagtatatatacaatagatagctactccatccgtcccaaaatataagcattttaagagttggatacggttattaagaaagtagttagaagtaaatggtggagggttgtgattgattgagtagtggaggtaggtggagagttgtgattggttgggaaaaaaatgttggtggagaagtagttatattttaggacaaatcttgtattagatcatctacacacgtatccgtatgcattcattttttttatttttcttttagtctgttttttttcgggtcatgcttatcctgtccactcgttcttttcgagaaggaagcagtagcccaatgaaaaccatgctgctactagtctttgatcaaatgtctgaaatacttcaaaaagtggatgaatgggagaaattttgaaacatattcttgtagtccaacgagcttcacagaactatattattttataggatttcaatcctttaaaattcctataaaattccatggtcataagagcatccctagcagctcatctatattctatcctccatatgcctatttgaatggtcctacaaaaaaaaattctcacttcatatttatttttactccaacagatcattcatattacatcatctatcctatattttactattatctttcaactgccatctattttatattaactcttctcttctctcttctactcatttctcaactcttctcctctctcgccgaatccccttcacctccaccacccaccgccgccgccatggcctccgacctgcttgcgccggagcaccaggtggcggggcactgcgcgtccaccgacaagctggcaggcgggcaaggggcggcggcaaacgaccggaggcgggcggaggagccgcggaggaggcaggcggcggcgagcgggcggcggtgtcaggcgagcggcggggacggcggcacgggcggctagatccaggtctcctcccctccgctcccctcccctccgttggccgacggcggtcgaacgatcccctccgctcccctcccctccgttggccgacggcggtcaaacggcgaaggtagccaccggtacgtcctctcttctctcttccttcacccttcatgctcgatccaaatgggggcaggagaaccggatgagagcgggcgtttggggatggcgtgaggagaagcgccaaatttggcacttctctctccgtgtttggcgatccgccaattttggcgcatctgatggagcctctgctagagcgatgtttttcccctccatgcaccaaaaacgggatggtggctctaaggaactcaaaagttgagccacctatagcgcatcatgcatactagacggtactgccttggccagcaatctacagtcttaacagatatacaggaaataccaaagaccacttcaaattcagaagaaagaacatgaacttcactgtagggaagtaagaacctgaaagaccttaacagccattgcaatattgcacgaacaagaccctcccggccaaaaggaccaaaaatttcagttcacatagaacgagcaagcacgacatgtttccctattccaaaatttagtactactaggtgcttcaatacagttccactagtaaacaagtctcaagtctcaacagtggtgcctatactatggctaacaggcatggaacagacccggcatgttccattttacagaacagcgagttttcaacccaatgctacccaagattgtctttctccagtgtatccctcattcatcaccatgctttttcttctttttctttttgtctttcttaccagacgcttcggtttccatggcaacatccttagcatcttgtgaatcagatttcttctttttcttcttctccttcttctcaccttcagcggtggctacaggtggctcctcgctctccttggacttctttttctttttcttgccgccatcagcatcggccacaggagaatcctcgctatctttggacttttttttcttctttttcttctgaccctcttggtcaccatcctcttgaatggtttcctctgcacctgcaggctccgcctcttgatgtttcctcttctttgaagcaccttcaggcttctttggtgtttcttcagtggattgtccaagtaccagatcagccgcaggattgtatgtctgacaaattcaggtgccataatcaggttgagatgaattctgaattagatgtttgcccaagtaaaagtaagcaaaatacacaagacagcttttacagtgactggacaaaacgttaggtgcaacgcagtctcgaaaattagtaagtttcttgaagagtggccaagattaacagaaaacattaagcttcctcaatatattttcaagacaaaaatcaagatactacctaccttggcaggagtgattaaagccccagcacccttcttccggtccttttcatacacttctatcttgggctttcccttagtagaacctgcagacctgccaagttctttaccctcaagaacccgaagccgtgtctcaagctgcccaaatggatctcatgtcaatccaaggagtcagacaatattatggataaagaaaaggtatttcagaaagtacataccttgactcgactctcaagaccaatggagttatcttcaccatcaccaagggcatcataccgaatggcaagagcagtttttgcagcaagagaacgagaaatcttccccttgtgctttggagctgcttgaccaattaaggatgcatggtagatgagaccatactttggcgtagcatgctttgtctttagagctctgaacaaagcctggagggaaagattgtgttacttattatttttgtgggaaacaaattataatacaccgcaaaaagctactccctccgtcccataatatagcaacctagtacaggatgggggcatatcctagcattagggaccaagtacaggatgtgtgaaacatattatctcccagacatagactgaaatataagatcaaacaaagtaaaatcacaaacaccacacatgaagcatcctttccccatgttactagaaaacaaacccatacttccatttacctattttgcatcaagtaatctgagtggaaaatggttaaatctttcaagaataacaaatagcaactgaccttctctgcaccaagtatctgaattgtgctgccaggctgcttggccagatttaccaaactgccgccatgtgcaataagtcgagcaccaaccaattcgccaacaagtgcagtcaaatttggtgcgatagtgttcatcctgcttctcagataatcaaacagctgggctctgtactcagaaagagccaacacctgatcacacagctccctgatatttagcaagtcaagttcactaacttctgttcccatggatattactgccgcctcttttagctgtgcttcaacctcatcatctgaaagtatctgaaaatagcatttgcttcttaataaagaaccagttgtggtggatactcacggccattacattctgatcacaaatgtgcagaatttacctcagagaaatcaaggctttctgcgttagtccgatcacccatcatcttcacaacttttgcgtactgtatgttatcagctacaattttagtgagctctggaaagtgccacccataccattcacgaaccctcatggcataagtgttaagctccttgtcaagatcatccaataagccaatggcctgaatgatcatagtatcaacctgtataatcagaaacaatatagtgtttacctcagttaccgtcccatgaaggggttatgtacaaattaaaaatagtaagacctcttgtatatccatttgatgctgaactaaataattgcaggtgcgagttattcgttataaagttaacagaaacataagagtaacaaattgagcatgaaaactaacaaaaggaaaatgattgaatcatatgactcagagccagggagaagtactgaataacatgttcaataaaagcgaacggtaggataaataaaagctcaccttttcaggactgaacttcagcttatatctagacaaactgtgggacaagccaaggctcattggaccaaggtcttgtgcacccaaaccagagataagttcagtgagctggtttcttaaccctctcatgagctccatcacagcactattatgaaggcagtcaattttctgcaaaagcacgtcaaattataagcatgattggttgttctacataaacaaaacaaccaggagcctaactaaccagcttctcctttatagcatttccaagtttagagtcagccacagctaatgtttcaccctcacagtgcttctgcaagaacttgcgcaaacccttggtaggcttgctgtcaataatgagggttgcagcagaaagggcatcagatgtgttctcaaacttgttgaaagccttcagctcaaccacctaaatatagttgatttgttttgtcaggaaagaaaatcaactgaaaagaacaaaataaatagcagtaataggaacaaatggatagactcattgcaattcggcgtaaagtaacatgacttctgtacatgacaatgttctccacataatgtcataaactcaatgtgcacaaatttatttgtcgaatcaatctatagacatcggacggacagaatatgtgcacaataggaggcaaactaaaccattacatctctctcccctgataaccataacacattggaaaggaaattacagttcagaacatggtaggattagtcagtttttttttgtttctcgaaaaccactttgcatctatcaaaatcatatccccaattagcaaggcaaaatcagctaagctaaaacatatgtagtactcaccaacctacagaagccattggtccttgtgctaatttaactgactccatcgacatgtgtcaaatcatgcattaacgctcttaataaacaaaaaaaaagagaaaattttgtgctgtaaggaagaaaagcacaaacctttctcgccgagtcagacgtcgtgaactccttccataaatcctaaaaaaaacaacacaaaatgcgttagcacgattagtccacttaacactccatagaaagtcaaaccaacagctgaagcggcggcggcggcggaagactcacctcgaccttgtcgagcttcccctcgtcgagcaccttgaagagggcgaaccccgcgggcgtctcgaacagcaccagcatctctctcaccgcccgtgtcccgcaactactagataaccccccccccccccaccaaatcaaaaccccaacctcaaacctccacgctcaaaccgagcagcagcagcagcaaaaaaaaaaaaaaaaaaaaaggatggcgcgcgcaaaccttgggtcgattcgattcgacgacgggagaggaaagcgcgaagcgtacgttcccggctgcggtgagacggggatggaggggagatggcaccgccgccgccgccgccgcggcgagggtttagcgcgaggagttcggctgcggcgaggcgggggagaggggagagggagagagccggcgccgcaagggttttagggcttaggctttggggaaatttatagtggagagtagttgagaactgggggcccatctcgccgttggtttggtggggcggagatcgtcagccgttggatggcttattaggtcggggactcagggttgcaatccgtttgattattatggagacagctgtattgcaaaaatggggaacatgtgacgggtgggcaaaagtgaccacaaacagaaaaccagtggaaatgatcgatgccgaaattttcggtgagaaattcgaccaggtttttccactaactgaaactattaaggttaattcggtcatcgctctcagttaattgaatgaccgaatttaaccgaaattagaggggaaagcctaaatagtaagagtatcttagtcttgatggcttggtcataagttgaaagttaaaattgctagattaagaacaacgttttgtgttgcccggtgaaacctttgccgacaacttccttagcctacccctttccatacacaaaccaacgaaggcaaagattcagctaatgatgaacaaactccaagcacttacggggtggaaacccaagatgttatttcgagatgctcgcattgcgttgatcaatcactttcttatggcgctttccctctacttcatgtcagtccttgagcttctagcctggcaattaaggagattgagaagaagtacaaaaggttcatttggaagggtgatgcataagctttcgatgaaacttgcctggtggcacaagagaagttatacttgtcgatagagtgtgatggtcagagcgtctagaatctattgacgcatgggagtcgtgtggcacgctaggtggtgttggatgcgtcaaacattgtccaatcgcccatgggttgcactagcgtcaccgccaaaggttactcaccttctcgcggcggggtcaaatttgatcctcaggaaacgaagacttgcatccgtttggaaggatcgttggttgcccaagggcagctcaatcgagagttggacacctattctcacctcctttgtcaagaaacaggaggccgcacagtggcattcgtgctctaggaccatgcatggtttgctgatatcaaaagcgagttgtcctttcaggtactcgtggagtgcttcaaggtttcgatatgaacgcggaggtggtgttggagcccagcactcttgattcccttcctatgggcagtaacgataaatggcgaattctcgggcaaatcgggctatccgatgctttattgtgggcgaactatgtgtgcactgggcaagatcatctggaactggaaggcctgagcccgaagcgatgcaaagttttcatgttcctcactatgcgtggagcttgcctcaccaccgacaatttgcagtgacacgggtggcatgtcacttggcaaactgctactttctctatggcagagagttagaatcatgtgcacacatcttccacaattgtgagtttacagcgcatgtgtgggagcgggtgtgaagccgtcttggctttccttgcccgccgccttctcctaacctatccgattggtcgattgaggcatggaagaagattggcaaaacaagaccgaataatccttcaatacggatgtaaattcagtaacttggctcatttggaaggagcgaaatgcgcatgtctgtgaacggaagaccacttcggctagggccctatgcacggcgattgcggacgagtgaaagacatgggaggtggttggcctgctgaagctggcggacaccagaaggcgctaaggtaagtctatacttaggtagtggaagcatgtgtttcaacgtgagttgagctacctaggagttcaccgttgctgaccgcagttagcctggtgtaagcattgtaaatgttttttctctcccccttcttaataaacttcggctggtttttgccttcctgataaaaataaactactacgatccatcttggtaaattagtgtgttatatattgtttcctattatgttatttgtttgccaaacaatcataaaagaggaaggtgctgccaaattttgttatggtttatttgatttttcaattatcacaaatctcagttatgaccgaaaacgaacggcttggtcttgagttttgcttaacgtatctggccaaagaagcagcagcagccctgatttcgataaacttgtctatttaaccaacgtgtgtatgtcaccagaagaaaatcagttaggttttacgtacttatcaaatctaataacttccgtacgggcatcgacagttcatgcatgagacgcatcttgaagtattggaccagcagcagcgtagtatatgtaggccgagtttagttccaaaatttatcttcaaactttcaatttttccatcacattaaaactttcctacacacaaactttcaacttttctatcacatcgttccaatttcaaccaaactttcaattttagcgtgaactaaacacacccgtagtcgtagtaagaaaatattaacttccgtacggacattgacagttcatgcatgggatgcctaacatcttggagtattggaccatcagcagtgtaatatacgtagtcgtagtaagaaaatatttagttactggtgtaatgatgtagtccacataaaatgatgctccctccgccctctaatataagggattttgacaattcatgcatgggatacttaacatcctggagtattggaccaacaacagcctagaatacgtagtagtagtaagaaaatatttagttagtggtgtaatgatgccgtccacataaatgatacttcctccgtcctctaatataagagattttgatattttgcttgtatgtttgaccattcaatttattcaaaaattttgaaattattatttattttttttgacttactttattatccaaaatactttaagcacaacttttcgttttttatatttacacatatttttaaataaaacgactggtcaaacagtacaagcaaaatatcaaaatccgggacgaagggagtaacatttagttagtggtgcgctggtgcaattccccgtgtttgatttggttgtccagaattgtttttttttttttggggacggagggagtacatacaacatgcgtagcgttgctgacttgctgcaggtacagagataatcagacaagcagccaaggctttcaatctggttggcaaagttgatccaaaagttccgagtcacccatagcatcatgcatgcgtagtgctgccttggcgaccagcaacattgtcaccacagcacatactaacaaaaaagacaacttcagaatcagacgaaagagcacgaactactgttgggaagtaagaacctgaaagacatcaacagcaactgcgagaacgagatctggccagccaaaaggacaagaaactttagttcacatagaatgagcaaaagcatcatatgctctccaattccaaaattcagtaggcaattgaatacaagatccatgagtaacaagtccaaacttgatgcctatcctacaactaaccggcatggaaaaactcggaatgttgcattttacagagcagcgattcttcaaccctatgctactcaagataacatgtccttctccagtgtatccttcattcatcgctatggtgtttcttctttttcttcttctctttcttgccagactcctcggtttccatggcaacatcctcggcatcttgtgaatcagatttcttctttttcttcttctccttcttctcaccttctgtagtggccactggaggttcctcgctctccttggacgtctttttctttttcttgccaccgtcagcatcggccgcaggagattcctcgctctctttggacttctttttcttctttttcttttcaccttcttggtcaccatcctctttagtggtcttctctgctggtgcaggctccgtctcttgatgtttcctcttcttcgaagcaccttcaggcttctttggagtttcttcagtggattgtccaagtaccagatcagccgcaggattgtatgtctgggatcaagtgcaaagcatcaggttgagatgacttctgaataacagatgcttacacaagtaaaaagagtgccttggtaccaataacagatgtttgctaagtataaaatgttagtaatatacacaagacatctttacagtgaccggtcaaaatgttaggtatctaacaaagaacaactgccttgacaactagtatttttcttcaagtactggttaagaataacacaagacgttaagcttcctgaaaatactttcaagagagaattcgtgataccacctaccttagcaggagtgattaaagccccagcacccttcttccggtccttttcatacacttctatcttgggctttcctttagtggaacctgcagacctgccaagttctttaccctcgagaacacgaagccgcgtctcaagctgtccaaatggatcacatgtcaatctcaatgggtcagaaaatattatggacaaaggaaatgtatttccacaaagtaaataccttgactcgactctctagaccaatggagttgtcttcaccatcaccaagggcatcataccgaatggcaagagcagtttttgctgcaagagaacgagaaatctttcccttgtgctttggagctgcttgaccaattagggatgcatggtaaatgagaccatacttcggcgtagcatgttttgtcttgagagctctgaacaaagcctgaaaaaagaaaaacagatgtcagcacaacacagaaaaattgagttgtttgaatcaaacttacctcccagacttagacagaaatataaggagatgaaaaaaaggaaagttacacaaaacaacaatcaagcatcccttccccatgtgcctagagaacccatcatccaagggacaattttgcataaactacaaagagtggaaaataattaaagagttcaaggttcacaaatagcaactgaccttctctgcaccaagtatctgaattgtgctgcccggctgcttggccagatttaccaaactgccaccgtgtgcaataagtcgagcaccaaccaattcgcccacaagtgcagtcaaatttggtgcgatagtgttcatcctgcttctcagataatcaaacagctgggctctgtactcagaaagagccaacacctgatcacacagctccctgatatttagcaaatcaagttcactaacttctgttcccatggatattactgccgcctcttttaactgtgcttcaacctcatcatctgagagtatctggaaaaaagcatttgcttcatattcaagaaccagttgtggtgtatagtcatggccgttaaattcagatcaggtatgtccagaatttacctcagagaaatcaaggctttctgcgttagtccgatcacccatcatcttcacaacttttgcgtactgtatgttatcagctacaattttagtgagctctgggaagtgccacccataccattcacgaaccctcatggcgtaagtgttgagctccttatcaagatcatccaataatccaatggcctgaatgatcatagtatcaacctgtataaccagaaacaatttacctcagttagcttgtcaggatggggtcatgtacaaataaaaacagtaacgttaacctcagtccatcacaatgctgaagtgctagactaattaattgcaaatggaagttaaatgtaaagttaacagaagcatggcattgaaaaatctagtttggaaactaacaaaagataatgatgttgattcatatgactcagagccaggaagaagcactggatagcgtgatcaataaatatgaatagtggaataaataaaagactaaccttttcaggactgaacttcagcttatatctagacaggctgtgggacaatccaaggctcattggaccaaggtcttgtgcacccaaaccagatataagttcagtgagctggttccttaaccctctcatgagctccatcacagcactgttatgaaggcaatcaattttctgcaaaagcacgtcaaattataagcatgattgtttgttcaacataaacaaagcaaccaaggaacctactaaccagcttctcctttatagcatttccaagtttagagtcagctacagctaacgtttcaccctcacagtgcttctgcaagaatttgcgcaaacccttggtaggcttgctgtcaataatgagggttgcagctgaaagggcatcggaggtgttctcaaacttgttgaaagccttcagctcgaccacctgaatatagttaatttgtttggtcaggaaagaaaatcaactcaaaataataaaataaacagtagtaagaggaagatatggagatgctcatcacaattcaaagtagaaaagtaacacagcttatgtatataatactgttctccacaccatgtcattccaatgtgcatcagggcatttatattataggagactgaactaaccattaccctcttctctcaccatacaaattacacatccaaaacaaaactgcggttcagagcatcagagaattattactcagttgtatttttttattcctgaaaatcactttgcttctctcaaagtcacaaaaccccaaaaagaaagaaggttgtaatcacctatgttgaatcaacctactgaagccatgggtcctggcttatttaactccataaatatgagatatcttgtgcaataacgagattattaaataaaaaaagaagaagaatattttgtcctgggagtaacgtgaaaagaaaaaacacaaacctttctcgccgagtcagacgtcgtgaactccttccataaatcctaaaaaaggatgaacacaaacgcgtagcgcaattagtccaccgaacactccacagcagcaaagcaaacgaagagctgaaaccgcggaggcggaggcggtggcggaagactcacctcgaccttgtcgagcttcccttcgtcgagcaccttgaagagggcgaaccccgcgggcgtctcgaacagcaccagcatctctctcaccgcacgagaacacctacacctggatcacaaacccaaatcaaaaaaaaaaaccacaagatcgaaagcttgggtcaaaccgagcagctaggatatatacaccctcaagaaaagaaaatggcgcaaaccttggctcgattggacgcgaatcgacgatggggggaggagagcgcgaggcgaaggtccggctgcggcgagatggtggggagggggagtaggcgccgccgccgccgccgccgccgcgagggtttagagcgaggtgttgtgggatgcggcgggagagggggtgccggcggcgagagggttttagggcttgggcttggggggagtttttatacgagggagcgggcgagacttggtggcccatctcaccgttggttcggcctggtggagatcgtgggccgttggatggattttttttcattttaggtcgtgggagtgggactctggtttgcggggcccgcatgggcttcttcctcgcaggagggaactttagaattagaatggagctgagaggcgacaccggctacgaccaccgccgggcgcgcgagtctctccagttatggatgcaagtccgcgaacccgtttatatgttaaaatagtgggcaactcacgcgggtaacctattaatttgacctaaatatgtttatgggacgacccacttatatctttcgatacggtaagatacggtaagctagaccataataaggaagccaagatttaatatataagtagattcacatgtcgacccgcttgcttacctatctccagctgctcatctaccctggtggctctaccaccactactacagacgtcggtgaacctctgccaccgcgagactccaacgagcattctttctgctatatcatccctgcgagtttgacctggtgagttttttcaattcaatatcctcaactcttttcggtgctcagaccctccatctcctttcttccttgactccgtgaacatatccctgtctacccttcgaattcctcttgcactcactctaatctgcctctttcacttcacattacaaatctcctaaacttctggttatgttcgtaactagagtacttttatgttctatctgtgggttttgagttctctttcgtaaccgttcttatattttttatcaaaaagtctatacaaaccattacgaaaagtaaaaaacaggtcgaaacctgtatgaccaacccactattaaacaggccaccaatcatccgtgacccattaaagctcaaatatcatctcatctgtttaaattaagagagtaattatatttataacgtcataatatttaaaaaaacagtcgatatgtatttatattgtaagttcgtaaattatatatataattttagtgcatttatgatgtaagtctgaaaaattacatatataattatagtataagcacgatgtaattagcacgcgtgggatcgtaaacaaaatagcattgaaaaacacggctcaaatcaataatgatggagtcggcaacggctgatttgggctcaggtggagttgagatccagaaatctcatcattgctcgcagatcgaatcggcaacgacaactccggtgaaatggtgaatcataaacaaaagtaggtcggaaaacactgctcaattcgaaggaaatgcaaagaaaatagcccagtaatctcaccaaatcatgctccaagttttgccgcctccaatcaaaagaagcctgtcgaagattaggcaaagcgaactcaaatctatgcagaaatcggggaaaatcaaatcgtctctccaagcggaacgcaagctgtcgacaaataaatattcaaccggagaacagcagggaacagtaacgtggacctagttaattagcaagtacaatctaaaccgagagcgctctcgatttagtattaaagagcgacgcatccgtgagagaaggtttacttgcaactggtacacttacgtgagagatggtctagttgtttactattgtacaaagtgtatctctttttttcttcttatagatttttctcttaaaatatttattcgatctacaatatgactacaccattgtgttagttggtacacttacgtgagagacgtacgtgagagatggtctagttgtttactattgcacaaagtgtatctcttttttttcttcttatggatttttctcttaaaatatttattcgatctacaatatgactataccattgtgttcgttgtaattaaatatttataacaatatcttacatgattatattataataaaaaatatttatattgtaaattacttttatcatatatatgtaagttacttttaccatacgtataaattacttttaaatttgattaagttactttttagacattcactgaacaatatactttactttatcgttagttctataatatgttgattagatttaatttctagataaacttaggtttttacctccataatagatttacttttgatatcgtgacaagttactttttttacttttttaagttacttctataatatatgtaaattacttttaccatttattgaatttacttttatatatctaagaagtaatttaatgaaatctaaaagtaatttagatatattataaaagtaaattgtatttttcataaaaaaaatattatcatgtgagattttgttgtaaaaatttaattgttacgaatacaacggtgtaatcggatcatagatcggatgagtgatttaaaagaaaattctataagaagaaaaaaaacatgcactattgagtgtactagtagcaacaagagaagtcgttggttaagacagtctagcttacatctctctccatcccataatataagggattttgagtttttgcttgcactgcttgaccattcatcttattaaaaaaaaaattagaattattgttttattttctttgtgatttactttattattcaaagtactttaagcacaacttttcgttttttatatttacacaaatttttttaataagacaagtagtcaaatattgcaagcaaaaactcataatcccttatcctatagaaaggagggatgctagcatggatctcaaaaaccatctaacggctaaaaaacgaatgatggaaggcttataaatctgtcaaatgatagttagcaattccgcttaataccactaccgttcgtatactgaatttgactttgttgaacggtacattatgtgtgttgtacgaatttgatcaaaatagtgtgccgtgcatacgtttttttttctttttttctaaaacaaagtagcaggaaaactcaaagcactgccaagcgattctacacgtctgattctgcatgtccttcgattatctcaatgcgttcatctcgtgtcgttcgactgatgatctccatgtttatctcttgggcccttggggcaatacgttttatatatgggcttacgtatccttaagcaaaactaaaaacaaaaccttatttttttaaaaaaaaacaaaaacaaaaaccctaggtagcagccagcacacgctctccaaacatggcgccgccgccgccgccgtgcgagagacggccagtaagcctgagcgatgacatggtcgccgagatcctcctcctcgttcccgccaactccgtcggccgcctcgccgccgtgtgcaagcagtggcgccgcgtcgccgccgacccgaccttcctcgcggcccgcgagcgccgcgcgccgccgctccagctcctccgcgtctccaggcggccgtcggactcgaacggcaggcagtacgacgatgccgagctgagcgtggtcgtccccgccccgctgatctccggcggcgccgagggcgaggaggcgcgccgccccctcgcccgctacacggcgtcgttccccggcggctacacccactgcaccctcctcgcgtcctgcgacggcctgctcctcttcgccgaccaccggcggcgcctccgcgtcatctgcgacccgacaacgcggcggtggtcgggcctcccgccgcacctgtcgtccgccgcgctgggcttctacctccaccggccgtccggcgagtaccgcgtgctgtccaagggccccgatccgtcgcgcaagcacagctcgtcgtacttcgtcatctcggccggcggcggcggcgaaccccggcggcgcgaccgccgaccagctcgtggagagacacccgtgctctcacctgggccacgtcgccgccggggggaagctctactggatgggcgacctcgtagaggccggcagacacccgcacctaaacccctacgcccccgcgaagctcgtggcgttcgacacggtgtccgaggcgttccggctggtggcgccgtcgccggagacggcggcgaacaacggcgacgacgacgacgtgctgatgttcgagctggacggggcactcgcggtgctgaaaggcggagcgatgtcgacgctcaagctgtgggtgctcgacgatgacgtcggcggcggcggcggcggcgacgccggcgagcagtgggcacctgtctgggaatgcaaatatagctgcatgttaccagtctctacgccggcgagcgtggccgtgtgggatgacgacggcggcggcggcggcgacgccggcggcgccacgttcacccggcgtcgcatcacgctgtacggcgtggatgagacggcggcgagggggagggcgctccacgtgttcgcgtgcggcgcgcgcaacggcgggttattgcaggtggcgttcagggagaacacggtggcgcacgccttcttcaagatgcatccgtcgccagccgtgcgcacgtttgggtttctctgatctcgagaggcggctgcgatgatcgtcgacggtgcacgagtggaattggtgtgtaatttattgcacatggaaaattgctggactcatttatattttttagactagatgtatgcatgcagttttaattttgtatgttttttaacatgcacaagtactatttgttggaaatagtgcatacttagccattaatttagcatatacagcaagcataacctacttgcgacatgataggacaagaaaaactcataaattctatcatgctagatatcaaacaagacataaataaccaagccaagtaagttattaggctaatcacaatggtaatctagccgcaatattttaatctagatgaacagtaccatgcatatacaaaactcaggtacgaacaaaactagattagaaatgcaccggttcctttcctttgtaaacgaaagaattcactcactgaatggatcgacggagatcagcgagtcgaagcactgcagtcaatcgatgatgtcgagcggccgtgtagaaatacgctgcccagaaacctttacaccgcccccgtgcaggtgcgaatgcggcgaaggctcggagacaccgctcgccggaatgctcgttgcacgatgagcaccacggccggcttggatcgacggcgacgcaacacggcggtagttgaggaatttcagagtagatggctgttgtgttctgtgtccttcaaagacgtctccttcactcctatatagagctaacaccgaacggcagcccacgctcaatccgttgctcctccgcgtcaaagccggatcggctccatgagaaacgcagccgccaaacggccacaagcgcatgttctcgcttcacatgagaaccaagtcttcaggtgattgaatcgatcagcagaggttgttgtatgcaagcatcttttcatccaacacatgcttatcgtgcgactaagcattaggcatttaaattgatgaaatgatcaatgtctccaagcatgttatttccatcactattcattatttttgttgaaaaatgctccacctagccgcctctggcatttcctcctctcttacaccgggatgttgaagtgcgggtttggtgaggcctgcaccacgaggacataacggcatgtacaagggttgttaatcactacttaaaacacacacaaatgatatggtattataggtggcggaacagttaaaactggttcctatacactttttctcatccccgcgggaaaaaaaaatagaaccaacacttttcaaaactatggatgccggttataaagaaatactactgacaccaatactataagtgtcagtttacttagaagaaacaacacctataatatattataggtgtcagttaattagaaaaactatatgaaaaaaaaagagccgagcctatcaaccacccatatatcccgtcttgtccttatccctgtaaccccccctctctcttgaccctgctcccttgccctcattggcggcagatctagtggtccttctccctctccaccaacaagattttcttgtggcagatccaatggaggcgatggcatcgttgctccagcgagcggatccagtggcggcggtggctttcccggaggtcctctaccacctccattccccttccgtcccaagcttcttgcacggcagatccggcggcggtgacaacttgttatggatgatgttgttgttgttgtgttgttgtgacgatgattatgatctagagttcattgtggattgatctaatggttcaaagcgtttgattttgggggcgaagcagggtggatgtgctcggtgccccccctgtttttcatcccgagaaccttaaaggtgccggttcctaaactagcatcttcgaggtgactcaaaggtgccactgctaggtgttagttgggaaccgacaataggtgccagatttcttaatcaaaactaacacgctttgtgtggcactgaatagtgatctcttactcttcctaattacgagtgttcgttgatatggaagagagagaaagaaaagaggcaaacaattgttgctactggtaacaacggcttaacaacgacacttagcctctagaacatagaaacactcttgcatgagggtgaaaagaattgaaagaatagtaataaaaaacaatatatttccgttcccatcactactaccaaaaccatcattcgtggcggccattttgggttttcactggcggaatttgaagccgtcacaaagcaaaaagccagtgaaaatcaagatcttcgctagcggttatcgaccgccagtgataattcattttcgctggtggtcgtcttaaggcagccgccagcgaaaatccattttcgctggcaacaggcataagacgaccgccagcgaaaatgaattatcgctgtcgggttacaccatgccagccgctggtgtaaatgctggccaaatttttttaaaaaatgatggacggagcgacaccgctccgcccgcctccatcaacgctccaccattcaaaaatttcacagaaatttacccaagcattctaaaattcacaaaaatttacattcaaaaatttccattcacccaagctttcaagcatcacaaaaatttgaagtcgtcgtcgcggcacctcccccatcagcattggcagcagatccggcctcccaggtcatcgcggcggtggatccggccacccctgtcgtcacggcggtggatccagcctctcccgtcgtcgcggcggccggatccggccggccccgatctcctggcagtagaggcgacggcagcccgcggcgatggtggcgacgatagctggtggcggtggaggaggaagagggagaaggagagctcgccaccggatccgtcgcctgcgtcgtcgtcgtcaccgagactagacgtcgccgagcctgctggatccgtcgcgccagcaccgtccccgctgcagagcccggtcaccgccacgacccatcccctttgccaccgccggagcctccatctcctgcgccgtcggtggagagggaggaggagagggctacgcgtcgttgggaagggaggaggagggaagagtggatctggaggatagagtggatctgggagtgttgagaggaggggatgggagggcaggggtggcgcggggagccgctggtcactgccgccagagccgccatcgccgtcgccggtggggaggccgggatggaggaggagagaagaggaggggtaagaagaggaggggatgtggagagaaggagaagaggatgaggtaggtgagtggtttttaatgtgagggatattgggtacgagctgggttttttctggcggttctgtttattggccaccaggaaaaattcgaccgtcagcgaattatatattttcgctggcggcgcacctaagtgaccgccacctatcagggttatggataccacatacctaatagtagttgagtaaatctcggcaggacccaccacataccatgtcctatacggaaacaacctgtggatataggaggagttccgaataaggaaagacaaccagagttctacatggaaacgacaaggactactcggattgtatccatattggttttcctagttctacttagacaaggggacacctatgggtataaatacaaggccccctaggaggagaggggacacggacaatcaacacccacaatcaacatacatggaacaacagatgccacaacatacaagccaacatacgccaagacaagacgccggatatcgacttcggagataagcacggctagtcccctacggtgtctccggatactgtcaggagagactaaagcgctatctctgatctcgccgggcatggattcgaggaggaagactaccctgttgtcgactatgagtcagaccttcagaccgccaagtcgacaacagttagataggctacccaaaatattgtactggtgtgattatggtgaataagagtaatatcggctttggccaacaggatgtagggttattacctgacaattcaggggcccgaacctgtataaaaatccctgttcccgtctcttttacctcagtctcgcgtataccctggtaccaatgatctccatactatgcaaataccggaatcgcaacatcaaacgtcgacaccaccaaaaattgacatttttttgctggcggccgctttagacgggccaccagtgaaaattcattttcgctggcggtcggttcccccacccccttgttacgactttgctggcggtttttacatttttccgccaacgaaaataataagccaacgccataaaaaatcattttctaatggtgaattattataaagatatgatctctaaataataatttttgtattgtcttatagactatatacttgtctctaacatcgagcatcctctcatcgacgtgctcgcgctgctagtgcttcctaccaacgacatcttgtcacgacgagaagccaagctggctagattggctacactttcaaagcttttaaattttttgatgtttctacggtcatcgaaacttgatatttgtggcagagaatgccatcttcttaccccgatgaaatcccacgtattgttgctcgctagctaagaatgtctagcgaacttagccaatttatagtgacaaaataatggccaagtagattttgcccccgagaagatatcctctcgttttgtacatagcgtttaaaatttttgaaaaaaaaatcaaaatagatcaatatataatatatctttccacaaacattcaagttaaaatttgaattatacaacgcaaacaaataacaaatttgaccacagattacgcattatattcatagtcaaatttcaaatttgttgtttctcttctacttttacatattgaatttgaacatacacatatttgtgaagtaatatatcatatattgatctttgttactaaatgtctttaaatttttgataactttttaagcgacatgaaaaatcctaaaggtatgaatggagtagtttcccaaataatggcaacaatatttgaagctgaatgtgaatcgaagcaagtaaatataggaaaaacatggtaacctacgttttcttttagccacttggaagaatggcgatagaacgggagacggattctaataacttgagtggacgtccacccgtttattgtatgtcaaataaatggttatgaaaaaaattcaaaaaaaatgactagatagatcgatatttaatatatcacactataaacatacaagttcaaattcaacttctacaagttgtaacaaaaataacaaatttaactgcaactatacatgcatatactaatttaagttttatttgctttatttttacaatttatagaagttgaattttaatttgcatgtttgtggagtgatatattacatattgatctatcttgtcaattttttttcaattttttttcataactatttgaattacatgtattaaatgggtgaacaatcaagagtttcccgatagaacgtgccgttgttgattctattgtcatgtaccatctccctgggattgcgtgtcacgtatcactgctagttagcagcggaaaggattggagagggctacgcgtcggacgtccggatatttgcaaatctcctgatgatgttgcattatatgttaaaatatgttgcaatatttcattgctcgaaaaaaaagtttcaacatgaattgtttttgggattgtctgtatatctgttgatagaaaatctcacttcccatctttcaaattttgaaccatcggatacactttgagattcgtgcagaggtattaaccctaacactcctctcgttcccctcccctcgctcatgtcgccgccgccactccctcccatcacgcattccaccgccaccgcccgatcccccgccgccaccgccccgcctcgccggctggccgaagggcgtcaacggcgccgtcgaggccccccggccagccccttcccctccctctcctcttctttcctcaagcggatggcggcgcactgtccccgccgccgtcttccccgtctccggcggcagggcaccaccaccggccgcctcctcctaatacacccttctgctttgcccccgccgcctacaccggcccatcgccagcttccgaccccgcggcttcggcggcgcccgccgccgcctcgccgcccaccttcgggctgccgcctctcacggccatccctctaaaaccggaactcctccctcttacccctccccctcccacccttcccacccccacctcaacccgggaccctaacccgtagggtcctctaccggagtctagggtgtcgccggcgctggagaagaagaggaggtcgccagagttggaggagaaggccctggagcacgaatcacaaagtttatccggtggaccaaaatctacaagatttggaggtagattttctgtcgacagatcgttagcatttccgaaatacttattggccacatcttaaagaaaaataatcggagttgccagaaaacttcgccaagttttttttcctagaacttttaaatttgtgactattggagagttgtgcatgatggaaaaaaccgatgcggaaaggaaaaatcgggcacccgtctctctctcgtctgttccccgtatctgtgttccagcgccggcggctgttcgcggggtggtcggtggcggcggcggcgtcgtataggagggtgaggaggcggatgatgggccagcttatggcggcggcagctatgcaaaggtcattggtgacggcgttcgagaaggagcggagctgggggtcgtccttcatccagaagcactggacgatgcaacagctccggcgaggtgacccgcaatcgtggtgaccgcagtgcggcttgctatagaagtctgtcgctgttctcgagggttctcaagggttggatgttcgagaacttcctccgcgcgtaagctcaacggcctcttcagccggcgatgcaacagctctcaagggctcgatgttcgagaacttcctccgcgcgtaagcttaacggcctctttagccggcgatgcaacagctccggcgaggtgaccagcagtcgtggagccgcagcgcagcttgcaagagaagtccgtcgaggtgaccagcagtcatggtgccgcagcgcggcttgccagagaagtccgttgccgttctcaagggtaagggttggatgttcaagaacttcctccgcgcgtaagcaatgtttcggctagtgtactcgtgatgtttttctatgtatggatcaaatgttgcagtggattttaaatattgtttaatgggtctgtctattcatttgtcgtgtgatttctaacaaaaaaaaatcacccaaattttttctgcctttatatttacatacaacgaactacaaaagaaaataaaaaatacatatttactcacacattatttttataaaaaattatagtgcacttacatatcatatcaactgaatttacaaatgtaattttagttatgtaggactgtaattttatattttaaaatataattttagttatataagactgtaattttattttttttaaaaaaataacaaatacatatttacttataccaaaattacagtgcacttacatgtcatatcaactgaaattacaaatataattttagttatatatgactgtaattttatattttaaagaaaataacaaatacatatttacttacacattagttttatcaaaattacattgcacttacatgtcatatcaactaaatttacaaatgcaaatttagttatataggattgtaatttatatttcacgacgacgagagggacggtgtcgctcgccgaatagcgttggtcgtactgccggtggccggctcgccggtcagaggccaccttgccaccatgtttctctatcatggtgcacgcgtgggctagctgacacagtccgtgaccgtgagctgcagctcacatcacaagtggtgcatagcgtgcggccaaaaaaaaaagtgtgaaatgccatagaaaaattcacacgggagatggatagcaaaatcgttgtttaataatatcatcttgacggatacggggtttattgttgtacatggggtaagtgtttcaatgactttaaatcgtttgttgcatatgttgatctaatttttttcatctagcgatctgaccgtgcttctctttttttttaacaattgaaacattctttcgcaattgatgaaataatgctttttatagggtgaagcaacgtccgatttaaaaaatcgggcgcccgatttataggggttcgtttaaattttttttgcacacggatcacgcgccaccaaaccccgggactcgacgccgacgcgcccaccacccgaagccaatttgatcccacgtcacggggggcgcctctgcgtcgccgtcggagaaaaagctacagtagctggacaaccgggatccatggtgctacgggccttccgctggcaagaaagatcctgtcgtccgaggcgttccggctgatgtctcgtccgccggcgacgacgaggcggtggggaacacggacgtgctgctgttcgagctggtcgacggacgggacacctcatgcttctggagctgcaccagacgcgccgtcgccggagacgacgacgacgacgacgacgctcgtcatcaggggtgtgggcggccgctcgaggacaaggatgcatgcggtgggcgccgtggccgccgtgtgggaggacgtcgatcgacgaccgccgcgccgcggcgctcaccacccatcgtcgcattgatatcaacgggggtgctggacacgacgacggaggcggcggcggcgaggagggcgcgcggcggcgcatcttcgcgtccgacgcgtcgcgattcgcgttcagggagaacatcgcggcgcacgcatggcttcttctcgacgcatatccgatccgttccatatgatgtacgtactagatcgacggtgcatacgaggccacgtacacacaaacaaactacggggagatggattatattagtttgagatttgtggcatcagttttttttgtgtttttttaattatatgatgaggattttttttagataatggaattatatgatgaggataatttgttgaatggagttaggtattctgtactttttgtttagcacaggaaccatcatctcttacgtcaccccatacgtcaccggtcgccgtcgccgtcgccgtcgaaccatagagaagccaccgctcctccctccctctcgactcccgtcacctgtcatccttgatcctccctcccctccccggcaacgctccttagtacgccctcgacaacgaccactcatcaccatctctactcctcttgacaactcgctactatccctcctttttactacattataaatcgttttcattgttagaccctgtttagatgccggcaaaatttttcaccctgttacatcgaaagtttggacacatgcatggagtattaaatataaacgaaaaaataactaattatacagattgcgtgtaaattacgagacgaatcttttaagcctaattgctctttgatttaataatgtggtgctacagtaaacatttgctaatgacgaattaattaggcttaataaattcgtctcgcagttttacaggcggagtctgtaatttgttttattattagtctacatttaatacttcacatgtatgttcgtatatacgatgtgacacgtcaaaactatacactcctgatctaaacacagccttatacaaaagtttgatcaaacttataaaaacacattaacattcatatagcatcaaattaatgccattatatcttaaaatttgttactatttttatgttacttgattaaatctaaatgggtttgactttgaaattaaaacgacaaacggaaatggtactacccaccaaccgagatgcggacgagactccgctgactttgtgcagtttgcagttgtggcaccgacatgtgggccttatagccctgcacaaagttaggggatctgtttcctcgagatgttgggcgcctgacacgctgaccctactcccccggacgtcgtcgtctccaaccaacaacaacggcttgtttggcaacttgaggtaaaaggattgagagtttacacgagggaattgatgatgagattaaaatgggaatttgatttttatcccaatatcttgtttggtggaggtggtggaaattgataggaagtttagttggagattaggtcattaatgaaaatggatggctgtgatttgtttaggcaaagtaaaggaggaattccctcccaattaccacatctacccaggtattgaaaagggggacttcctttctcaattccctatcccatcacgccaaaattcacatgtctcataaccaaacaaaatactccctccgtattttaatgtatgacgccgttgactttttaacaaacgtttgatctttcgtcttattcaaaaaaatttatgtaattatcatttattttattgtgacttgatttatcatcaaatgttctttaagcatgacataagtatttttgtatttgcataaaaaatttgaataagacaaatgattaaacgttggttaaaaagtcaacggtgtcatacattaaaatacggagggggtatttaatagcctcatctttctaaactctcaatcccttgtaagagcaagtacaatagcaggctataaaccagctataaatatattttaaagagataaaggaagagagagaagagcagcgagctacagatttgtagctagttgcaacacggactacaagacgtaatgtgtatgacatgtggtaccaggtattaatagtatagtaagcaactattgtatgaattggctattacattggttatagatgatttggagctagtagtgagttatactattgaacttgctctaaaaactccctccgaccaaatgggccgcaaagacagtgataaataatccatgtgaggcagtcacaggtaaaaaaaaaaaaaaagcttctctaatcctagctcgtgacctgacacctgtccagatgtgaacgaatcgagcggaggctagcgaagtagtagcgagtgtagcatcttctcgcgcgctggtctccccaccgtctctttcgccatttgcacaattctctcactcctctttccccctcccttcttcttgcttcttatcccccaagcaataacgaggcgtcatctctctcgtcatcttctactctccctcctctagtcctcttcttcttctactttgtacgcgccactcactctccgagcttgacggcggcggcggcggcggaggtcgtcgagtggtggtcggggagatgggtcaagatgaggtggaggtaggtgcggagaagaaggatcaagaactaccggaggtggaggtggtcgaggaggaggaggaggagggatccaagaaggcggcggcgggctgcgactactgcggcgacgcggcggcggtggtgtattgcagggccgacgcggcgaggctctgcctgccatgcgaccgccacgtgcacggcgccaacggggtgtgctcccgccacgcgcgcgcgccgctctgcgccgcgtgcgccgccgcgggggccgtcttccgccggggcgcgggcggcttcctctgctccaactgcgacttctccaggcaccgccacggcggggagcgcgacccggcggcgccgctccacgaccgctccacggtgcacccgtacaccgggtgcccctccgcgctcgacctcgccgcgctcctcgggatctcctactccgacaaggcggcggcggcgaccgcggcggcggggggcgacgacggtgggtggtgggccatctgggaggagccccaggtgctcagcctcgaggatctcatcgtcccgaccacctcctgccatggattcgagcctctcctcacgccatcttcccccaaggttcgcttttacagccttctactgttcactgtccgaaaaaaaaaaatcccccccttttctgaatcaacttctatttaatttactcccatttatccggcttaattcttgtctgctgcaaaagattcagaactcgccggatgggaaggtgaatgaggaggtcatacgacagctaaccgagctcgccaattcagacggcggcggcgcgcagatttgggctcatcgcgaggcggcgcaggccggcgatcatcagttaccttcatggggaacaacaacacaacacaacactggacatggcaatttcggtactgcaaacagcaatgaggttgcaaccatgccgacgcctggttatgaggtttgatctacaatcttcagcatatctgactaatttgcagtgctgtttaccctatggatgtacttttgtcactgcaattgttagtcaagcgataaatggtactagattggtagtgtccgcagaatcttcgtctgaacggtagaaactatacagattctgtatcatatgcggtgaagatattcctaggcatgctttgctgtacctatgttgatggggaatttattctgtagtgtcaactcaagcgctagcaactcaagatacatctgagtcagaataaagtcattctagtgaagaacccctaaattctctttctctttttcagagagaagaagccccaaatttgatatgattctgttcttttcctatctattgtcatattcgtgattttgtgtaagattcttatttggtttacacctactgacacatacattaattttttaaacctggacaaggataccattctacccattgattatttattgacagtcctgttcagatagggggaattgtatccacactgaaattggccatgaaaaacgcagagtaggcctagttgataaagagctaagattttgattgtcagttcttttgcgcaaaatagatgcttacttggctatctattaatataactttatctatatggcagaatggtggatgggataacagcgattaccctgcgctaaatgatccgtgcaaggtcgagttcacatatgagcaacctccagccagctcagctgaagcatgtatttcatcatttgttcagatgtctgaactttgccccagcatgagcaatggtagcagcatggaggaaacccaccagacaaaccctggaaatggcacgccaatgcaagttctacccaaaatgccagaatttgttccttgccccgacaggaacttggtcatttctcgctataaagagaagaggaagacaagaaggtgacataagcttatggcaagcatgatgtttttatttcctcttgaagcttctcttggactcttacccaggatttttcgatttgaaacataactgtgtgacaatgaaattctaattattgcagattcgacaggcaggtccggtatgagtcccgcaaagctcgtgctgatagcaggctgaggattaagggccgttttgctaaagtcaatcagatttgagccttcatttctgtaatatattttgcatcttggacatgagtaatactaattaggaccaagcagatatagtacaagaaaaaatatcagcattttgtatgtaactatgtacccacccagtggctacgccacgctgaggagaatttagtttcatcgaatctctgtatatagtgttgcatcgaactcagtgatactatttacatgcaaaggatattgtcattatggctgtttccccatggttttactgcaaactgtctgctgtgttactactgcaaaagctctcctttgatgaggatcagtaaaatagtgtcaaattcggatcgcagatatgttgacattggagaggacaattctgtgttaagagatgagtaactcgtttcatggcaaaatggttacaaaatatttaattccctgtaatcggcttgtcagtttgtcatgaatcatgaattcgtgatgctagaggataaaacagagtctgctgcataccagaagctaatgaaatagttgatgcacgacaaatcacagtaatctgtcaaaagattagctttgatttatttatatcataccagatctgacacagcaaaactatcctcctttggaattaggcaatgcattgtatggtacaattgaatggctaatggcgtctgaaacattaagaacaactcacatctctacaaacactctggatgaagtagtaatttacaacttacaagcaccaagaaactggcaatggcagccaagaaggcgagcgaggcctagaagatggtctgctcgccgagctcctgccctgccatgccttccctgatcaccctctcgaagaactgctcgagcgtgtcgctgccgtagctgggcgtcatctcgtcgctgtactcgccggtgtccgggtcgagcaccagcatgctctccgacgcgtagtacctcccgatcttgccgaactccgccgcgtcctccaccccggggaacaccttggccagcgcgtcgagcacccagatggcggcgtccatgacctggatcggcaccttgatgaacctgggctcgcgccccagcagccggaacagcatctccccttgctccagcggcgtcagcgccttccccggcccgccgatggggaggatcttgttggccttgccctcgtcggagatgcagtcggcgatgaacgcggcgaggtcctcctcgctgatgggcttgcaggcgcagagcttcccgtcgccgaacatgacgtagggctggccgttcttgacggtctcgacctggccgcccaggctcttgaagaaggcggtggggcggacgatgctgtaggtgaaggacgggtcgcgcgacgcctcggcggcgagctcgccctcgaacctgagcttggcgcgctggaactcgaggagcggcttctggacgcagacggcggagaggaggacgaagtgcgcggcgccgaggccgcgcgccgcctggagggtgtgcagcgtggcgcggtagtccacgcgccacgagtcccgcacgccgccgccgcggctggcgaggcagcacaccgcggcgtggatggggccgtgcggcgacaggtcggcgcggagcgcgcccgcgtcggtgacgtcggagaagacgacgcgggcgggggcgaggtccgcgacgacctcgtcggggccgttgcggccgcgcagcccgctccgggggcgcgccacggcgaccacggggtggccgcggcggaggagctcgcggacgacataacgcccgatgtagcccgtggcgcccgtgaccagcacggtggtctccgacggcgccagtgaccggaacggctgcgccgccgacgcagcaggcggtggctctaccgacgaagcaaggaaaggccaaccccgacgggcacccttaggggcggcgttggcggcgcggaaggagacgaagcttggcgccggtcgagcagtgggggacgtggtggaggatgaggaggcggcggtgaggtgggaggagaggaggagggcagccatggcggctgccggctagggaggcggaggtgctcgacggaatgcggggagggaggcggagggcgacgtggaggccggcagtatcagagcccggccggcgagcgtttgtggtggtggtggcgtcgcgaccaaatccgagagcgcgattgcgctgacgtcactttgatattttcattttcattttttggattttggaggagcagcctctcatcaaagcaaccccaaaaaaataaaaaaaggaactcgccactgggctgaaatcagcaaagctcaatgggcctcgctgtgaaggccacaataacagaggcccactcagagcccgtctttccaaggctttattaaagcgagaggactcgatggccccgagacgaaaccctagccttcgccgccgccgcatcagttggcgatcgatgcttctccaagttccgtcgtgttcaaccgttttcgttcgatctcctctttctgattttggcctctttgtcactggtttatcgatggcgttgtttgtctatccccatttgtttctctcggtggttttttgttcatctttgaggttactgtgatttattttttccttcctgcaatacatcgtcttgatttggaagtttatggattggtcatgctcttgttctgtgtgtttttttttttgttgttttacatcctgattttcgatctagcgattgttgaatcttggagagttggtggtgttggccggtgatgacagcgtatggtatgagcctcagtaactaatctgcgcatcgggtagtgataaacccgggttattgacggccaagattcatgtgccaaaatgctaatctgaggccagccaaaccatctctcccttgagcaacttaccttacttcgtttccatatcttaaataacaagcgtaaagaaatggcgagctagtgttcaaacccaattaggaatgacatctgaacaagcagaagattgagaaatgtaacgcagacaccgggttgatgccagtatgccactcgcacataaattacgcaacatactccttatttgcaggcacagtagtacttttgagtttttatcataacttttaatcattcgactttgtttgcgatttactttgttatcaacagtattttaagtataacttattcttttttatatttgtactaatttttatatttgtactatactggacggatgtagtagaacgcagcgctgtaaaaaaaaattgttactttgttcaaaatggttctaatatggtccaaaataatcgctccaatcgttacgaggtaatcccgctgccgcgatcaactgtgtttgatcattacataccgccgccgtaatgatcttaattatcgtcgtgcctaagagcaagtttaatagcagagctcactacttactagtcaatgctataatagcagagctctttacttacttactagttaatgctaaaactaacatgtacagtagattagctataaggttatctttattttcttcatcctctctctttctttcactatgaatttaatatataatatttggagcttgtgtgtagttagcttttgcatgatagccaatactccttacttttgtttatctctcttctatataaatatataacttgcttatagcctactattattcttgctctgagttgttcacgcattgctgattgcatgttgattgctggtggcgtggattgatctctcgcttcgtgtggtgaatccgtccatgctggttgctggaactggaaggctgaacggctccttttgctgttgcctagaacatttccgctgtcacattcctttgttccctcgatcgcacccaaccatttcgttgtccgtgacaatctgttccaggtttcaaccaagagagggcccatggccttcgtaatcctcatcttaaaagctactccctccgttttaaaatatttaacaacgttaactttttagcacatgtttgaccgttcgtcttatttaaaaaaagtttgtgaaatatgtaaaactatgtgtacacgaaagtatatttaacaatgaatcaaatgatataaaaagaataaataattacttaaattttttaaataagacgaatggtcaaacacgtactaaaaagtcaacgatatcaaacattttgaaattggagggagtatatcaccattatccaaatggagaatcctataacaccattatccgccgaagcatgaattcgacttctttttttctttcttgaagattatcagttcctcttttgcatatatatttttttctgtctcgtttaaagttcatttttcacgggacagcaattggtagcgtattgtttcacgcaaactggatttcctttacatacacttctgaccaaattatagtactccgtaaaagtctagtagaacactacacggccattctccccagcgactgcacaataccaatttttcgccttcttctcgggacagtcggttgctcgctcgctcgccgctactcccttcgtcactagaaagaggacgtggttgcacaaatcttaatactatgaaacttaatactttctccgtttattttataactttgacaagtttaaaatttaactagctaacgttatacagacaaatttggaggtaagggcggtggctattgttcaagcccaattaggaatgacatctgaacaaacaaaagattgagaaaaggcatacaccggattggtgtcaattgcacataaatgcgcaatatattagcaggcacagtctgaatacgagcatacgagtaaaacttatcgctgtacaaaaattgttgctttgttcaaaatgattttaataaacagtgtttgatcattgataccggcgccgtaatgaccttaataatcgtcgtggctgagttgttcacgcattgctgattgctggtggcgtggattgatctctcgcttcgtgtggtgcttgaaacggcggctccttcgctgtcgcctagaacatcttctcacgtgacagtcctttgttcactcgcaccaccaacatctttgatacttcctccgtttcataatataagttattctagcatttctcacaattatattaatgctaatgaatctatttatattgatgttaatgaatctatatatttagattcattaacatcaatacaaatatagaaaatgctaaaataatttacattgtgaaacgggggaggtagaattcatccggcccatggcctccgtaatcctgatcttgaagctaccggtttatccaaaaggagaatcctatatatcgttattatccgccaaagcgtgaattcgacttctttttttcttctttcttatagattatcgattcctttttgcatattattttttttttctccttttgtatcatcttaaagattttttttcattggcctgtatccggtcgggtattgttctacacgtatttctgccgaaatttatttagatagaacactacatggtataggtcattgtcccacacggctgcacgataccaatttttcgccttcttctgccgtcctccggtcctcgggacagtcagtccgtcggtagctagcacctgctagcagacgtatgaccaaaacaacgctcataacccacgtgaagcggaaacaccgagaaaaaccgcggaaaacggccgaaaccaacgagtggattgtaaatcctcaaaaatacatttccttgttatttacatataacctactaaatagttattttttaaaaaaattaaaacaagataaattattatatgataaatcactccataaacatacaagttaaaattcatcttttataagttgtaacaaagaaaacaaaataaactataactagtaaacgtatattcacaattaaatttactttattcgttgtaatgtgtaaaagttaaatttgattatgcaggtttgttgagtaatatatcatatattaatctatcttgtttattttttaaaaattttatcatatactcgtactatttaaatgaatcgtacttccttcgttcgataatataggagattttgatatagatagtgtaagtgaaatatgaaaatatcttatattaggagatggttggagtaaacagcaatgctcaatccattgttcgagtagtttttccccgaaccaacgcaatccacacgcgacgacgccgcgaaccggcgcccaatcgacgcacggcgcgcggggccgtcggtttttggcgccgcacagccacgcgtcggcgcccgccgagtcagcaccacgtcctcctcctcttccgcccagatccactcccacagtatggccgccgaccgccgcgtgggcccaacatctcagtcagcgccaacgcggtactactagctgcctgccgggtgggccctccagcccaccgtccaaatccacctacgtggccgcacccgcgtccctacgtgccgccttatccacaaagaccacagacctcaccccggttggtgtggagtggggcccacgctgtcattcggtggacgaggccggtgcgggccccgcgcgtcattggatggaggaggaagcgagcggcggaggaaaaacaaaaaaaaaaaaagaacgcgaggccacctggcgcgctctgtattattgcggctgctgctcgccgtgccacgtggcactcgactggcgcttttttcggtgtttttctttttgtttcttttcgcttcgctgtgaataaatacgaggcgaaaaattaaaaattcagtaccaccaaaccaaacccaaacgagagagagaagaacacacgcacaccccgagcgaacgcaaaggagcgagaagccgagaagaaaggagcaaagtcgcgatcgagtgacgtaagcggcgacaatggaggctgtgctgatgcagcaggcagcggcggcggcggcggtggttgcaaggccggcgaggcggcggtgcaccggggaggaggtggtgggtggaaggcgaccggggttggtccggctcggatttgcgcggcggcggtggtcgaggctgaggctgagccccgcgcgggcccacctcgccgtcgaccggagcagggaggccggcgaggaggcggcggcggtggtggaggaggagggggaggcggcggtgaggctgttcgtggggctcccctccgacgtggtcaccgccgacggccgcgccgtgaaccgcggcaaggccgtgtcggcggggctgcgggcgctgaagctcctcggcgtcgacggcgtcgagctgccggtctcgtgggccgtcacgcagccggggcccaccggcgacgagctcgggtgggcagggtacctcgccgtcgccgccatggtccgcgacgccgggctctgcctccgcgtctcgctcgacacccacggctccgcgctccccgcctgggtcgcggcggcggcggccgccgaccccgacatcctcttcgccgaccgctccgggaaccgccgcgacgggtgcctctccttcgccgtcgacgagctcccggttcttggcggcaagtcgccgctccaggcctacgaggccttcttccgcagcttcgccgccgccttccatgacttcttgggctcgactgtcacggtaagcgaaatcaagaacaccttcgtctcgttctcgaagttgcagtgtttcttaatactagtttttgttggattctgtaggatgtgacggtgagcttgggtcccaatggcgagctcaagtacccttcgtatccgcctgggagcgacggcgccggcggctatggcggcgcgggcgaattccagtgctacgacaggcacatgctggcgcggctgaagcggcacgccgtggcggcggggcagccgctgtggggcttgtcggggccgcacgacgcgccgcggtacggcgagtcgccggagagctccaccttcttcaggtccccggggggctcgtgggagaccgcgtacgggggcttcttcctgtcgtggtacgccggggagctcctcgcgcacggcgaccgcgtcctggccgcggcgcgcagggtgttcgacggcgagcccgtcgagctgtccgcgaaggtgccgctcccgcggtcgcgccccgcggaggccaccgcggggctccacggcgggtacggccccgtcgccgagatgttcgcgcggcgcgggtgcacggtgatcgcctcgggcatggacgggtccgcggcggcggcggcggtcctcgcccaggtcaaggccgcctgcgcggagcacggcgcgcggctcgccggcgagagcgcgtcgctcgccgtggcgcgcgacggcgacggcgcccccggcgcgtggggcggcctgctcgccgccgagcgcacgcggccgtgccacttcacgtaccagcggatgggcgcggagttcttctcgccggaccactggccgctgttcgtgcagctggtgcgcgccatggagtgccccgaggaggcgcacgaggacgacctccccgccgccgccggcgacggcggccggctcgccgtgccgtccggcggccgcgccgcagaagacgccaccgcgaagcaggcgcagacagtgtagacgcagctggcacgctgcgactcgtagctgtacatatgtgcagtagtaataccagtatactgctgtaattacagcagtacaatttactattactactccatttttattaggaaaatcagcggtaaattctcagtgtgtagctgagaattatgagatggatgatgccccctgtattagtggggtcaaatgagtatttgtcaaaaatggtattttgtaatgatcttatgatcgagatgagagattgtattctagtgatgctattgcatcattgttacctcaagaatcagaacatgagacgtgtaccccaataattcttttgtccatgacattgcaatgcttatacgatgatgattgatgcatgattaacatacgtaatctgcatgattagctcgcgttggaagaacacgagcttcttatcctcaactgagattaggtccaacaaaatactgcttcggattaacaaatacacacagttttggctctcagatacatcctgataccatggtaaccactagtttcttactcagtagaatttataaggcccattaggcattataaaaacgctcgactcaaatcaacaaatgattaccgtatgtattcgtcaacatatagtagtatatacaagtcagaatgtgaagttcaccgctgaaacgtttgtagcttctctcgcttttgccctttcccaaaaataatttaataaaaaataattaccattttacccttccaccttccatacctgattgcccttttaataccttttttcaggtaccttctctctatcatatctgatcaagggtcctaattaatttcaagcattgaagaagatctctactaacaaatcacacaatccacaacactgcttttgacactgttctcagcactgcagcctattactccatgtattacactaatttaaagaacacatcaagttgcaacttgcaacacacaacttggcatttttggctacacaagcctgccgtttacaatgtaaattgggggagattaaaaagaagaagaaactctctaggtttcaacagccggcaccgcccaagaatgtgtaacaattagaaaaaaaaaacaaactagaacagaattacaagccaggaggccagaaagatcacaggtggctattatgtacactgcagcagcagcatccggggcagcaacttcaggagatggacttggtgtttttttttctgcccaaatccaaacaaatccttgtgcttcaatgtcaagcgtgactcgtgcacgctacgcctgccgatccagcttatcatgcttccacggttcgtccttcatccagcacctgcaggtacattgcattcgcggccaaaaatcttgattaggatgcggttcatctgattgtgatttagctgcatgaatgcagctatgcctggacagtgatggaaaacaactgcgcaactgcagcttaagaggtatttttgcgagttccattggcaactcgtcagcctataaaccaaggctaaatttgaatttttgaaacttaatttcagattggtctacgtggttttcttattgttttctatttaaaccgctaagagtagaaacataaaatccctactctaaaattatttttctttgcttcgtgtcacgtttcatggcacataaaccgtacccaagcaagtatgcaactgtagtttacagaacaggctgaatcagtagtgattacggagctaagggtaaaacacagagggcagctatcatctggtgcaaattgcatacatgtgttgccatctattctcttctgatgtgacatcccaacagaaaagctcgatttgcatatgggcagaccgatgaattcagatatgcctaacagccagctcagattttggatcaactactgctctactagtactcctaatctgactatctagtgtctgaagtttggaaggttctgaaaatgtgagtcagctttcataatactgttgaagaaacaattaggtaaactgaagaccatctagataaaagcaagtattaagtgtcattatatcaagcagggtaagtaaccatgtgtaaatgtcgatagtagtaaagctgaatagagagaaatgatcaccttatctcattcacaggctattttggtatcaaaactgctcagacagattgcaaatgattgaaatgctgatatcggataacggtagtccatggtgaacaagtccttcccaatctttccaaactggagaatcaccttgtcctgctcctggttagttggcccattttcatcagacgccaccagctgaaagtttttcactgaggcaacagtaacccgtccacggaagttgaggcaccaacattgcagttgctcatgccacctaggagatttattcttcagaaccagcttttcttccttctgagtggataattgtgaagttgcactatctattcgagctgattttgatctgaagaatgaaattgatgggaaagagtcgaggccactgagaggaaattcagtctgtgtcggagctttcccaccctcttgaacagctgatgtggggatggaatccataatgcagttcatccttcttggacctctgcaataggaatgcatcacaaaaatcactgcaattttctacgaagtattgtagaagcagtcaaatctagcatgcaaagtcaatcaacaatgaaaaggttgcgtatatggaattatgacagctggtcagccgccttctctatataattattcctagccatgtgtgctcaaataacagccagaaggctcacggagttgtgatgttatcaccacttttatcattagagccttttcttaaaaaatagattcagcatgtctaattgatcaatcatgcaattgcagtaatcaccactgtgattctaactatcgatgaattcacatattaaggtctcaggtgttgatgacaatatttaccaatactatccatagatttactcggcataacacaagtgctgattcaataccttgcacccaaaacattcaattcgtaggaaatatgtgaaactgggtaattcccggcaggaactctcggggagacttggttcagaccaaccacacgtgcagaccgactttttgagacaacagctccatcatatggtggatgggcatcatagacggtaaactttgttccgagaaagtttgacctgttaaaacaaaggtggttagctggttcttttaattgttattgtaggctatatttttagatctgtaagaaacaaacaaaaaaaagatataactgaagattaagtttgagtaatgcacttgacatccaaatacatacagttttgttctaagttgaatgaatagtttagatgtgaaatgcatagcacttcaatttcttgtactttccaaattctaacacttacagcaaaaggagagggggaaaaatgccatgtgatgcttttatatgaaacagcctatagtacatctaaagggccttccttacacatactactaaagaaactaggaacaaatttagctttagcttttcagtgatgaaatctcaaaagatcaccttagcttgccaatataggtgttgctcccctttgacatatcactcatgtcaagggaaatcaggtagtctgtgcatgtgggcttcctgcatttgcgtgcagcaagtaggaacttcccatcatcggcaagtgctgtaaaaagaaacttcccgaaaatagtaagcatatatccattatacgccagcatagctgtacttaatttggcgtaccaggggtggataaacagcataccttctgtgagcccaatatacagataatatgtctgagtagtccggtttcttcttatgaaacatttaagagtgccgtctcttgggccaggctgcacatcacgtagacttgagtaaattaggactaagatgacactaaaatgaacttgtcaaccaaaggttacagtcaatgaagtggcgtcaatttctacgaaaatgacagcagagaaatggcatttgatactggaatatcatgctaaacatgtgaagcaccgcaatcaaaagggaaacggcttcatcagatagcatttatgcatccatcacattttcttgatatgcagtttgttttctagcccaaaactagataaatcacataagggagacaccttccaaaaattaaaacatactagaatgccatggttcacaacatccattaaaaagatgatttggctgcttgcaatccatcagagcaaagccgacatacgcaacagcgcaacagaatgcagggctttcatccttcaccgcttgacgaacgcaattcagcagctaaccaatcaatcataaagtgttgacacaatgaacaaataattcctaaagattaaacaatgaagcttcaacacaatgaacaatcaaattactaacagttcgacatcgcaaccgggaatttcagaatgaaacgagagcgcgaacctgcttgagcgagatggggaaggtgagcttgccggacgcctccgggacgcggacgatctccttggtgatccccctccagctccggcagacgccggcgcacgccaccacgtccctccgcgacggccaccacacctccgactcctcgatcctcaccagcacctcccggagcagctcgggcggcagctgcgcccagcagctctgctgcatcgccgccgcctccgccggccccaccgccgccacccgcggcgcgccgccgccgccgcggtgggaccgcgaccgcaggctgtgccgcgagatgctcccgaactcgtccctcatctcctggatcaggctcctgaacgacatcttcctcctcgctcgattccccctcctaatccacacctctcctccaatctctcaaatctgcaggctgcaaccgcgccaagaaaaacccggtcacgaaatttaccaccaccatttccatcaaatcttccaccaaacggaacgccaagaatcgcaagaacagggggaggaatttcaccgtactgaccgagagacgggccgagctaatttcaccgtaatgtctccatggcgtcgccgcccatgccggaatccatcgatgaacaccaacaaggcaccgaactgagctggaagcaagcagggcggggaccaaatccctcgacgcagcaagcaagaaatggcagaaatcctcacgcggaggtaggtgtctccgccgctgaatcccagaatcaatccaagggccaagaaaaccaccaccagctcgaagaagcaagaaaacggctcgaattcaagctctcaacccaccaaacagaacacccaacatttatccgaaattgagcacgaaaattctgcaatggattcttggctggaaggaggaggcggagggagcaagaacaagaagaaggcagaggcaaagattccaagaaacgaaaggcggaggtgaggagggaggaggaggaggagcaggtgccttgggaatttttaggtggtgaatgggtgattgataggtggtggtggtgtaggaaggaatggttggggaatgccagtatactagtactacctatgattgctactacacaaaaaagggaatggaatggagatggagcttgagagcaggtaggattagggttcctccctccctcttccttccttgctgagtggctgaaaaagatgggcatctcacaactctccctccctccctccatgcacacatccatctatccatccacacattcattgtagcacaattaattaactaataaatgtgtgtataagtacagctgactagtactaatccactcgtttcaaactataataagggttggctttaatatggagtaaatattaagaaaataagtagatatacaaatgaactagctaagactatatatagaacacatagatggtacaaccagaatggacaatttactgaataaaatcatattatataaataatagggttttatatttataataatttcgttttaaaagttattacttactctatattttactcctacagtactggttaactttgcatgagaggcgaattataatactaatagaccacacttgtggaaaagaagaaaccaaattatcaattattttggcatgacactctgtcccaatgtcattgtcagggcagggatgatgccactatagccaagggaagcatcattgctcaagcttaacccaagtagtactagtactcctcatgattgattgcttccatctttgtgctaattaggcatggagtgcaggacacttgactgtacctgcccctcactttccaagtgtgagtgagattaaagcacaagaaatgaggatttctttttttttttcaaggtacaactctgccagtttggccaagcaaaatgttggtactatcatctttgcatcatcatcatcatccacctgaggaaaaacagtagaaggtcccttttaatgttcaggtgaaaaacatgagatgttttattgggcttttctgctatttttctttcacctcacatgtgttagtggcctgcatcaaataacggggttttttttttgcatgcatcccttacatgtgaaggcagtggtcgcgcgcggagaatcgagaaagtaaatgaccggcgtcactgcctctcattctaaccacaaatagttaatggtcaataaaataaaatgagttactagtaatctctttctttttctctcaaaaaaagttactactatttctatttacagaaaaaagtttattcccctgtatttatactcaattgcatacgcaccccgtttataaatattacttcattgtcatgatctttgagataaaatatagagcttttattctgtaacttgatgattccccgtatgttgttgtaggatattagcttaacattggtgtaagctttggtgggaaaaatatactacttgtgcacacagagttgcatgatgcaaagattgtaaaaagttgcaataaaacatgtggttatatgatttaaattaaaactttactttagtgttgatttccggagttttgatcgtagtctgttttgcagccttagcttccaaatgctagtagtaataaacatgtttatttataatttataatttgttatttttactttttggtggtttattcggcaaagcttaagtaatgagatattgctcgtgcaaattcgtatccccttcatccaaaagtaaataaactaagtacaggatatgatacatactactaggataaaagaaaaattaaaatacgaggttagtttattccaaggctgagagagtaggacacactagatttttcataatttggtccttttgaaaaccttattctacaaatatacctctgaaaaaacttattctagaaatggtcttttttagagcgccagagttaatggtgccgccccctgccaccatggcggccagatattgacgtggcaaggggagcgcaccagcctctctggcgccacccccagctccgagtcgggatgctctctctctgctctcctcaaattcactcgaaattatataggtaagagagggtttttttatgtaagaggttgttttccgttgtttttgtttttcctatattccaaaaaaccaaaaaaatagtacattgccctttttacatcctataaaaaaaatagagtttgttgagtttttctcttttacattcaaagtatcattccttaaaacaggcataactttctcatacggactcgaaatcgagcaaattatatatccacggacatgtacagaaaagttacatccgattctccatgcttctttaggtttggaaaaattagaaccttcaaattccgcttgaaagattttgtttttgaggcgagaagtttttcggtagagttttagaaaattataaaggttgcatatttcatccatttgagtttaacttttttatggttggttcttgtggactcttaaaaatggttttaaaaaaaaccatttttgggataagttggttcagggagtctatttttaaaataattttttggaaaggactaaattttgtaaaaaaaaatccaggtagaacacatcggtttgttcctactactagtagctctatccccatatatacgctggcacacaggatcaggcagctgtctgtcctggcatcacttgcacagtgctaccggtggcagctgtaatggagatcgtactagtaccgacggacgagaacgcaggaggagcaagagccgcagacagacagacagtgcagcaatgcatgtccgaggagggtcgccctgcaacttgcgtccttgcgtgcggccgccggatgatggatggaaatcgtcaggaccatctgcctgcactcgcaatcggaatggtcaaaaaaaaaaacagaggattcattccctcaactagagaaacatgacaagagggtgagcaggcgtgacaagagaccgcgcccagccacgctacgtcgtcacgggctctatccagttcttctctcctctcctcttcggcagcacggtagtattaactcctggtttcagtgaaaagctttcatgccgctttcattgctaggtactccctccgtttcagaaaaaactcaaattatagggataaatctggacacatggagtttgattctttttggatgaagggaataagcactactcccgatcttatagggatgtggcatatcctagtattcctaatttgaacagaccatgtcacatacctttaaaatcccttatattataggatggagggagtagtaatggtgaacatgggcttgccctgaagactctagcggtggtgtgtttggttggttggatgacggatgagtccttatttttgaaattcaaaggaaatttaaacgattgtaaggttttaaggtgtttgttttggaaacatgaatcattcatggaagaaaatattccctcgtaatgatatgacaccgatctcatacatcaattgtatcagctcacgccacttgtgtacaccgctcgtcattgagactcacatgttatcacaccatttatatacctccaactaaagtaaaatacgttcttaaaaaaaagaacccaaagaaaaataatggtgatcctatccctttaaccaaataagagacgagaccatcctatcttatgtcgttctcaaactaagcgtgtgctagcatcttttttttttcaagctttgagcttgtcggagaaataatattctgctataaatcacaaatggatatgagttctttgtttaggactggaattggatatgtggtgagggcatactagtatttatttgttgttaaatttaaccaatttggtattgccaaaattgcttacactttggttacatttagcggggtccagacagcgcttatccatttcgtggcttgatggtctaaaagaacacaagcatccttccaaattagttgtacaagattccaccctccattatatctaacatgaatcactgtacatattaataaagaaggatatgcataaatttattttaggagcaagatcatgagctacttgacctgcattaataattaacctttccgaattaaagaagcgaaacaaacatgtgaaccttttccttcaaaagaaaagtatagcaacatgtgccttttttataacagaaaaaagggttgcaaaatgagtggcacactacaccttttacttgccttgttgaattttatagcttacttgtgtttgtggatcaaaaggggcacactcaaagaggaggagatcaattgagaatattgccactggtagtatattactccatgatccgtgaaaaagtgtggatacacctttgagtatctcaaggacttgggtaaagcaggctagaagaaaacaaatcatcaaagttgcctttccatttggcgacgcggattcgctagtgtcatcatcttcacaaaaactagcaaaatactctgtgttgcaccgggctataattatattagatgaactaattaaaactaaatcatcacccttaagctcctattaacgatgataggataaacagtgtgttgtgtacactgtacctgaagcaaatagagcttctcactctagtacattgttggtcaacaatgacgagcccacgagatagatggtggcccccatttgtcatatagatggagtgacagaaccaccaccactggtatcttttaagatagtatagaaatatatatattctccatttttaaatatattagtgtatgacacaattgacttttagatatacgtttaacctttcgtcttattaaaaaattaataaaaaatataaaaacaatgattcatgcttaaaatatattaataataaaaataaatgatacttgtatagtttatttaataagacaaactgtcaagctcattcctaaaagtgcatttttttttagaaaaaaggaaagagtatcacttaacattatattttgtggaagattgttaaagccacctgacctgcatttgtaatgtagatccaccctcggttcaccatgactattgtaatgttacttatttagtattctaagtgccgacgaatgatggataaaactaagttcacgcagttatatatttgaagacaaaaacgaatgaattacgtattagaaagttaaaatggttcatttaaaatagttctctaagaaataccactgttcttttacaaaacaaacatacggttaggagcttggaaggtgcgcacaacgagtaaaagtaaacagctgtgctcttcatctctctttggggttgtattttggaagagaaaaacacaacgaattaattcagaagaaagagacgaaaatgcaaggtgcggtggtgctattgctcaccctgcgaccgaggttgcccagccgtttcggttcggttggggagtcgtccacatcttcgttaattcgccggccgatgcagctggtgaccgtaagtaatcggttgagacagggcaaaggatgagtcaagaacaagaagacgctgctgctgctactgctgaacaaacctgagtacggcagccatggctccaatgtcgcgtcgcacgtgaaatttttggatcaccttctccagcaaacgtattcctaaggctcccagcagctcatgatttgcaatcgcaccaaacggcaattatgcttgaaaatgcacccagaaatcaaagacgggaaagaagagaaagatggaggatctgagcgtgataagtaatccctccatccaaaaaaaacttaattcccaaaaaaaaaacttacatagtttatttaataagacaaactgtcaagctcattcctaatttaaacaatttgtccagactatactacgagggatcatatatctgcgctatagcggcctctgtacagtccgagttagctctagagcttcgtcggtaaaatctgggcaggcgatgttctttttcgagtaaataccatcaccggtccctaaacttgtatcgttgtgtcatcgcggtccctaaactcgtaaatcgaccgttcaggtcctcaagcttgttcaattgtgtcatcccggtccctaaaattgcagatcactcgtttagattctccaacttgttcatttgtgtcacctcggtccctaaacttagatttgaatatcatctgggtcaaataggacggtgtaaagattttatatttaaaaatatttcataacgttttcatgtgaactctaataaagataaactttatatcaaacttgtagccctcgacactttatagttgatttttttattttaagtcattttttgtcccacaatgtaattttaaaattaaaatttcaaaatctataaacatgcaacaatattttgggaccctaaacagttttaattcaaaaacttatcaactacaaagttgtaggtcacgtcgagggctataattttgatataaagtttgtcttcattagagttcacatgaaaaagttataaattatttttgatataaagtttttagaccgtcctgcttagggaccggggtgacacaactgaacaagttggaggacctaaacgagtgatctgcaagtttagggaccgggatgacacagtcaaacaagtttgaggacctgaacggtcaatttgcgagtttagagaccgggatgacacagcgatacaagtttagagaccggtgatagatttactctttttttttaaactcatgcatttaattaaagttcagagagagaaagtacgtgagtaggtacagtgctcagagcacaggtctgcaagtttagggaccgggatgacacagtcaaacaagtttgaggacctgaacggtcaatttgcgagtttagagaccgggatgacacagcgatacaagtttagagaccggtgatagatttactctttttttttaaactcatgcatttaattaaagttcagagagagaaagtacgtgagtaggtacagtgctcagagcacaggtcactgggatacatccagttttgcaaaggagcccctcaagattgggcaaattacactttaagacaacattttgcagaaaaggacttaacaagaaatcgaaaaagcaatcaggtccttctcctttgtctgccttcaacgctgccgaggagttcttgaagctcggctctgatggaggctggatcaagatgagccgcttaagattaagccaccacagaatcccggaaggggcctcacacacatggaggtttggatggtgacaagcaatggaagaaatcagcatcatcacatataaattctaacagagctgaaaaagaggaacaacaccaaggcagtgctttcaaagatgataaatgaatacaccagaccagcgaaaaatccaagaaaaacatagcgatctgctgcagaaaccaggaggcgaatccttatggggcctccgcgcataggaggttggaactgcctcggtggagcttgaaaacctcagacgccttgaaagagagtttcgctgaatattgaaaacaaggctgccatctttggaaggaggtcgccggagaaagaaaagaaggccggcgctacctttgactccacaagattggatgaacccccgatgaaggcgcttaatagacacccagctccaacgaagaccgtcaccggttctgaaaccggcggcactcaccgtggtaccaggacgagggaagccgacgctgacggctgcctcggaagccaaaagaccgaaaacaactacgggagaaccatgaccatacgggaagacccgactaaaactacaactaatagaggggtggaggggccggacccctctccatcccttccacggcggcgagccaccggggaggaggagggagaggggccggaggggacgaaggattcctatagaaaggattcaagagaactctcgagagaggaggagaagggtcccccctgtctagtgagctcgcaggcgatgttctttacggatgattggatagagtacgaatgttatagtgacaaattgtatattagtatatgtattatagatctataaaataaatttgcttagaataagttttctaagcaatgcggatacagaaaaactttgggtgaatacccaacatgatccttgaactcaggggcagagctagagtgaaatggagggtggtgccacttagttaatttactcactttagatcaagtttaagcttatgcggatgcctaagtttgtattgaggagggtgcatatatggtgaaaatagatgagg

SEQ ID NO: 9883 - DNA, 217656 bp, Oryza sativa
  unsure (1)..(217656): unsure at all n locations
atccgcatcatggcatcatagatagcaaaaccttcactctccattccaacctgacaattttcaaaataaaacgatgattagggggtgggtaaagggcttaatatctcaaacattggtagtttgacaggctaagtaaataatttaaccttgtcaaagcctttaaaccaccctaacccaagaggttaagattatgttaacccccccccccccccccccaaaaaaaaaaggtggaataagctaactgaccacaattgatcctcaagagtctgttgtactgctaagtgctactactaccccacctttaaaccaccctaacccaagaggttaagattatgttagcccatagaaaggtggcataagctaactgaccacaattagtcctcaagagttctatctgttgtactgctaagtgctactgctaccccatctaatctagccaaaacggtaattcaggttatccatgttaattgacaaacgtaatttttggaattaagcttagctaacttggttatcttatcccctaaatcaaagtcagtctaagaacaattcggcaattatgatgataattaatgacaaaaggctacttaatactatcaaaacggtagagaatagttgactgcgagccatgaaccgaacaagataagcatgcttactggttcaccatcatcacgagctgttcctgtggagttgatgtatatgtaaacaggttctttactattcatccactcaaggtacatcaactgcgcaacgacaagctctgtaactgctggcaccaactacatagcaagaaaaaacaatcttatgaggctataacagctgcatgaataaccgatttaatagatatttacaaaaaaaaaaagaggagaaaagacattggtagtccaagacatcttaaataatgcagagtatataagaaagaatttgttatgacaggcgtataccgggaatagaagtcatccaaccttgtattcaagaattaggtcaacaacaattatattttgttgctaatataaacaatttttaacaccactgaaatgcaaaatgtcagtagccagtccctagtagtttcaacttttgatagctcaggatctaacattctcatgaaattgcttatccacgttggttgacctcaccaacattcttgtcatcatgttttacatccacatatgtaaatagtaagacttgaagaaaatatttcacatagagaacatggtgcaattcataccggcatgccaatgtaaacaattcggccatgaagaagcaatgatggcaagtcagggggaggccttctaggcctgtgctggctgtaagaactgctagatcgttccacctgccacagattataggtaatgaagtattaagtgaagcaacgttcagtatgaaaataaaggtgttctctgcacatacagatgattaagctgggtgcattacagttcaaatcagcagttcattgatcgaaatcttaacacaataggtatcaccatgtataagcgtgtaacattccaatcccaggtaatcttaatgtattgcttgaggagcgattgaggttgtattttacatgttactagttgagaatcttttagaattagtaataaatgctccctctgtttcatattactagtataatgcccatgcgttgcaatgatttttttctaattgtctaatatattatcattgtgctaattttactgccatttcacagagatggaaaatttcacaatattctatcgttacattttcctttcgacggggtctatggtatgtagggctgtcaaaaaagctctaggctcgcgagctgctcgagctcggctcgagctccagacgagccgagcccgagcctctccctaagctcgcgagctttgtcgagccgagctcgagcttccaacgagcctagttatatatgatttttgttgttatttaataaattaggagatcaaatatgttttgtatgtcttatattgacatcatatatttattttattcttttttactcttctactaatatgatgaactagaaattgattatttttttaaagattatctttgaaatatatattgtcttacttaaaaatcaagctcggtagtcgagctcgagccgagcctgtcagaaagctcgaacattttataggctcggctcgagcttgtatcgagctcgagcctaggcagacgagctcgctcgagctcggctcgttgacagccctaatggtatgtgggagctaggaaacaagaaaagtttttatctcacggttcatgagtcccgcatggtagttgggtgatggtaatgacaaagtcaccactaccaccactaccatcttttatattagtacagataaatcgctttgattttttttagtcaaatttcttgaaagtttgaccaagtttatagaaaaatagagcaacacttatagtaccaaattagtttcattacatctaacattgaacatattttgatagtttatttgttttgtgttgaaaatattattatatttttctatcaacttgatcaaatataaagaagtttgacttaaaaaaagtcaaaacgacttataatatgaaacggaggtagtaccaacctatgataggtgatgttgagcgctatgcactactttgatttgtgctggactatggatgattatagtcattctcaacctctcatgtttcggctaactcgcggaacgctatgttgctattgctatggactacggcatcagcatctcatgtttcggctaactctttcgcaggaaaatcacgggaaacccctcccccccaatcacctgcgcgggcgaggccatgagcttggcgttctggaagatctcgaggaacggcaggtggtcgtcgccgcggcgcccgccacctgccgccgcagcctggagctcctccggcgaggcggcggcgagggtggacaggaacgggtcggccctcgggttgaagagcgggttcgggctcccccccgacgccgcccgcgccaccagcgcggaggacgccgccgcgccaccccgcgcctggcggagcaaggtcggaggcagggagaggaacgaggaggaggccccggaggaaggtgcagtggagggcgtggggaggcggagcgacagggaggcggacgccatggcggcgggcggagctcggcggcggcagccgtgcgagctcgagctcggggtgtgggaggtgaagattggataattttggtcggggatttgggagaggagtgatttgagtggtgcagtttgttcgtcgtgggctttggatgtgggctcactgcgtaatgggccgtaggaaacggagatgggttattttgggccttacgggatactgacatgtgggtcccaatcgtcaatgggatggggacagcttttctcgcgaacgtgcaaaagaattgcacgtcaatatattagaagaaaagagttatagttgcacgatgcaatcagccaaaccggcttatgcaaagggaagggggaaaaaagcaaaaaagaaactggagcttaaaaaactacggcggctaaaaacaaactccaaatagcgggaaggggccgagccactctatactcccaacaagtctccaaaagcggcaatgccagctaaagaccacagatggccctctgagtggatggactccagaaccactgagatcgaagagagtgcatagtcgaaaaccctagagttttgttccttccacagctgccaagagaccaagagcaccagggatggggacaacttgcaacgggagatggagggctttctcaaacggaactagtttctctccgaatcagaaggctttcttaatcaatttagtttttcgtctagatactaagaaattgtagtcgtagaatccagaaaatggacaaaaaaatcacaagttgggaaacctaacttttttagattctcataatttgacttgataccaacagcttcttataatttcaagtttcccaaacaagcccgagtctcttgcgctttcgggcataagcaatgtgccaatgtatattgctcaactagtcattataggtggaaccatgagaagtgatcattagctattttcatttctcacaatggttaagtttagaagtgagttgtaaggtgggcccagataaataataaaggagtatattaaacaagattcctattttgtaggtgcgcgctatgaaataaaatcgtgaacagttttggcccagcttcactacggcgaaggctttaggtctagtagatccatgtggataacccattcctcattttcttttctttttttccagtacacattatcctcttaaatagatctattccacacctatcgctctgcttcacctcctcctaatgctcccacttctagttcgccattacttctcccaacctctatccaacctcgacgtgccacttttccttgccttcatctaacatcaacagcattggcaaagtccgctgctcctaattaactccctcttcctcttcctctccccccaagacaccaacgaggttaggatcaccttctcgcctcctcgatgtgctactccatcaatcgatgctctgctcgaatgagaagccggcgaactcaagacatcagcttacccttcttcatcctccacgtcctcaacaagacatcgacctcctcttcttccccttcctttggcgagtctcttgctactgacaagtttccaggttttgcgatttttggttgaaagttttaggtcttgaattgaaagttttcccatttgagttgaaagtttttcaattcaagttgaaagtttctaattcgagttgaaagtttttcaattcaagttaaaagtttcgtgttttgagttgaaagttttctaatttgagtcagaagtttcaatccataaatagaaagattaaatattctaaattttttattgttcttagttgaaagtttctttttttttaatttgaaagttttacaatctgatttgaagttttaaccatgaaccatggatagaaaacgctactccaatccactcgtcacggtagggggcttaatatctaagtcgaaattgaggggagcacgactttgattcctgacgtgtgcgcgcgtattaataacccctatattaaatatctcatatgcatagaaaaagagagtgtgaggagagaagagaaagattgtattgttgttttgttatattgttgttttgttccttatggctacccaaatgcatatggatagctcaagccatgtaccactgtaaagataatacacgatgtataagtagactatactaggcttatgacctctcccattctattggacacatatgcgttacaaatgattttttattcagtttaatggaaggatttagaccaatggattattcgtttttcctagtatggcctttttcttttttagaaatcggtatttcagggttgacggtttgtacggaaggaaagatgtttttacatggaggtggagtagtagagaaaatacggtataaatacatgcgctcacactcatttttatgagtgctcacacgctctcctcccctataaacatctttaaaagaatgtaccaacatatcttgacgtcttgaggttgacgaagttatcacaaatatctcgctgtcgactaatacatagcctaaaaaaagctataatttggagggataaattccaccgcaagttgtgctcggggaaaaaaaaattgcgttcgcaaattcctgccacatcctgattcctgccaatcaacttgctgggtttccattggaggggtgagaagcttcgtgtggtttttggtttggttgcgacgttgggtcaatcctattacagtttgtacctccccaggagattgaattgtcggcgcgattactcctctcaatacttctctctcttttttatttttccccgcgaagcaagctccttccgcgttccagttcaacaatgttttcatcagcacagaatcgagctatgcatgcagcaggaaatgcttgtctccgatcaatcgaagcatccattactttggtagctagctagattaccctcgtcaacatgacgatgcaagatgagtattgcaagtgcaatgtgcaaccacatgtcatgggaaaatgacaataacagcatagtagtagtaattgaacgcgctgtaaattaaatcaagcaggataaaaaaaaccctctcaagatcatggacatcgagacaggcagagtgaccagatggtccagattagaacaagagctcaggtggctacaggagatcaggttttatatcatctatcataatagcaccaccattataaacactaacagatagagtaataaaatggtgaggtccacatacgaataactgtatagtgacattgtggtagaggatcccctcggagatcggcgacaactaacaagggcaaagaaggagtggaggagtggcacacgagctgcatgcgcgtgcagtgcaccggcgagctggctagctagtcgcggcactgggtgatggcggagcagccgcgggtgtaggggttggcgtcggcgcccggccggcagttgtagtaggacgcgccggggatggaacacggcaccgagttcctcatcagcgccgcgtagctgatgtactgcgccgccgccgccgccccggcccagccgccgccgtagtcgtccatcagctggaacagccgccgccgccgctgccaccgcctcagcccgacgacgccgacctccccgtcggccacgcattcctcctccaccgtgccctccaggcacggcgccgcccgcatcccccagtgggcgacgagcgcctcggcggtggcggccgtcgcagggacgacgacgagcgccgccgcggcggcggctacgaggaggacgaacggcggcgcgcgccgtgccatggcggacgtcggcaacggaggccctctgtgccttgcgatgcgcgcggtggtcgccggcaggtgtggagactggagagtggccgtagcagctgaccaggggcattatatacaggcagcacagagattctggagactactaggcttcgaattctgtgcaaattacgtgataatgacacgaaaagttgaccttgtttaaatttgacaagcgacgactgtttgaatttggctgaatgctttacttgtgatgttaaaaaaaaactcaacttgcagggaaagatcacacctgctgacctgaatggcttgccattaagaagaagtctcaaccaaattaatcgcgaaaggccacaaaatactgacctatagcctacgttattttctttcaagtaaatttcactttggaccatctttattgactaaaatttcacattaagctatggctagactcatgtttccacttaacaccacgtataattaccattgtttgcactttagacctggttttatagttaccatcacacgagttgttgtctaggtgcttagcattttacaagaaacaatgatatagaaatctctgccatgcaaatatgcttagcgcaagaacaataattgtaacatgttatatgatatcctatcaaattaatgggacttcattactactacatatgaatattcacaacccttatactagggacaaaattggagaaatattgagtttaagaactatttttctagaaaagatattacatgttttacaatacccaactgtagtgttagtacaaattgttgaattctaagttttctaacacaaaagaaataagatcagatctacaatcattatactatgtgtaatttgtgaaacccggtacgaagtgcaaataatggtaactatatatggtgttaagtgaaaatataagtctaactctagtccaatgtgaaaatttggtaaataaaggttgaccaaagtgaaatttactcttttcttttaactccaaactgcaatttctttgttttacgttagcatatttttcaagatgttagatgatattttttttttcaaaaaatatgcatataaaggttttataaataaaaaaaaatctgattttttaaatttataataattaatacttaattaattatacgataataagccatcatgttttttcgtgttgttaaactacaactccaaaatagagtttagaacagggcagtaatagtgtttttacatgagggtaatgagtgaacttaactatgcctaaaatttactcctataaacagactgttaatgttaatccatccttgaacagtaatattttaccttgctaactactacatctgtccaaacatataaagagttttagagttaaacatgattattaaaaaaatatgttgaattaaatggtggaatattgtgattggttgagaattgaagatactatcagttaggaaatttgaatgatggagggttatgattgattgagaatgtaatgttgggggataagttgttatattttagagtaaattctaaaggttaactctttttccctaccgatagtctttctgagttcttgctaaccaatactccagggaaagaccaatgtatcagatcaatcaaagcattaaaaataaggtgataggattgagacatcaggctccatcaaagcagaacgcgcatggcaggatgccgatgcaagatgctcggaagaagcaaaactaccattagaaaaaggaagcagtttccatgccagatctcaaattacattttttttaaccatcttctatggtcaggtaaagtaaaagcatcatgttagtttaaccacattgctacatgcacagtagtaaacaaaccaaaagaccatacaaagcagatcatcacaagccatacaacgcatgagtggttcacagagattgagaaatattggaatatggaaacatatcactaaagaattcatgattcctcctaaactttgcagtaatgcaatgatgcaccctgcagcacatgcgtccgcatacacaaaggtttatgaagagatcacataaacaagctgatacctggttgcaccccccaaaacaccgggagtgtagaaatgttgtttatgaacaagggactatgcagctcgtatagattcaaacacaattattttccttacaaacaaaacaaggacaaacaggccacttgtgcaccatagaacaattcacattcaatatgtcataaaaaaaatctctgcactatgagaaatgccatagccacatcggatacaaacaagtcacattgttaaaaagattaacatattctgtgttaacttcaggcctgaaagaactaagagcaaagagaaaggtacttaactagtttctagtccattctctttgcatcgggctgatagcctgatatgtacctaaagtataaggatcagcatcgatccctagtccatgtagtgcggtgttgtttggacgaaaagctcctcatcttcgtcatcatcgtcatcttcatcagcacctacccaattgcttgggtgatgctgtgatcgaggattatcactgacaacatctacaacaaaataaagcaagttatttagatatattgtaatataaatgcatcagtaacagacgacttcaaaatatgatgtgttttatgttgtgatattaaccaggaggctcttccaagtgatccatttgcataggctgcattctgtagtacaaactagtcaaggaaatacattctggaagtaggaaagcagaaataactcgaaactcagacctcgtggatcctctttcattattaacaacatatggaaaactctacatgaacatcaactatcttgacataatacatcagttctgtgcagtaacaaatgctcaatactaggacctaattgccatattattccctataggattgtaatgctctgttctctccattgatgtaatgttttccttagtaactattccctatagaattgtatgcaagattttctatggacctcagggcctggcattgtgtctaagaaaaccacaatctatctccctctgacactgtatatatctatattcatgcagattagtcagatcaaatacagtatgactgattgactgtaagttgactcctaacactaaccttaacattatcactgaaagtgtcttatggttttaactagatgaattgcaataaatacatactccctccgtttcacattgtaagtcattctagcatttcccacattcatattgatgttaatgagtctagatagatatatgtctagattcattaacatcaatatgaatgtgaaaaatgctagaatgacttacattgtgaaacggaggaagtatttaccatggggaatataggcaagtggacacaggttctgttctgtctattgatataatgttggaaggaagcattttgtgttgagggatgctgatctcacaatcccaactaaagaaaaattctcgcatgcagccttaatttctttggattgagagaaagacataagtatataataccataatgatatcataatccataatgatatcataatcccgattaaagaaatttattttttaagtccagacttaatttacttggacagagagaacagagttaaggactgctgttaatatgtctgatgtctgatgaacacattggaaggtcacagtcgtaagaaatatacaagatataaagctgcaactgcagaataggatgcagtagcaaataatacaagaggataaattagaaagaatgaattgaagtgatctataggatacgtatcgtttgcattatcagcgactggtggcttgtagcgagcatttacactatgcagcattgatgtgtcattcagtgcattagaattggcatttctctccttctgggtgtatttttctctgttaacttcaaaacttttgggagcactacctgtttaacaaaagctttcttatgtttgactagcatgatgatatatcaacaggataattctataatcagagagaaatgaagttctccagccaccagttagtttgatcacacacagtcatatggcgtacagtccaattatggccttccgaaagtagccaatatgcactgtacaggccctttggtcctgcgttgagtaccacacagaaagccctgcctggtgtgtgatcataccaatagttgacaggatccatttatcagaaatacacacctgatagctccgaccatattttagtatggtttgagacattttcagggactggtggtggtgtagcagcaacccttggttcttctgctcgctgtgcagaagtagttggctgttgggcaacactgctgtcagtaagttgtgatacaagcatagtggcaagaactagtgttgcatcaaaatcagaacttgatccatcgtcaagcccaaatttgggaaccaaaaggacaggcctgcaattcaaatgaagacttgtaaggtccaatccaaatggataataaaactaaaccagtatggctacttactcgccagccttctgaaagaataggaggatatcaacttcacatccttcacaaaatgttaagaaagcctgggttggaagagatagaaaagtaaatacaatatatgtagtctcatgccataaaaatacctgagcagggaactaagttgtttccttaaagtttcagcagtaaagtttaaaaaacaatgaatattctataccaattactcagaatacaactagccataaagccacatccttctagtccagcaaggagacggaagaattaacaaaactacatcaaggaagcaacctacatgtattcgatggaaaagcaagagtattgacttgcaacttgtaagctctacatacattcagtactgtgcatgctgacacacggatacatattatttacgttattctttctataatgatcttaaagaaatattctctgattcaattaggtgaatgctaaataccaaattatttcccatttaaaggagccattctataattatcagaagttttttgtcctacatctattgaatgtaggttttcgaagaaacaaaatactgatagggctgatcatagatcaccttgagttctttcaccccgaatgtgacatccactgaatcaccggaatgtacatactccacgaactcctctgttgggtcaatccacagctgcgtgtgcagcctcgtatcgcagtcatctgcataaccgcaaagtgcaaagaaaattcacattcacaataccacaacccaatcatcacctcataatacaaaaaaggacagtttacaaacaccatgagatgccacctttcgtcgggtcaatgtagcttctgagctcgacagccttcccctcaatctcaccatccacgccgacgttggagagcccagcagcaggatcggtggcaataaccgtgagctcctgcagcgaggactggaaattggagagcaggcgcgccaggtcccgcggccggatggcgaggcggctggagaagttgctgcggtcgagcgccagcgtctgcacctcggactccgcgctgcacgcgatccagtacgtcttcttcacccctgaacagctcgaaattttgatgagaaattcaggagcactcgccaaaaacagcaaaaatggcggcaaaactaagaaaagcgcgccaacggcaagaaaaatgttgcgcgcaaaaatcccccacaaaattgcaaaaccctagaggacggagggggatcggcgagtaccgttgaggcagtggagggtgagctggagcttgggcgcgtcggggttggggagggaggcggcgatgcggtcgagcgcggcggtcggcgtgcggagcacggagaggacggacttgaggaggacgctgcactggagcggcgtcgacgacggcgccgagtcggcggcggcggcggcggagaggctgaactcgtcgaagaagtcccgcgccagcgagatggacgcgtacgccgaccgcgagctgttgagcgtgtgcagctcaagctgaaaaaggagaaaccaaatcacccccaaagaaaatgtcagaacagctcgccgccggcgaatggaggaggaaaccgcggcggagaggcaggcaggcggcggcggcgaccaccttggcggggtgggcctggaggacgaggtcggagccgacgcgcgcgaggcaggtgacgcaccgcgtgaacgtccgcagcgcgccgccgctcatagacagctccatcgccgcccgcccgcccgcccgccgccggtcgccgccgcaaccgcttccccgcgccgccgcgcttcgtctcagctcgcctcgactcggggggagggaaaccggtcgggggaagcgtgggctttctcggccgagtcgttttgggcctccccacgaacgtggcccaataacggtgggcccatggacgccgaagctagggtttttctctcccgaagccataatatatatcgccctcgctcctcgtgttcttcttcccccttcaaacgccgccgccgccgccgctctcttcggtctcgcttcccttctccgggagattcaggtgcgccccccgattcccgatctgcttcctgttctcccattcgcatgcgcggttgcttagcaggacgattcttctacgatcttctgattgcgattcgcgaggaatcggtgtgtgttagcattatcatgtcgagtagcatttttttgtttttgttggtcaagttccatgtctagcagatgaaatttagtacacgctttgcaactgtacggttaaattcgtggctagtttgtcgaattggatagaaggaagtgcttttatttttctcagatccggttacttctcgttgtcgaggtctagtgtaaggttaacatcctaattcttgggtacacatagatgatatgtcgcttatatcgtcccgtttgattgatatggagctagataaactaaaactgtatgcctagttctattgagtattttagttgaggggggataagttttggtgttccatgtatcttctcctaatctttgtgtgtattgttgctttgctttgcagtcgctgttgtggtgtttgcttcatccaccgccaccatgcagaacgaggagggtcagatggtggacctctacgtccccaggaagtggtatgtttctgtcattcctgatgagttgtttgtctaattcgattgattgttgagatgtacttaatgcttgtcgtgttggtttaccgcagctcggccacgaacaggatcatcaccgccaaggaccacgcctcggtccagatcaacattgggcatgtggatgagaatgggctgtacgatggccgcttcaccacctttgctctctctgggttcatccgtgctcaggtaatcattgcaatcctttgtttattgtaatgtgcctgtatttttctttgtgaactgtcagctgtattgctcacagcctatcagaattcagaatgtgttatttccttcatggtcatgaattttgcgtgacttcttgttgccggcagctgatcatgtcactgaactttagtgctgtaaatacacaagcagaaagtttgatatggctaacaattttgtggattgtttttatgaattcacttctcgtttttgttagcctgagcattttacataattatgtgatgcttctggtttatttcatttgatacctagttggtccacatctttgtttataagtttgcgtagtcattgatattgtggcaaatttacctgaatgacagcaatgtaaaaatcatacttgtacattgactcttttactatcatgatgtccaaaaccagatagctagcatttatctttttctaatgcgagtcccatcagttatttcttggtgccatcctggtagctaggacctagctgtttttcttgctcatatgctatgtacatgacttttgttgcaatgttgcctcctccggtcggttctcatctctttttattgacagggagatgctgacagtgctctggataggctgtggcagaagaggaaggctgaggtcaagcagcagtagatcttgctactagttttacctggaagaactcgtttcaatttcatgtctctctagctacttcatgcaatgcctgtgttatcagttcgtactccgaaaaaattcgtgtgacttgatcggtttatcctgataatgttttatccatgttgaagctttattacatctgtttcttgatgcatcgtgtggctgacatcattgcacttgtttcaaaagaatccatgtcgctatgcttatcagaagttcttttctaggctgacatatttatcgtggattcttcctctcgagtcctatatgtcgccatctaggatcacagattcatctgctaatgtttggatctcattcatctgctaatgtttcatagttcatatctgggtaccgcctgatcaataaaataatcaggacttctggtactgatcctgctcgataaattcttcgaattaaatttgaaaatatactatcatttgtttttttcttaaaaataattagggtttaattttttttttcacaaatataccatcggtatcgcataattgatacgcgagaatgacgtctcaacagggagagaccgcttgctctcgcggtgccggtgcaagaccgagcacaaccaaagagcgagatcgagatcgtttttgaaaattaattagtggttattgattggtaataattagtgattaatcattctaatgacactatcattatatattgatgtgtgaggtaataggaggataggacccatttaccaattgtaggcatagctaattagacaccgtggttaatgcgaggtggctttttgaggaacattcgggcaatcctcccattagcgccctccgggtagaacccgccgggtacgtgctcatcgccagttagatagagtatcctaagcaactctgccggcgttcggctgtaggagagcgagtcgacgttggcggagaggatgttggtgcatatcttcccctcagcgccgagctgctctggcacgatgagcccctcgtccttcactccgcactgccctagcttgtttcgcagcgccgacacacggtcggtgagctctgccaccgtggcaccgtagggggacactgtctcgcggcggtgctcgaagaggaggccgcgcacgacggcgtcctggccagactcgacggcgagcaggccggcgacgaggcgcttggtggcgtagccgtcgatcagcgggttggtgcccgtgtagccgttgatgcccaggtaagggatgacgtagacggccaggaggaagttgaggctgttggcgtcggggtcgaagggcgggtctaggtggtagccgaccgcctcgtccattaccctggcgaagttgtgtgcgctcaggtctatcagcggccttgggatcccacccactgtcctctggattgccctgcatcgtcaattagttttaagtgcgatcatatatatatatcaccgccattttagaatccatattcttggtaacaactcatgaattttgatctatgaactgtgatctttccaattttgcataactacgtagagcctcatcgattggtctggcttattaaagaataaaaattaatttaggtcgtatttagttacacatttttttttcaaacttccaacttttccatcacatcaaaacttttctacacatataaattttcaacttttccgtcacatcgttccaatttcaaccaaatttctaattttggtgtgaactaaacatagccttataggtaaaacttttatatatttgttcataacgacttaaaagccaatgctaaaaataaattatgtcaaaaatatcttaaaatcaactttaaattcaagtttgaaaaatcgtatgtcaacacagggaatataggcaaaccaatgaggctcgtacacacatacgagacatgcccgttttagtagaactctacgaggttattagattcatatgtcaaacaggttttactcgcaggtgtgtaattacttttctaagttgaaatatgatcacacttaaaatatgtttcctggaagaagcgtccagatcaagaaaagttaaatcttagttttaaacttgtttttcctattgcaatgcacggacactttcctagccaaaaacaactatagttgaaatgtgaatttgaatttcaatcatattctttgttgtaacctcaggtggccgatctcctggtaggcgaactcggcgcagacgcgccacgtgagctcgtcgaggccggccttcctggcgcccaccggcggcgggccgcccagcgtcaggttgggggcgaggtggtccagccccacgccgaacgccgcgtgcaggaagaactccgcctcggcgaactccaggttcagcgcgaaccgcaccgggtccacgtcgtgcgcgaacacggccaccggcgtgtgcggcgccgccgcgctgcactgcgcctccccgccgccgccgccgccgacgccgccgtggaacagctccgcccccaccgccgccgaccacgccgccgggcaggccgggtggtcacctgcattgcacgaggaaaccaggagcagcacgagcagcgccgaacagcagattcgcggcgacgccatctctgactgcaggttgttcatcagttcatgggtagtgttcttctgcacatcagcttcctgtgaatttatagtgaaacagcagcagcacatggcactgaattatcttttcagagacgcaagcgatttagctaacgttcttgggcggctctgattgatctttcgcgaagttttaattgatcggcctgcgactgcaagagataggattgtgacatggcaagatgagctgtttggttgtatagatgaaggtggattgttacttgttggagctggaacgcaagccatttcaagtcaagggtagtttgcagatgaatcattttcagcacagatgctgggggactgaaaaatggaaattggtagccagggattgcaccacaaaatcttccttcagtctatttttggctcatccttgtgcaggctgcaaagtgtgctagcacttgattaggtgagctggtgaggtgtaatagtgccttagatgaggttgtcaaatttacatattagtactgattgctacatatatcacttttattatctttcaactttaaaatggttgttaattactactcctacttgttagcaagatgtccaaaagattagattaatgcaatgtttactcatttgcagttctccgatgggattatatgctttcctttgtgggatttcttcaggtagcaggcaaccacttctgcacttgaggttgaggccacatgcatcacatcacccatccttctgagatcagattacacacaattcaatactattggatcataatattggtttagtaaatcaacgtgcccttgtgcaacttctttctactgcttattgaattgcttcagtctgaaaacgtgctgaaagtatgaaaaataattggtctacaaatgcagggtgaagaacaatgcatctatggtaatgggaacaaaaacttaaccatatcgtgatgctaattcactcacataattgatttagcatttatattaacattattgatttagtatttatattagtagaaatacatggtagaagcaaacaatatttttataaattaagggaaaggataattaggaagattattgaacaaatcataaacaaaagttgggaatcaatttataaattctttaaaattaattctttaaaattaaagaaaaggagaggtaggaggatcatcaaacaaattatttaaaaaaaacaagttgaaaaccaatttataaactctttaaactttgatatacatatatatattttaaaactgatgaattggtgtcctatcaaattaaggaaaagaaaaagtaagaagatcatcgaacaatttataaagaaaaacatggacatgttgggggaagccatgtataaactctttaaactttgatatgcatttgttttgataatgataaaaaaaagaatatgtgtataggacactcaatttgaagtgaactggaactggaaactgaacacatgtgttgtgatatgcgctcacaacactaaagaagaatatgatttaaagagttgacaagacactaaaatgatattagaaatgaatggagctagaacaaatctcatttcattatcattcctccatgttatgaatgtacatagatcaaatctcatttcgttgcattcctccatgtttcagtttgatccgaaatattatctcatcggtatttcagcccatttcagtttactccaaaatctcatctcatctcactgtctaaaatatattgtaaggagttggtgcattagacaatatgatgcacaattaggggctaagaacatatatagtgtggcgagaggaggaatagaaaaaaaaaaacttttggtgaacacgtgctaagtatgaatcaatcatgctggatgcctcaaggcctcgagggtgtataaatcatgagaggtactaataactaaatcgactgactgtaaggaaggcatcaagaatctcgcatgatatgcctgctgtttagctgctatagatataggaaagcagtcatgcaagcagtatgccaacaacaactgcagtgttcatattgagccgcagagaaatatttagcttctgttgataagtgaaataagcaaactcaaggtggcacactcaaaatgacgttgggtaacagatgcatgactgatgattttggctaaatgtcatgttgtttgcaggttctgaattatatatttttttttaatttacaatgcatggtttagcgtttgaagtttcaatagatactccttttgttcttataaaatcatttttggcatagatgttggacctgaaaattgaaatcagtagacgtacaggccgggattgcaccataaaatcttccttcagcttatttttggatcatccttactagtaatacttcgttaggtggaggtgtaatcgcgcctttatcattagatgccgtttgctaagacgaagttgtcaaacttacgtactactactgatgatgatggctatacatggctttatcatctttcaacttcgatgattacgttgttgtcaagatgcccagaagaaatgccatctctgcagttgtccaattagatcacactttcctctgttggattgatttcttcaggtgtttggcactggccacatgcatcaggataactgagattacacgcaaatatccaacaaccctcagatcattacggcgtgcccgtcatgtaaacctcttcgtactgacgcctttttgccttttggaaaaattgagttgcctactgaaactgtatgccacaaactatttcaagttgtcagcaaagtgagcaaaactatcgtaattaatgtaccttgtgcaattgggttcttcttacaaagtgaaaagttcttgcacgttttgcagataatacatataactagcaagaacatttatctaaaaataaaagatgaccactgcacatagcacactcgaaatgctttgttgaaagcttgaaattgtaaggatgcttgtcaactcagatacctgcttaatttgttgggggaaattagtaagctcatatgtgtgggctgcagctagttcaggaatttggagttctccaggagatccatccacagattgatctttcaagtgacggcccaagtaaccattttctttctttaattcctccaaaaatatctgcccctttttttttcatcttcagatgttcccagctcaacaagcaccagaagttcaatagtactacatgttagaacttagttgaacatcattttctgacactattggaaaaacagtagaacccatgattaacacaaaaatatgaactttgaagttactttgccagcttatacaaaatgtgtatgtggcactgtaagcgccagacatttctctcatctaatattttctttttcatagtaagcatgttgttagcagtgtacgtgtcaggcacttctctcatctaataatatttctattttcaaattaagcatgttttttttatcaaattcagaccattgatcttggtatcacatccttcagctcaaagggaaggaaatccctatcatccctaatactccttcatattgtatttttatttgccgccttatgtctatcgagaaactaatgcaaagataattactacctccgtcctaaaataaaataaattttggttggatgtaatatattctaatattataaatctggataggatatatccagattcatggtatcaggatatatatcctgtctaacaaaaaattaatatattttaggatggaggattatttaatagtctttagcagaagcacatgcaacaacaataacatgctcgccatcacacgtcaactgttctaatttggaaacgtgctgaaggtctggaaaatttcaagtggaaattcggcatgaatgctactccctctgtttcagattataagtcattttgactctgatcaaaatcaaactactccaaatttaaccaagtttgtagacaaacttggttaaatttataattgaatatattttcataatatatttgtcttgggttgaaaatgttatttttttacaaatttaatcaaacttaaagcagtttgactttgatcaaagtaaaaaatgacttataatctgaaacggaaggaataccaaatgtgacctagcaagagtatcaactactcactccatcctaaaatataatcattttttacttcgacacggtcttcgagatatcactttgaccaacaatatctataaaaataaaatgttttaaaaagagagttacatcaaacatcaacatttacatcatctttttcatttgtttgctattaatattcaaaatttaaaaagtttgacttagcactattctaaaaatacttatattttgggacggagggagtagaacaatgctaacccgcaatgtcatgatgattgtactggcaaactctttacactttataatagaggctaaaaccaattagtactatctgcaaaaggaaaagtagtggtgatgaatcgtatatgtgctttgagatttgtgctgctcaaaccagagtattagatatattaacgggttaaacccgattagatctttccatttttagtgtacccgcatgatttgcatacatgcatatattgcaggagtgattgcctttccatataaacgtactcacatcgtttccatataagcaaacatgtacgtaataatttccttccgattgcatgataatttatttccatatatgatacatactttcctttttttgcacatgctcacatcgtttccctatgattgtgtgataatttatttccatatttgagatgacactgaatcagatccacaaattttcagtaattccactaattaagttgtaattgatttatttccatcaataccgattaatattttccactttttgtgtacatataaaatggtatgacatttcattttttacacactccactgtccagtccacgctattaccctgccggccggacgtcggcgagcttttcgtctctgtcggttgtctgcaaggtttcgttgccgttgtcagtcatctgttagcttcgtcaccgcgccgttacgcaccgccggtcgttcgcaaggttcgttgtcgccgccgcaggtcgcccgtgaggaggttcgtcgctactgtcatcgacggtcgccgcgcgtgtggttcgtgtgtaatttatttcaatttattcttatattttgaaaagtccctgttctaccgttttcgtagattgagtactgtaacaattttatttcgttgtcaagaccttaagatgggaatgcatcctactaataagtttttggttcatcttcctattgagccaaagactatacgtacgtatgttgccctgggatcatgcggagaagatggtcgtgggtagaagaaacaccagttggatgcacgcgctaagagctagtgtattaacacaagtttttttaaactgatgttcttgacagtgtattaacatgaaatttgcatgttgtaatcatgcaaattaatacagaatattttggtactatgtatatacctaccatcctactattccataaatatcaccacctacttaatctacatcggtagaatatacatagcacacgaggcttatatacctaaatctataaatggtttataggtatatagccaactagacttatatacttacatctacatgtatttaattgcatctggccaagctacctagttagagtataaaaaaactcaactaaaaggcctagctagcttcaaattcagttcaagaaaaaaaaacctacttgaaaattaaactttttcacgcgcatttagataggtatataccaaactacaatatgcaatttttaatgggtatatacctagtatgtgtgtttagaccggtatatacccaaatagaatctggtatgtcacacatacccaatatacgtgtttaaatacctaaaaatgtgtatcctaaatggtattatacccaattaaatgtacatctgaaatgcatgcatgtaaatacctagctttgtagtacgtttgaaacgcatgcacgtcacatacccaaaaaattaaaaagcacaacacacgagacttatatacatacatctacatgtacctaattacatctggtcagctacctagcgagagtataaaaaaaacttaactaaaaggcctggctagtttcaaatttagttcaagaaaaaaaatgtaagctacttgaaagtcaaatttttttcacgcccatttagataggtatatacctaactaaaaatgggtgtccgaaatatgcaatttttaatgggtatatacctaaatcaattctgtttaccggttatattgtacttattttttctccggtatatgctgatattttagatagtatatactagatttttcaagtatccaagatatattaaatcgaagggctaggcggcgtgatgcacaactgtacataagtttttttcacatactacgattaatttttgagtatatatcatctccgtacatcatataattacaaaaaaatgtacttctaatacctagttttttttgccataaaattaacatagactaaaatcgaaattttttcattgcatgggatttttttccccgtttcataccaaatttttgagtatacgacccattcgtacctaaaaatagaaagtgactcgtagtgcatattttgttactcaaattgctaaattaatggagtcatgaatgtaataatttggtacggatacattaccatataaatttgttgcgatattatccatgtttccaaatacatttgaatataataaatttgctgcgatatatataataaatttccaactaatttgtttccatgtttccaaaaaccaacaatcagtatttagtgttacatacttagttcccattttcacatatacttactttccatttttccaaaaaattaatttatttttccatatacttagtttccatttttcacaataatgttaccatttattcagaccccaacgtgaagcaagtaagtttccatatttacaagatattatttccaatttcacggttatttaatgtttccatttttgaaatgtacacgcaattatggaaattctctcatccgcattgcatgcatataaatgcatttattccttttttttactgtctattcaaatatgtggaatccattcattattaaatactatactctaaacgggtgtatacccattaagctatgtacccaaatgatcaaaaccgatcagtaagcatcctacggctcctaacattggagccccatccgtgcgtcctatatggtaacactcatatggggcaccatggtgcccgggcaccatggtatcaaatgcacaaaatcactcaaatttttcaaaattttcaaattgtgagtatacctagttataagaattcgattcatacctatacctatcaacaaaacaaactcaagtttaactttgtttcacaatccatgattacatatctaactaattatatgtttggatgctatatacgtagaatcaaaatctaacaaaaacaagttcaaattcagttcaaacttgctttgaactagttaataaagtagttaatgttaatacctaaatatttgaaaaagtttcatactcatttgaattgggtatatactcaatttcaacaatggtgcccgggcaccatggagcaccaaacaaatttactaattgtgagtatatacctagttataagaattcgattcatacctatacctatcaacaaaacaaactcaagtttaactttatttcacaatctatgattacatacctaactaattatatgtttggatgctatatacctagaatcaaaatctaacaaaaacaagttcaaattcagttcaaacttgaatatatatagcatccacacatatatatatatatatatatatatatatatatatatatatataggtaaattaactggtgctacatggagtatgggctccaagattcaaattgagtatatacccaatttgaatgagtatgaattttttttaaatgtatagatatgaacattaacttctttactaacaagtttaaacaagtttgaactgagtttgaacttttttttattagattttggttctaggtatataacatccaaacatataattcgttaggtatgtaataatgaattgtgaaataaagttgagtttgagttgttttgttgttaggtatttgtatgaatcaaattcatatacctagatatctacttacaatttgtaaatttttaaaaatttgagagaatttgtgtgttttataccttggagcccgggcaccatggagtcccatatgggtatcctatatatatatatgtatatatacatatgtatatatatatatatatatatgtatatatatatgtatgtatgtatgtatgtatatatgtatgtgtgtgtgtgtaaaatcaaagtgtgtttgattattgtttcgtgatgaataattggcatatgagattattggttttgatgttgagatattattggcgaagtggttttggagatgattgatttacaggtgatggacaggattgacaagtctgacggttgcggtcagatcggctgggtaaggctagtcagaccggtgttatgcgagcggtcaaaccgaccagcccgcggtcttactggccgacgctgagtcgtggataatttatgtttataacttctagatggatactatgcgtatgtaatactgttgtttgctaacaaatgagtcaagttggtgagaacttgtgctcggatatggtttcttggttgatgcatgtgtaggtggtcttgcctcaagagagtgttgccggtgatggatcgggagtcaacttgggaaaataagacattcgaacgatcaggatatcatgtggaatactttggctaaacatcattgcacgtggttggtgaagatttcatatggcatacgatgtagatattgtgtgcgtatgagatacggagtcgaatttggaaggagtccaaatttggtacatttggagtttgtaaagtttgtttctttttcggaaaggtttcctatatgattaggacttcttgtacaaggttggttcgtgactttaggctacctacctcagttataaatagagagggagggtgtgtcttgcggtatcctttttagagagtgagaaaagttagggttttgagtttagtcaagattttcatgagaagtgctattgttacactttgtaaacacagagataagtaataaagtttaatctattttgagaatcttcgatttatgtttgctcgagtacgacggtctaacatgcatgatacttgtggttagaccgactgcaacgtggcgtcaaactggcgggcacacggtggtctaaccgtgcccgccagtttgaccggcaactgcaacaggcgcatcgggcggtcagaccggagtgactgcaccagttagatcggatgtcatcgagcggtttgaccgtccgatctgaccggtgcatctacactggtgtcgaggggtgaccctctctagcgggaggctgtgaggcccccctttgagagttcggccgggggcagcgggtgagattcgaggatttggtgagcgaaactatgtgtgatcttgatctcggaggctcctccaagacgatgagacaaaagaggtttatacaggttcgggccgctatgaagcgtaataccctactcatgtgtgtatgattcttctgtgcttagaaagtccctggtatgcaagctagggttagacaagctttggctcagggatcctcggtccgatcccacttccttgctaggcatggtcctccttttatactctaaggggataccacatgtgctgcgagtgctacctagagagaagggaaaatattctctataataattacatgtcttgtgccttagcccagaagctatctacacatcggttgctgcgcggggcccatcaaatcatgcagggcatccttgtcattcgctatttaatggatgaggacttctgggttctcgttcacaccaaaaaaggggaactcgggtcagttcagagtggttggaccagctctaaccggggtaagaggctgtgaagcccctcatcattatgatgggacgggacagagcacgccactcgccgcctgacacactgatagggcgcgggtacacagtcgccgtcccatcggtcattcaaccgtcacagaccggtcagatgcgcagcacgccgcattaaatgcggattggcgcggttgcatagaccgctttaaatgcagttaggtgggcgttaggcgcgcccacctaaccctatacacgtgggctgatacgtggagggggtcggggcagctcgaccccaagcgagggcggcctcctccctctagcttgggggggcagccgccgcgccaccccgggctcgacccccctcggggggagccacgtgggtttgggggcggcccgaccccaagctgggagggggcagccgccacaacaccccgggttcgacccccctcggggagagccacatgggtttgagggcggcctcctccctctagctgggagggggtagccaccgctccaccccgggcttgatcccccctcgcggggagccacgtgggtttgagggcggcctcctccctctagacgtgatacccccgggcccatatcaccgacaactggttagaccacaaccattgacgtcttcaatcttacaagttgtacttttcttttggcttgttttagtattctccaaaatctcatagctcaacaaaaagcacggttaagagggattgagaaaaaagatgcagcattgtacacagtatttactgaaatataaatagggttgggaagcaattcgaggagaaaaaaatagttttatgaataaggtgtgtttaagtatgaatctatcattctatagggatgattgtataaattacgagcggtgcggataattaatccgattaacagttaggaagtcgtgaaaacactcacatgatatacatgttgcttatctactagatataaggaaatagtcatgcaagtaggatgccataacaattgcagtgtttaacaatgaacctcagtggtgcagggaaatatttctgttgattgataactgaaaattgcaaacccgaagtggcacactcaaaatggcatctgggaactgggtggttggtgattttggctaattgaggtatttgctggttctgaactgggtttggcgtttctaaatgtgtagtattgacattggtttagtatttgaggtctcaattattgacgctctttgttcttgatatcccctacactgaacaaatggaattttttttggttttagatttttttttaaaaaaatatttacagaaataatctatcggccaaaaaaattacaaaaatataccctgccgcccacctctggggcggcaagctgacgtggcaaacgggggaggaacgggcagtgacggagggagggttttttgcaggaaaacccttgccgccctctggtggggcggcaaggggcccgaatgcaaaaaagccagtcggggccggctattttgcaggcggccccttgccgccctctggccgggcggcaggcctccctgcctataaaaggcctgctgcccagcccccagccctcattcttctctcctcaattccagtgaaaaaaaaataagagaggggaggagaagagaagaaggggcgaagtcctgccggattcagacgccgatttcaggtaatattcatagatcctatatgtgactattgagttaaatagtgtgtattctttaaaaatttgtttgaataaatgcattatatttttagggttttagttgtactaatctagaagtgcgtattgtagatatcggtaactacgtagatctgctagtttggaatcaatacattaccgttgcattggcttacacaagaagatattacgttgtagatgtttattgcatgaaagagtaatatgatctagttatttcgttgacagatatgtcgaacaaacaaatattccaagtttaccatggactaggaaacgtccgttacgggccaactggggtagatctgttagattttattgtatcagaaagaggaattgatagactggctgagaggagtgtaccttctataaaaggatggttaatgaggggcttgagagttgatccacagacaagtgacataacaatcaatgttatagtaagtcaggcaactgaggttttttttgggaactaatgccagttcaaaactctcgagtgtggagatggtatttggaaaatgcattgcaacgcgggtggcctctagctttggttccgtttgttcacccgaaggatccaggtgtgcagatgaacatggatgatggcgaaggaccaagagctgaagtaaacgagacttctgtggaggaggtcaacgcacgagaggacgggggcgtagtagctccagtgggcattcaaccaggtggagtggccgacgagggggagactgttggtgccattgtggatgaaatggagagggaggattctgacaacgagcgtgtagaggaaggtgattcgtcagatgatgagacggatattaatccagcagaatgggctagtaaggatttttctgggctgatcgtctctgaagaggatagtgtgagatgggagtacaaagaaaatgaggttattcagggagcgatttatagtagagcagaagatatgaatgaggcggtaaaacattttgcagtgtcacttcatagagagttttgggttgccaagtcgaaccggtcgcaatatgaagttcggtgtgttaaggaaaaagatggttgtccctggagagtgcacgcgtataaggggaaatggaaggattattggacagtgtcagtcgttaccaagcatacatgttttctacctggtgttcagaaataccacaggaacattacttgtgcatttgttgcatctgagatgtatgcgcatgtcatcgataatctcacatatgaagcaaggtcaataatccgacacatcgaagagacatacaagtatactattagctatgccaaggcctggagggccaaacagaaaataatagagatgagatttggaacttacgaagcctcgtataacaatttgccacgcctgcttggtgttatcgaggaaagaaaccctgggagctcttacgaagtgaagaaattcccctcaattgaacatcctagcaagagtgtgctgcaaagggcgttcttagctctacatgcatgcaagatggcattcgtgaactgtcgtcctgttctctgcattgatgggacattcttgacaggaaagtatcggggccagatactaacagcaataggggtagatgggaacaatcagatattgcccttggcatttgcttttgttgagagtgagaataccgacagctggtactggttcctgaaattggttaaaacaaaagttgttggtatgaggccaaatgtgtgcctgatacatgataggcacgctggcattctgcgagcgatagaagagttgcagtttgggagtatggaacgaggataccccggtgtttgggaagatgtacagagtaggtggtgcatgcgtcatatgggagcgaatttcttcaagcaattcaagaacaaggagctcaagaacatgttcaagaggctgtgcaatcagaaccaggagaaaaaattcaatgagctttggaagagattagatgagttgacagccaaatgtagtgatcagcgtgcagcggctccatcgaccgccgttgctgaccctcctcaagctcttggacctctcccaacggatagtccaacattggttagaagaactggattggagattcggaaattttctcagtggattctgcatgaaccaaaagagaaatgggccaaggcgtatgacacaggtggtgctagatatggaataatgacaacaaatttggcagaagtttacaactgggtgatgcgcggtgtccgtggactgccactagttggcatagtggagttcattttacatgggacatgcaggtattttagggatcggttccaggcagttcttccctctatgccgaacaacagcattttgtttggagctttcatgcagaaaaagctagaggagttgcgtaaaaaggccatgaaacatcgagctgtagtgcaaggtacccaacagcacaggtttgagatactatgtcaagataaggcaggcaggggtatctaccgcaagagagtgaagcaggagtgtgttctcaaagccgacggcacatgtcattgctcttgtgcaaagccgaagctgctccacaggccatgcacccatgtcattgctgccgcagcggagtgtggcataccagatgcagtatatatgtcacagtacttcagtaagcaagcaatatatcatacatggagcggcaagatttatgggttcggcatagctggggagttcacagagactaacgatgaagtactcaatattcctgacccatcgaagctccgaggcaaggctggaaggaggaggactcgtcgcatccacaatgatatggacgagacggaggctagcaaggtgaagcgttgcagcaaatgcgatgaacatgggcacacctacaagcattgtcctaaagacaaggagaaaccaagtgcggcggaggcaggactatcaggatcagcagcagatggagctcgccctacgggtgaaggcactacctccactcgaccacgtcctaggcgtcgtcgtgccacgtctggctacgtggtgtagttcttatgttctatgtcggcatgtggatttgcttgtaattcatttcgaacttatcgatgtgtttatgtttcgtcgtgtaatgtcagacttcggcatgtcatgtctttaggtctcgtgatgtaacgtcggactaaggcgcctaacgtctttaggtatgctgatgtttgtcggacttcgacacgtaatgttatgttatattattgaactctacatatatgttaaattgcacgtcatcgttatgtaccattagtaacgtttgctatatttaaatagcatgtactcttgttgtacataattaatctcatgattttattactatttcataattttgcaagttatcttttgttttacattactattttttgaattgttctaacacgaaacactatatttttcagagatggcatgtcaggatacacctcagttgttggacccggcgatagatcaccgacaccggtctcaccttactgcggtgcagggggctcagcttgggacgttccgggcacggacgtgtggtgagctactcacggttcacgactcctttgtcgagaggtacgaacagtgttttactataagttagttgcactgtaataatttttataatgacatattaatttgttattgcaggctacgtgaggccggcctcctaccgatgtgtcggctggtggaggctgcggccggcgacgcggacccggccagacaatggactgtggacaggtccctcctagcagctttggtcgatcgatggaggccagagacgcacacttttcacttgccgtgcggtgaggtagcccctaccctacaggacgtatcgtacttgttggggctaccgctcgcgggagacgctgttgggccagtgaccacggctgtggactggcaggacgatctgacggcacgtttcgcactagtatagcgcgcaccgcacctcctgctcgagccgttggcacaccaccgcaacaccggacctacgaagaggtggctgcttcagttcaccgtgagtgtttttgtaccgaaatgacaatcgtattacatatttaatccgcagttaaggtgcctaacattttatcgacggcttgcaggttgagcagctacaggcggaggccgacgagtactcctacagccgatgtttggaggcgtacttgctctggctttttggctgggtgatgttctgtggcggtcacgggcacgcggtcgacaagggactcgtgcactacgccaggagcatcgccgacgccgcggtaggcgaggtgactcagtggagctggggttccgcattgttggcggctctgtaccgtgcactttgtgagtcttgcacgaagacggatcccagcgcgacctttggtgggtgccctctctttctttctatctgggcagctgagaggattgcgatcggccgccctgaggtggaccagcacgcgtacgaggagtcactgtacgaggagcgaccagaggtcgactaccctacgatgggtactctgtggtgccgtcgtcaggtacgttgcatcgatcttatcgtattgttaagttaattgctaagttcattgtacatcacatcgatcgtctcgtattgcagcgccgatgggctcacgtccaagttaggcggtcgtatcctgagtttgttatggagttcgaccgccttctgccgactgacgtcgtgtgggagccctacagtgccgcggctacccaggctcgtgcgccgttgggtctgtccacactctgcaccagggaccaagcgtactggatgactacggttccgatggtcttcgacatctgcgttgagcctcacgcccctttccgcgtgatgcggcagttcggcttccgtcagccctttccagtactgtttccgaccatcgtcccagctgctgttcaccggtaagatcttgcactacgctttccgttgttgcattaaaatctgcctgttcacaataatttgtaacatctgtcgtttcacactaatattacacattaattcgcaggtactcgcgcaagggtcagcagtcagctggtgactggcccgccaagttggcaacttttgttgaggactggttgctcgcaactgaggaggtcgtggaccacgagggagagccacacactgaggagtcgtaccaggcctacctacgctggtaccagccacgcacccgtactagggtcaccttcgctcccttggagcagcagccccacgttgcgagcactagagacctctatgccaggcaccgcgaccaggacttcgctcgtgctgtgagtaccctgcatcgcaccattcctttatgttttcatgtctttctcttcgtcaaattttacgaatatttacgaacaaattaatcatgcaggtcgacgacatcaaccgggtcgtcgttgacggttcaacgacgatccaacgtttaggcgcggggattccggtacccgtagaggagcacctgacgacgtacacgcggatggtggagtcgatgcgctcgattctccgagtgctcacctgtcgtgcagacgacattgctcgggcagacgcagctgtacagcggccacccgtaccgactggtccccgtccagctgcgcacgttcctaggccgactccccctccgcacagaggtaagtatttttattactatttttgtacatgcctcgcacatataagtgagccgtttcacttgccgattgcttcagggtttcgtgcaccgttcagcaccccgccttcctcggctaggccttctgttgtgccccccacaggtacttaaaaaaacaacattacttcaacaatcaatttacatacattttatgtcttagcttacaagggtcccgttgtcgatgtgtaggtttcgcccagtttgctatgacgaaggccgcccacttctcccaggctgcagggtcagcgtctcaggcagctgtgtcaacctcgcactcagcgcagttctggcagtacaccgggacttcgtcacaggcagccggcacgtcgagtcagggtccaccactggaccatgctgggacctcgtcggaccgcttgctgccttccaccttgctcttcgacatcactgattttgacttcgcttcaggctcgacagaggacgtcattggcccctcacagctgggaggcgcaccgccggtgcagacgcaggaccaggcgcaggccactcctccgcgggacactcgtgctacccgtgctgtgccaccggatcgtttcacctactcccaggaccacgtgcgagcacaggcccggaggaccaagcgtggtcgcagcgcggggcagggccagtagagcagtcttctctttgtttacttgcttcactttccagtactgtatgcttgtgtaatgactacgttgttgttatatgtgcacgatacctttcggcgcatgcacgactactttctgccgcaccgatgcagcctcctttattcgcgtgtgatacgagtatttgcccgccatttagcgcatacgaccaatgtaactttcggcgccgatcatgcatgtatctttcggcgccaatcaggcgtacccaccataccccaccacgttcacatgtcaggggtatcactcgattttttgcgcctatataagtcgccttaacgagtgaggcctcacaatctttcagaactcaatcacattcagtactctcttccccacttgcttcattacaaatctgaccggctttcgtcaatggctagacgccggggtgttgaggatccaaactggcatagcgatccttgtgtatacctactaccaccttggtgccagcgtcctctctgcctatgcggtgatcgatgccaactaatggcttcgaggaatcctgatattcgaggaaggcgcttttttaggtgccctaactatgaccgtgaggtattttattatctgcatatgcttattcattccgtatgggcaatcgctttattcttcgtaacactactctattcggcagacccgcactacggcttgcgcatacatcgagtgggtcgatacagaaaatcccgttctcgacctaaccacttgtttacaagaaggtcgctggtatttcgcatccgaaagtactgagcaatacttacagagaaaagcggcttatgaacgacaatgtcgtgaacaacagagcgactggcgggtgctaactacggcactccctccatgggaagcccgtccaagatgcaggtgtggtgatcgttgtcaggttcttcgttccataaatcctacaacattgggtcgaaggttctttgtttgtccaaatattcttgacgacgatttcatggtaagaatattttgattacatgaatccttattttctcacaacatttactaactttgcttgctttacatctattctttcctcccaggaaccaccaaggagatgtcaatacagagaatggatagacaccagaagggttctaactccacctagccgtgttgtgtagcttgaactaccagagcaatacagggttactaaagcgcggtttgagagaggagagggatcctcacgtaggggttagctattatcggacaacttggcatattgaaatttctactgtcatgcttccttgtcccattactacatcgtcgttgtgttcaactattgcactacctccctcctagttcgaatctaatatcatctatgtaaccgcaatgcaaatagtcgtatcatgttcaaattgtactactatttcttcatgttacataattctccttgtttaagtctatataatgtttctacgacccagactgcgataggcctatataaattatccgagtactaatacgtcgaataaggtacaaaataatacctcacttaacatatgaaattgcgcaacaaccaactttaatacatttttataacaatattaacaagttttaccaataaatacttctttatttattattaacataacatagaaaaatcttttggccgtacttttttcatctgggtagggacccagatgaaaaagtacggccgcaagctctttgggcggcaagggcctaatcgcaattttggccgacggcggcagacggcgtggtcgacccaccgtctgccatgtcagcttgccgcccaccattagggcggcaggggctatttctgcaatttttttggtcgatagattatttctgtaaatattaaaaaaaaatctaaaaacgaaaaaaattcgaacaaatgccacacggaaacaaaaaggcccgttcatctgggccgatcttgcgtggatttcagccttttttcggccatgttttctttgtttggaagtctactatacctcccttaacttttgctcatgtttgaatcaaaaccggtgcaaatcgcttgctttagtggtttgggagtcggtttcgtcctacgtggcatatttgaccttattgattggctgagtcagcttgtgggtcccacgtgtcaaccggttggtggcaacgtggtcaggagcaggaggtctagttggagaaggtttcggtgccgcctctagggatagaggcaaaggcggaggtgggaggggcgatgtaaggggtgcaaaggagaggtgagggaatggcttcggcaggaagaccacagtcgctggcggagaacgagaggaactgcaatgcctagtacgtgaggaacctttcccacgatggcgccgtggactcctccggcacacatggctggacgacgagctcctccccccgcgtgcatctggctagtgactcatttcactggtcatggcccaccgggagctcctccctctgtgcgtggccggccggcgagctccctccccagcacgtggctggccagtgagttcctctaccacgtgaggccgaccaactccttcttctagcacgtggcctcccgatgagatcctccccctgtgcgtggcctcttggcgagctcctcccccgcatgtggccgaccgatgactcctcctagcgcgcggcctcccggcgggatcctccccttgcacgcggccggccgatgattccttctagtgcgcggcctcccggtgggatcctccccttgcgtgcggccgaccgatgactcctagcacgtggcctcccggcgagatcctcccccgcgcacggctggtcgacgagttccctccccagcacgcgggtagccggccagcgagctcctcccccacgcgcgaccttccaacgagatcctcccttgcgcctgccgccacctgggcgctgttgcttatgggaggtgagaccgtgagagaggagaatgagatgaaagagagaagggataggtgagggagaagatgggatgagatggaagccattgacaagtgggtccgaccgaatgattcagccagtcagctgccacgccggacgaaaccgcctccaaaccactaaaggaggcgatttgcaccggttttgatagatagaggagacattatactgggttttatagttgagggatgcgattcaaccaagagcaagagttatgagaggaaatatagacttattttccttttgtttcgtttagccttaagttggttggatcgcttgttactatcctgacctattgggcctttctcaatgagcactggtcgtctgatccagccagaaccatatgtttactatgttttattttttatttttaataaaagaaacatacttcagcagaaaatagctactaggtgaccgaacttgcattttggagaccattattttgacgtcagaatgacatatacctttgtaaccggacagagagtatagtagcagtagctagtattaatcggcacaaaagcgacagcaaaaaaatcattgaaaagtatgatacaagcatgccagccataaaaaatgagaccgatacttaatacttcacagcgaaatgcatttatttttcaacgtacaacaacaagcagccaagtccatcaaacaaaggcagacatttcgatcgatcgacgtgtgcctcccccgttcgtctgaagaaaaaaacgcgagaaaattgcaggtttcaagtttcagcgacgccgatcgatcgatggattgcgcctgcgccgccgccatggtcctgcaagcgaaggcaacgttgaattattggagatggggggaggaaatgcggcgagaacgacggctccaatccaaaaccatttgacaatttttcagggctctgacgaatctccgaaaccattttcacaatttttcagtcttgacaagcactacgtataatattcagtcaagaattcaagatgatcttatttttcgttaatactacctctgctgtactagtcatccatttgagcagtatgtatgcgcactaattcagctggcaacttttgtgcgtctagtggaagtgcactaactgtctctcttgtgttgccgtcgatccaacagtcaacggcactgcatgaattatttgaaaccaggattaagaaaatggatgaatagcagagagacacgattttaacagtaacccgtttgatttaacagtaagaaaaacacatataaagattcaggacatctgcttttagtaagttactgctccacatttgaacacatgataattcacttcacaagcaaaagctcatttcagtacagacatgacacgatgacaacaaagcatcatcaatgtactacaaagttaagtaggcaagcaaagggccaaaagcaatgcacgtcctttgtacaagatcagggccaaaacactagtgctacagtccacatacttgtgcactgcccataacctgctgctgtctgacgatacagtagtgatacacacatgcaactgcaaaaagcatgtcttttctttcatctttttttaaaaaaaataaaaaataaaaaaaatcatgccataatctcagtgtcaacaagtgcaagcatcactttctccacttgattttccaggatcaaatcctaacccccactactaattccccccctcttcccaagtcctaatccactaggctaaagctgctaagctaagctaaatgcagctgattcccaagttgaatctatcacctgttcatccagcgagatgtgcagagtactctatactagtacttactactagtatagtatagtacatagtacgagatgttgctgtccggtcttaattaggcttgcagagaaagcacatggagtttttaacctaatggcccgcctactaatcctgccccaaagaaacctcatcgccattggcgaactcctgtgttaactacgttatctcatgtgccgacttgctgacactaagccattaagataatttagctgttgctgccatgcatatcatcgctgggacatagtagtagactttgacgccaacgacgatgtcgccgccgccgcagcagcagcagccggctgctgcgacgtacggtttaattactgctggaatcgtcgccggtttttggccatcctggaggcttctgcttctttgatctccgctgactctgacgcatcccagcatcagcagaatgggcgtgcgagtttgcaacgagccgtgtacgcaactaagtgtcccctctatttcttacaaacacacgatcagctgacaaaaaaaatcagtaaacgatcagctgatcaaaagctgtatcttgcagtgcagcagagagtctagatagggttaaggtggatatatgatattcaggatgcgtttagttcctgaaaaaagttagaagtttagaaaaaaaagttaaaagtttatatctgtaggaaagttttggatgtgatgtgatgtgatggaaagttggaagttaaggatagttgggggtgaactaaacacagcgttagatatttcattttttgcagtggatgaaatgatcattaggttggactgatcacagcgtgttcttcctcttttcgtccctgatctttgcttatggtttaagactcctgggaaaaggcaagaatgcaagatcgatggagctctcagaaaaaaaaacgttttgaaaaaaaaactgaacttctgaagaatggccaggcaagatctcacctttccaaaaaggctccttttacggactgtttttaaggtttacatgattcaaaagatgagctaaaaggcggtgaaaattaaaggaaaaaacaagaaaatgtgcttgcgtggctgcttgtcagactgtcaaccagttcgtccttccgctgctgctgattgccatcgctgccgacgcagctccatgtcagcctcgtggatctttcgagtgtaaagtcatcacctaccacttcttgttacggaatgtggcacaagcacccatccgatccgattcagctctgaaaggatctcctgatcggtctcttctcctaccaaaggggggtacaggtacaggtaacaggttacagcctgtgctgtttcagcacaaactaactttctttctttttttaattcagcaaatgatctgctgctacctgctactggctctcaactttggttggttggtcagattgattggccacttctttctgaaaccaatggcatgcatggaactttaatttccttggaaaaattttcgtcagttgaaacaaaagaatcggtttcgaacaggggacagtatcttccagtaggaatagttcaatgaaagcccccagatgtggagatgtagacagaggctcatcgatcagaagattcagaacacaacttgcaatagaaatgtcaatactattactggctttaattgcagctcccctccaagaattttcacagtttcagacatcctcgttaaacgatggttgtgacttttacggtacaatttactggcagtatatatttccagtacgaacaaggatgctttaaaattttgtcacaaaattgaaaatgacatttttagcaatttcgtactttagtccctagccactcatcgaatcgtcctgtcatcgtcccgagtgagtcggccactcccttcggcaatgtcatggcagctggccatggtttttgatgacgcggcatactcatggtgtgtcgtgtgctcgtggtgacaggtggcactacggcatgcttgcggtggctagaggcggtgttgcatgtgtagactcatagtggttggcagcccctcgccacggtgaaggatgagggggaaggacaaaccaacctttacaatatatactgcagctatagtatatcataaatgttttctattttaaatagctgaatgatttttttaatcactagttgaggatgtaaacaaataaataaactactagaaagttgagaatttaaaacagtttttattttccgaaaatttcattgtttaggagctagtgggactttgaactttggtacatcgatcaccacgtcagcacctctaatattctcaaatttagtcacccaccagtctaaatttcttcgaaggccactcggtgcagtaaatactcctatctagcaaaaacttcaaaccatcaggtgaccagagaaaattcagcacatcaaccattttctgcaaaattttaaaagaagctcctggcttcctcttcagcacaagtttcttccctcaacgaaataaacttcccaagtcggcaaatttaagtgcactatattacctactggtacgtgttctcaacatcaagaacgatttcagaaagcaaagctacgtaaaactacacccttggccgattgccacaaaattattctccacatgcaaaagacacagaacaaattgagttctacaagaaagggatgacacgattttgcagaatttgcaaaatcgctttagtaagtagtactccctccatattttaattaatgacgtcgttgacttttcgaccaacgcttgaccattcgttttatttaaaatttttgtgcgaatatgaaaatatttatgtcatgcttaaagaatatttgatgatgaatcaagtcacaataaaataaagttatataaattttttgaataagacgaatggtcaaacattaaaaaaagtcaacggcgtcatatattaaaataatatggagggagtactactaaagctcttgcagacaggtacatatgtacactggtaggggccaagaggtgaagtatttggcaaatcagtctggcaaatgtcgtccctacgcactaataccgtccttgttgatcctgttcttctcttccatgacagctagtaccagaccaacatgatccaaaatccaagttattttcaagtttggtcagatgtagcttttcatccgatgtactcgttttcttctagtcatattttgagtgttttttcagttcaacagggtgtaagacagctctatctataaaagatcgaaatgcggatttttttttttaagactgttactcttgctgctaccttttgatctactctgtttatcaaaaataaaactaaatttgtgacattcatgaagaacttctccagaaactagattcgtggttgataaaaatgaggtgcttattagttctcgctacaagtttctatattgatgctacctactacctacgtcctaaaatataagcatgtctagtttaacagctaaaaaatttacattttaaaacggagggagtatgaaacaacgaaaggtaacatttttctaagacgattactgttgttactactgttttatctaggtgttactatatgattcgttgtacgtatctagattcacaaaaataactttttcataaaccaaaattgtggttgacaaaatgaggtctttgttaatttttagtgtgcctcgctacaaattataagtttctaaattgacgctaccttaaaacaatgaaagccaggattttttttttaaagattgttactcttgctaccacctttcgatctaggtgttactactatatgactcaatatacctagctagattctcacaaagctttttcagaaaaaaaaaggtgatcaacaaaattaatgaggtatctagctttttgcctcactacaactataagtttaacttataggtcgacgctacctaacttatatttgaaaacaaaaatctaaaaattttttctgactggacagccacggatatgcagaaaaggcatgagccatctaaggtagttatacagggaaccaaagcagttagaccatgccaaactgctaaaaccttgatgattgtaagctagctaaaggtagacaggcaggccggcattgcatattcttcatattcctctccatcacgctaacctaaaccaaagatgcagcagcatatgagaggagagcaaaggagtaatgactcaaaagttcactttgcagatgcagcatgtgatggtcaccaccagctaagcatctccaaatcatgcatgaaaccaacctaattaagacaaggaaaaaaaaggaaagccatttcttgtggagaacctcaagagtatccctgccattcctttagcttaattgtcatatgatagtgattagttcaccaaatgctcctccaaaataaaatcagaactgaaaattaagaccaggtcgcctgaaccggcatctgtccatggctgatgacaattaattaggatcttccaaactaaagccatataaacacaaagatttttctttttcttttgggcttgcatggtttggagcttcatgggcagctctgttcttcacaaggaatctgaattggtgacatataatcctgtgtccaccaatgaaagcgaccaagtgtgtgactgtgtgagagtgtgtgccatttgctgatgctgctagagagaaaatcttagccgatgcttccatgtcggtggtccatggctactcgatcctgtgaaagaaaatgtgccaaaaaaaaagggggagagaagaattaaaagatggaacaaaaattatatagaaagaaacaaatttgtgaaacaagtaaatcagataaagaaaaaccaggaacatgcgtgataaataattgcatccaacatccatcgtgcagagagctattgcaccaaccatatcttatccttttttttttcttcctctctctctctctatctgtatctctggcgccccacttactctgcgtccaaaattaggtttcaattcatcaagcactagtgataagtgagcgagtgacaccgaaaatgctgtcgctgttggtagtgaagcggtgatgcgagcgcgatgtgtgctaaatcatccaattgaatcaaacgtcttgttttcgaggaaaaattggcaaaaaatgtacaatgccattaccaaactaaagttgtgataagctagctatacacttaggcctccttttggaacaaagaattttgtagatgagtttttgcatgatttgaatcctattcgatcctttggaacaaagaacaaggttcaggtttttagaattctataaaatttctttcgaacgactcgaaatatggggattttagagaaaagttaccgtaagaactcatggggttttaacgagtctacatctatctctactcaatttcttgttcttttccttgcagtctactcaaatggctatctatttatttttattgtgtctttataatatatttatattaaaatcttatgtttttgttgtttctgtattctattttcgctacgtttaaaaggagccctaacatgatatgtagcaccattattcgaggaactctcgagtgcccggatgaactagctggcaggtgaataattagatttgcactatgaatcattagatttgcactatgtttgtatctatgcatgtaaggaaccaccggttccaagcattggcacaattagatggctcccatcatgctagcagaggagtccctgttgttcttgacatctatctatctatctatctatctattatatactaaaagtctattaaactttctataaacgctctcatgccgccacatggcgctctaaaaacgctctcaagctgccacatggcgctttaataaaatagagaaaatattagaaattttgagaaaaagaaaaaaaatctagcctcgattttcatttaagttggtggacccattaatttacaccgtcagattagattcattataaatagtaatatatttctcctaatttatcatataatactttcctaaaaataatggccggaataggccaagaaggcatatacgtacgatggtacgagttaaaaaaaacattgccttttaaactggattttcacttcctgtgtattttttccatgaaggccaacgttaaatatttggtgaaactaccaaaagaaaacaacaattttaaactagatttttctattatacttcctctggatatttttgttttctttatgatgatcaacgacaaatatttagtgaaggtggtagtataagaaaaatatattacttcatataacacatacacacccaaaaatagatctataatataatataaatataaaaaacgtatcatttcatactacaattgttgagtttagatagattttatttgcatcaatgggcctacattgatagttcaagatgaaataatgagtaattaaaatattactcgggacatattgtcagaaacacaaataatgaaacacaaataaaaaaatgtattgtttaaaatatgccacattttttcttgcaaaacacagctagaattttagccgttaatgactcaagtaatctatactttttgatttgtacatatttttaaaagtacataagaaatttaaggttgagctctaaagtgtttatcagattggctctgactcatttatcttgagtatgttctccgaatttttgcaaatactttctatattttttaaaaaaaaatctattttcatgtttgtaatatttaatacttaattaatattacgtagatgacctacatcgtttttcatgccctacataagctcaacaaatgagatagaatgtagcctaagtaggagataaattagattatttactataaaatttaatattaaaaatcaagttaactacgttattaaaaaatccattactttggatcatatatattctaaggataagctattattcactaatctatacatttttaagaaaaaaatcaaatacgttttgttgtctccttgctatttcttagctactaaagtaaaatagaaacaatcaataatattggattttttttagaaacgcagcacgcgcacaccctacccttttgagtacctccaaaagactgagccgacacattttgagattgacgatgtcaccgcgggcgtctcgctgtcgacgggtatgtcacctaccattgaaagaataattagccgtaactgcgagcacccgtgtcaagtctaggacttgaaccaggtgggcaagttccaccacaagaaatctaaccaattgagccgcgctcacttcgcaatagcattggatattaaaacaatcataatttttaagttacattactggaatacttatatgccttttaaatcggtgaactattacttacaaccgttagatctatcttatataaaagttaagcatgtattcatggtactggtacatgacatttccaaaatattattgtgcaattatatttcgtcattatcgtattcatattaggttgcatggagcctctcacccaccctacatgaaatgtttatagatggatcacctctcaaactacatcaatcgtattagcctatataaacccatacatttagtggagattcatgtcccatccaatttattatttaatgaactattataatagatatgcaattaaaaaacactttactttactttcattaacatgttttctaaacaaaaagtctactttattttcaaatgataaaagaagattataaataattgcttatagatattgcttaaatatgatgttactaacatgttagaaacttattaagcaattaatgctgatgaaaacaatttatggacaaatcacggcagatgttctccgtttaatatttcacttttatacttatctcaaacttagcgtacgacgcatacccacgtgaatgtgcaggctaccttcctagttttgtccgaaataaccatttggcatttcttttctgtttctatccccaaagacaattcatgcacaattaacaagagaatctgggggaacccccttgtgtgttctaagactggcatgccatgtgcaggatttgttgtgcactgaaagggaagagaaaagatttcacttgtcaggcacagttagtgacgtgacctgttcttaatcagtagcactattacacatcagaatgctcaccaatgagcctgaaatcctggatccctacaaatatgtgctcaaaatgatgctcttgaggaaaaggtattcaaacacctaccggttagaacaaacaaccaccggtttccttgtgttgagttgaatagtagtagcactctactcacagagttgtcaatgtgagagaatagtagttagtacatgccaagcatgcacacaagccggcaatgcttttgagtcactgacacatatgaaccaaaaaacaaaattgccttctctgatctgatctacctaagcacattccttagagtggaggatgccctacttccatccaattgtcctaatcaccaatggctaattaacaactagccaaagcattggtttaagaactaattactataaataaatctcctacagttgaagatccattagctaagttgcccctactgatatgtccaccactcccccattatgtccccatcagccacaatatataaatcaagattagattagtgaacaaattacatgtatttaatcttgccatcacctaagctgagctgagcagagcatgccggcataaatcattgacatgtggacaaggccaactctttatattcaaaagccttcaaacaaaccggccagcttggcctgaccctaaactccagctaaaagttcataagctgagctatcacattaagattattaatgatcattatcgggcaaacatcatcagagaagagaaaaaagatgactaacccataacgattaaactaatacataagattatgtatggataaagtaaatctatgggtatggtcccctgtaaaaagccttagggcctaaagacttgaaagtaacagttttcagcatttctggaatgcatgtagtgtttcttaaaacttagatcttatattggtccttttaaattctagttttatatttaaaaatgcatttgtgaacataagatttttcttttcgcatctctttaaagggagcaaaataaaacaataagataaccaaattaaagcacgggagcacaagccaatacaagaaatgggaaataaacactattagtgcgcgaaaattagctcgtagtctttttctatgtccgtgtttacgcattccgattttagacacataaggcatcacaatttctattgtaaaattatagtaaccattaatgccttaacacttagtggaatatagccagttactaaactttaaactagaaaaaaatatagtatattcgtatccatcgttttaaaacattaaaatttcaattgttccttatagaatctacgtaagttgttatgcttataaaaactaacaccctagtccgccgtcctagagaaagatgcagcatgatgagagagccatcctcaatcctcatagcttctcacaaaacgaagagatgtagcaagaatattctctacaaaagatagaaccttctctatccatagaaaaataattagtacttatagtagttatgtaatctgttatatatatgtatatgtctttgccttatacaaaatgataagagaaaaacatatataatttggcgtgtctcattacaattacatgctctagttaattagaacagtaagagaggaagtgaagaaaaaaaaaaggaaaaagaaaaaaaaaagaaaatgctcggtgaaggagagctttgacctctccaatggaggagagtgtaaacaagctactctacctctcctcaactactacttctcccggccggcctggcctgctagccggcggcggcggcggcggcgcgtggcgttcacatgacgctgcaggcgttggggttctcgtcgtcgaacatgcggtactcgtcctgcagcggcggcgcgtgcgccgtccccggcgggctgtagtagtcgcggtagtaggtgtccggcgacgagtgcgggtacggcatgtacaggtacgacggcgaccactgctgctgcattgcctgcggctgcggcgacggcgacggcggcgggtattgctgctgctgcggcggcggcgcggagtacgccggcggcggtgggtgctgctgcatggagtacgccggctccggccgcggcgcgtagtaggagacgctcgtcgtcggctgcgccatgtggtagctcatcaccggctgcggcgcgccgtagtacgggtaggggtagtgctcctcgtgctgcttgtgcgccgccggcgtcggcgagaagtgcagggacctctccgtcgttgtggcggcggcgggtggcgcggcgtcgccggcgtccttgggcttgctcttctcgtcctttgctccttcgtcgtcattgctagcctccttcaccgccgccgcgggaacggcttctttggcgggttcggcgccaacgtcgtcgcccttcgccttcgcctccggcgccgcctcgctctcgccgccggcgtccttcttcgcctcgtcgcttggcttcgcctcctgctcctcctctttcttctctgcttccttctccgcctcgggcttctcctccgtcttcttctcctccgagctctctgcctgcgccgcggcctccttcgccgccgcagccgcagcatcactacccttgccgccgtcgtcgtccccggccggcgcagcctcaggctgctgcggcgcggcctctatcgccttgaccgcctccggcgccggcgccacgtgcgggtgctgccacggcacggcctgcttcccggacttgtacagcctcttgacgagcgtgtcgccgtccaccgtgccggtcaccgtcaccttgtgcatcgcggcgtccaccttcacatccttcacgcctgaaaccaaacataaaaaaaaaaaaaacaaagatcatctcagcatccccgaatccgaatgcccgccgccgtcgccggcgaagcgccgccgcacgcacgcacgcgcgccacgtaccttcgatgctcctgagcaccttcctgaccttcttcttgcatccgaggcagtggatggacaccctcagcaccacggtccgcagctgcaaaatcacccaaccaccatgtcagcaccggacgaacacctacaaaaccccaactccaaccatccacatcggccggcgtcgcacgctcacctgctgctgcgccgcggcggacgtcgccggcgccggcgagaccgcatccgcagacgccatggatggagcgaggcggattggatggatggatggatcgagcaccgttggattggtgagagcctttcttcggtggcgttggggggagggagggagaggccgcgtcggggtggggctcgtacttatactcggtggcggtgcggctgcgtgtgtcgctgacacgtggggcccagcccccgcccgcccttctcctcttttgcaactgtagcggcggtggttgttaaggacgggggagactgtggcggctgcgtgtgggggaatagtctaccgcggagcactgtgacagtaacagtgtgatacggaagtggattttttttctcccttgttttgtacatctcgtttaaaaagttataaaaaaaactattaagatagatcaatatatgatatatcttttcgcaaacatgcgagttaaaattagacttatactgttcgaaacaaaaatagcaaatttgaccgtgaattacgcgtttagtcaaatttgttatttttgtttctacttgtataagttgaatttgaatttacatgtttatgtttgtgaagtgacatatcttatattagtctattctactaatttttttaaaaaaaatttgtaactttttaagtgacatgaaaataaggggatatccccttaagagttgaattgagttttccgtgtgatactaatattaatattattactgtttttctttaggggaaaacacacatggaaatgttccatgtgacgtgaaaagacgcatgaaatttgatagctttgtcaagcagagccttaggtcatggatatttttgttaccatgtatacgaaaatgtgtggtagtttcatcgaagacgagttctaggagaaacgcggacagagatagggggtttgacatgcatctggtattcatcttccacatatattcacttgataagattgtgctcacggacttatcttcctcgatctggtctcataatttttcaacactattaactgaagttgatggtatatcttcctcctcccccgccatttgtcatattgataccacgagaagtttggtaggctctcgactcttgtattctcttcgattttaagaattggggagtcaagctaaattctcgttgatccgagaaacggtggaatggaatggattaattggagtgtatctaaaaatgaacgggactacctatacatttgtcgacaaattttctactaaaaatttgacatatataattataatacaatcatagtgtaattacactgtaactcgtatgtaattacactgtaacttgcatgtaactaaggtgtaacttgtatttaagttttacgtaattttgaatcgttagatctattacaaaatttgttttggtgaagaagaaaaaaatctcagcacacacatatgtaaaaggatttgttcccacgcccgctatttggcttcgataagctgtatctcgaagtccagcggcagcgacgtccagtttcattgtagtcacagtgtcctcccatgcagttacagtgtaattacactatgattgtactgtaattacatctgacaaatttttggaggaaaatttgtcgacaaatatatagcaaattcgaaatgaactagaacctagagttaggttatacctaatacatagcaccaccactaccaatttgtttccctactacatagcaccaccactatcaatcttttgggcttcacgcacatattgccttccatttacaaactctgccttcgtgttgtatatttatattgatgttgatgaatttagatagatatatatgtctagattcattaacatcaatataaatatgaaaaatgttagagtgacttacatggtgaaacgaaggaagtaacacacacacacacacacacacacacacacacacacacacacacacacacacacacacacacacacacacacacacacacacacacacacacacacacacacacacacatatatatatatatatatatatatatatatatatatatatatgagggtaaactagagaagatcaactatgttctctgtccatgaattaatataaaggattctagattcattagagagattaaggatgaaaaaatattaaaatgacgcttcttaaatgggagataatttgggagtgggaggatggtttgagacaaaactagataaaaatcaaatgagaggtacaacctcttatatttatgaaaaaaataaattaaacccaaaaccccttataattgctttatgatggactgacggaggaagtaaaatttaggctctgtttctttcagcttgagattattataatctagattattgagtcagattactataagctagattgttataatctgtagtagaataagcggttagttgtttctttcctagattattagagcctaaattattgggtttgcaagtctaaagagagagtggggtggcatggtgggtaatttttcacccaataatctggaaaaaaaactcacctaaatgagcttatcagattataataagctacttcaataagttgtctgtttcttttagcttactcccaataatctggattataataatctcaagctaaaagaaacagaaacaagaccttaggcaaccaaagatgttacaggtcatgttccgtttggctaattggctgagctaactcttcgttttccacaaacatgtttccaaacagctaaatagaaacatattttataaaaaactttttcatatacttatgcactttagaaatcaaataaatctatttttaaattttaaaatttttaatacttaactaatcaagctttgaacttgtttcgattcacatgccgctgataatctcagcctaagagcatctccaacagcctctccaaccctggccaaaaccctccctccactagccaaatttggccactctatttggctggccaatggtgggccccacacaacccatcttctccatccccaattccccacacgacaaccgcacggaagaagcacgaggaggaggcgctcgccacgaccgccgctccgctcgctgtcgccgctgccagcccccgcgcggcgcggccgccgtccctcgcacacggtgcggccaccggcctccgctcgccgtggccgcccgcccccgcacggcgcggcccgctgcctccgctcgccgcggccgccgtcccccgctcgccgcggccgctggccccgcgcgccacgcgctgcgcccgccgcatcagctcgccgcggccgtcgtcccccactcgtcgcggccgctgccgccgtccgtcacgcaccgcgcccgccgcctccgctcgctcccagcttgtcggcgccgcctgcttccagccaacacgagaaaaaagagaaagaggggaaggaaggggaaaaagaagaagggagaggctgacatatgggtcccggtgtcgtagaatcaaagtagagagggtagatagagaggctgttggagtgaacagcttagtttgactagccaaatcaaatagagagttggctatacagatgtttggagagttagatttgaagaagctgttggagatgctctaacattccaaccgaacgcaactagtttgacaaccaataaacccttgcataagcaactagtgtggctgacttggcatgattagtgtccgtggcatgccttgtgattggattctgaatgattggagcaatttgcaagtcaattaagtagtaacacttatgatttacgaaaaaaaaattacagccacagattaatttgtaatagacacatcttaccccccacataagaaaatcagaaaaaaaaaaggagaaagaatatagggacccacattccactagccaatacagctgctaggttgatttacatcagctctgggacgtagggaccatatctcgagggcccaccagatgggccgggtgggcccacggtccacgttcgtctgatctcgatgacatgagcatcgcacgaaatggcgacccctcctgtcctgcacgatggatcgttgtatgatgacacggtggactgcaccaccccaatggatcatccatctcatctcccactacaacgtattactactaattattgtttttttgttaaatggctaaatgacagaattgatgaatgattgatgctaatcactagtacatccgttctataatataatataattgattttatctgttgtaacttgtctcgcaatataagtaattttagtgcgctggttgtcacattaatcaacttcaattcggatttctttctattatcttcacttaaccaattctgattaaatagggcatcttagtttttctttctctttatccttaacctctctaaaaactaaaacaataccttatattatgcagggagatagtattcaagtgtacatgtaaatgaattaacttattataaagtttaaaatggatttataatagattgtaagaaagtcatatataaaagagttattacaaaatggagtttaggaagcatacatattcatatatataattggctgtaactcgttaagcaaaggctgcgatgttatattttattatcttaaaaaaaacgtattcatccattcatccattaaggagaaaagcgaagtgagaatagctcaactggttaggttccttgtggtggaaccagcccacccgggttcaaatcctagatttgacacggatgctcgtatttacggctaattattctttcagtagtaagcgacgtacccctcgacagcgaggcgcctatggtgacttcgtcaatctcaagacatgccggcccagtcttccgcaggtgatcataggggtagggtgtgcatgtgtgcgttcataggggtgagtgtacacacgttgtgagcgtctgcgtttttactgtgtttctcaaaaaaaaattaaggagaaaagaacagccatagttttcttttccttttttcttttctttttcttgttcttcctctactcctcctagctactataactccctttttctcttgggtcctgagatgtcgataaggctctagctaccgacgactctactacactgtacaccgtctctgtactatagtacgcaggcgctgttacttgccagtgcaagatatggatagatgctggatatgcataatcgagaacttgataggcgtccttttgcccctttctgctggccattgccgtcacattcgtcagctaatagctatagctaaagctgaaatctatcgaaattttgcatgcgcagctgcgccacccgtggctgtacgtgagagacccggtttccgtggtcagccttgacccggatggcgttttcgagttcttggcacagagagacacgcagtttgctcaacttgcattctgcttgcccccctcatcgagcgagagaacgagcgatcagcattggagcagaagcagaacaggggcatgttcagtgagccctaaattctgataagcagccaattttgaaaatccgaaaaagctagaaaacgttttcagtttattttctagattctacagttatgttttcttaaaatctaaatgaaaaaggtacaccagttaagagatctagtttcttttttattattaagaaaattgtagttgctagaagctcttcaaacaaaatctggggtttaatttgttctagcagtcgcaaatcagctgcgaatatgaagcattatcttgatgaatttgatcggataaactgtccgtttcatcgtcgtctgttgatgattccgtcttcgtttatgtttgcggagcaaacgcgcgccctgcactgcatgattcgatcagaacaatggggtcagcataataatgcagaccgagatactaatatagtacaaggtgttcattagttgtggtttagccgtggtatggtaggagtgtcacacactcatcgtcagctctcagctatatatatatatatccgagcttaattagctgatgcatccgttctcgcattcaacttgcgcttttttcctgatcgctttcagcgtcgacggagacggcagctaattggcttggttgcgactatgattagcacgtattagtatttatacgtaaatatcgaaatatatttacatattggagttttgtttagttttctctctgtagcggccgggcgagagagaacggcacgcctctccctctgtttcagtttttatttttcgtgtgtgtgggtctgaatttatgaagggtgtaccaccaagtactggacctggatcgtgacatgcgtgtcgtcgtacgtatacaatgcaaccgtatagaaattaaaggggtgtttaatttgttggttacagtcgaggaggagtgtacacgtactacgaccgatcgagcagctagctagcacacgggacagcatgcaggaccagtacgtgtatacatcgggtaaatcaggtggtggtcaaattaaaagtgtctaggttaattcaagtttcatcattgacagtaaaaagcttcagaaattcgatcggatataacatctaagagcacccgcaataataaagtaagatgatatctataatacatgtacatctagcaatagactagattaatagtaaatcatgttaatagtatatctatatgggtatctatagctctctaatacattgtctcgtttttctctataaactatctccaggttagtagatacctttgctctctctcttcatttaatctcttccaagtaagaaaatatgctgacatggatctcttatagagagcctatagataactattgcgggtgccctaagagcaagtttaatagtatagcccactactaactccaaatcatctatagccaatataatagccaattcatacaatagttgcttactatactattaatatatggtcccacctgtcatacacacattacgtcttgcagtccgtgttgcagctggctacagatctgtagcccgctgctcttctctctcttcttttatctctttaaaggtggtgtttgggaaggagggactaaagtttagtccctctcacaaaagcataattccctctctcccaaacacccctaaaatatgtttatagctggcttatagcctgatattgtacccgctctaatgtaaaacaataattaaacatatttttttaaccgattggggccacatgcatgaccgggggaggcatgtgccgtgcgtgggcgcgcgtggtcgcatgcaggaggcgagtgagcgtcgacaatatctcgacgcatggaggggcgtgtgtggttcatttcgtcgcgttgatttaccgccgcggagcggagaaaatagaaatcggttcggggtaaacaagccgccgggggctgatggatctaggttgcctgccgccgtcgcgagaggtctaatctattactctctccatttctaaatatttattaccgtttatcttttaaatatgtttgtccgtttattttgttcaaaaaatttaagtatttattgattcttttcctatcatttgattcattgttaaatatacttatatgtatacatatagttttgcacatttcacaaaaaattttaataagataaatggtataaaacatgtgctaaaaaaccaacggtgttaaatatttagaaacggagggagtaacttaataactaaaaaaaatccctcgcgtttactctcaccgtctcacgacctaggaagtttcacattaagcgaaagaagaggaagaatgaaagatagaagggtattaggattgggttttgtgtaaacggaaaaataacaagaaaaaaaagaagggtactatgattgagtgtggtgtaaaccgaaaaaaaaagtgaacacggacaagaaaaataggaaaaaaaagagaaataatgtggaaagtccaacaagaaatataatttaaaatagagtctagaaatacaattttaaatttttgaaaacttggataaaaataaataaaattttaaaagaatacatacagtatgaataaccttactaataatcaaccaggattggactttgcaagaggggatcaatcaaattgccatgcactgatctcctctaagagaaagggtgaaacctactaggatccgccgaggcaaacaatcaatgataggattgaaaataatcacattgattaaattgctcaagttagtaaaaaaaaattaaaattattttaccattttaatatatcttaataataaatatataagaatataaaaatctatgatattatgtgataaaaatataacgatactagagttaaaaaaaaacaagagaacaatcgctgtatgattaattgagttttgattagtataaactttaaaagtaaatttatctgatattttaaaataacttttatatacaaagtttttcacaaaatatatcttttagcagtttaaaaaatatgttaataaaagttatgataaagtctttattttaattagtaaagaactccagttgtcacttgccattgggccgctactgttaacgtacgttgccacatttctatgtgccgaaagcctctgatgattctgcctttttctgctcctctaaaacccgatcgccacttccagaggggagggaagagacgtgttccaagctactaaggctgtgtttgatacttggggttgggaacccaactccaccgcacggaaaacggagcggtccattagcgtgtgaataattaagtattagttaatttttttaaaaaaatggattaatttgtttttttaaagcaactttcgtatagaaactttttgaaaaaaacacaccatttagcagtttaaaaagcgtgcacgcggaaaacgagagaaaggggttgggaaacttgtggaaagaacgcagcctaagagcacccgcaatggtaaagtaaggtgctatctataaaacatgtacatctcagcaatagactagattaatagtaaaccatctcaatagtatgtctacatgggtatctatagctctctaatacattgcctcgtttttctctatagactatctacaggttagtagatagctttgctctctctcttcatttaatctcttccaagtaggaaaatatgctgacatggatctcttatagagagcctatagataaccattgtgggtaccctaagaagatcaaattaaaagatcccactttaaagggttagaccatttaacttttcaggccacacagtgcaccaagaggctaataattgaagcttgttctcggggagcgtatcctatacacacaggctctcgcgtgttcacaccatgtacaccaactaaaaattatcataaaaaattctaggaaaattcatacatgtactttcaatagtattacatctacgtgcaaagtcgcatcttcaaattcattctacatagagaataacaaaaaaagataaaattctgacaaaattgcaaccttaaaactggtcagattttttgttttttttgttacagctaaaatataatgaatttgacgttatacaattgaaagtatgtgtatgattttttctagatattttggtgatattttttagttagtatgcacgtatgtacacatgaggacctgtatgcataggataatatgttgcttgttctcgagggttaactgctagcgataataaaggccataggtagagaaaactgagcgatggattatttgtttagttaattgtacaccctctgtgatataaggtgtgttttgttgtggttagaatgccaacaaagatatatttattttttaaagaacaaaaattaaagcttatgcttatcccgcttcgttaagggggtttttttatggtgttgaaattcatgtcaagcttatacctgcccccttttttatctgaataagcaacaattcatattaaaacagggtcgaaatttatgcctgaatgcttcatgtcaaaacatgtgcgaaatcattaagtctttgaaaagtaggagtaaatatgtaaggacatatatgaaaagtaggagtaagtctttggaacgaatacaaactttagataaaaaaaggggaaaaaatcctaaatttataaaagtttggggtgtggggtaaaaattacaatcgagtatgaaaactaggataagaacacattcgtctctaataactttgtttggtgcaactattttagacatggttcagggcaaccacaatgtataaaaaagataaccttaaaacaataattattcttataaagtgagatatatacattatggaaagtattttttttggataaagggagtagtatgtttcaaattaaaactaggatgtcaaccccaaaaatggaacaatcgtacatggtttactaacggttcttttatagttccttcgaaacacatgattagaaaaacggaggcatataaaaaaacagtatgtttcaaactaagatgttaaacccaaaaaagaaacaaaccgtacatgttttactagcgattctattatggttccctcaaaactcgtgattaaaaaaacagaggcatataaaaatacgttattttaataagaatgtaggtgcaaaacatacgaaaacatacgaaaatacaggaattatcgtttgcttaggctatgtgaaacagaaaaataacaagagagatactaaaatagaatttttcaagatcttgctaacttttctccaaaatctctatattattgttcatttcatacaaatactaaaggaaattatatgattcaatcctttatattcaagacctttttagaaacttttttataggattaaatcctccaaatatatatactatgtttttcgcaccaattaaaggggatgctaatgtaggtttaattaattcaaactagaatgcagtcatccccgaaagatggaagtattgaacaatcgggaaaagatgtgtgtgtaccatttccattttccttttgacctttcatactataaacaatctacgtagcaagtttgaactgggccaacagactgtagagtatcatgggctcatggcgataaataaaccgaacattattagacaaagtgtatattggtggtgtcataaatcctggtgctcacaattcgacagcaattttaaatacaaatcattaccatcctctagataggagagacagtattaaagggcacagctatactggtctgtccgtgcagtctctcgtgtgatgaaaaggtcttaacacgtttaaattgctaaacattatatttagtacgaaaacattttatacagaagttacttgaaaataaaaatctatttgtcttaagttttaataattaatactttattaattatatattaatcgttttttttacgtgcgagctaataagctctttcctaccgtagcttacaaatctaacttgcggggtaaaagcaagtagaggaatagagacgttgtgctcggtagtttgagttgaaaactaatatcttacacacgtaaaacagagcaattcattagcgcatgattaattaggtattaatttttttaaaaaaatatattaatattattttctaaaacttctttcgtataaaaagagttttgtaaaaatcacacattcagtagtttagaaaacgtgcacgtgaaaaacgagtaagaagagcttccgaccacagccttagagtaggtacaataacagactataaattagctataacacatttcgaggagataaaagagtatagagaagagtaatgggatacaaattttagtagccagttgtagcacggactccttcaagatacatgtgtgtatgataggtgagaaatcagatattaattatgtagtatatgtttgtaagtaattaatctataaattggttatagataatttggagtgagtagtccatccatcctgaaaaaacaattttaggactggatgtgacatattttagtacaacgaatatggacagagatacgtctagatttgtagtatgtgtcacctcctgtactaggttgatttttttataggactgatgaagtagttggctatagttgctcctagagagtgtcagatcaggaggaggcgcacagccggatgcacctggatgcagtttgatctcgatcgatctggttgactggttgtccgcatgcacgcacctggcccccgtgtacagagcgccgcatgcggcacgcaccttccacgttgcggatcggagtcgccacaaggaccgtacgcgcgcggacccgtgaggccgtgacccccgtcccaagcgagtcctcctacgggtctgtttggcacatctcaggctctaactccacctcttctggagctgaaacttagccaagcagttttagctccactaaaactgagagtggaattggatagagctctctcacaaaatgtactagagttatgaaactggatttagacagctccagaacttcactctagactcaactcctgaagttaaatttagaagttgtagctgtaccaaacatgccctgctccaccaactcctcctccttgcggtgccaagggtcatcagctcatcatccaagcaaggacgtcatcccagacgcgatgcatgcaagccacggcgaaattcagcgcgaccggattttgactgattaatcagctgcagttcgtagcatatgcgtgtagtatgtgcgtgtgctccgcgctaaactcatgcatttctgctttcacgtgacggtagactcctcctggcatcctgggccctggcctgtccgtcagccgtcagctttgaattgaaacagaaatggtagtagagagaccttctacagtctatacaaagtccccctgatgttattaattagatgaggatttttaccgtccagcaactaggtgtggtaccgttacggtaccgtttgctggccgttcgatcctggccgatctaacggctgatattagtcgggactgaccggtactaactcagcccttgattttgtaccgcacggtggagaagggtggaggggtaagattgtattttcgcgtgccatggtcggaagaggcatgcagaaaaccctagaataggattcgatgtcgtttcctggagggttcccgacttcggcggcggtggcaaagtcgatggcgacggcagagtggctccctgatggccgagtcgttccccccgcagcgacggtgatgcggccaaggtggtgggcatcaatttcgttttccggtggcgacggagtcgttcccgacggcggaggctgcaacggtgatggtggagtcgctggcggcggtggagtggctccctagtgacggcagatgagggcgacaagcttttctctctcgctaacataatccgattcccatcgtaacctccgtgtaatcaacggctagatttcatctggtaccacccggtacatttcgctggacagaaacaaagctctaattagattagttggatccaaatcattacaaatatattatgtttttaaaaaataacattattattcatttatatgtatccatattatacgaacatgcatataactaaaaccatgtcagtcgcatcacgttttatgtcatcatatagactaaaacacccatggacgtgggacctacattccatcttcttcctccttcctttactctttttccttctccatctctctacaccttgttgagccgaaaacatcgggttgtgaggagggtgccgacgagagagaggcaaatggggaggcaacagcgaaccactagctcccgttcacccgttggcctgcgaaggatggagggaatttagcgtcaccccgcttgagcttgctgccacttgccccgagctcctcccgacaatgaagaagactgttctcgctagatctaggttgatgctctccctgtcaccacaagctccgccatcctcattgcgtcattttctttgtggctgccgacagaaggatatggagccccaaacttaatgcctgagatttagtggcgcacgtacgacgggtgatttagccgccggtttctcgggattgccatcggagttgtgcagccagagctacgtgtatgaagcacccgccaccactatcgttgctaggcgccaccgtcatatgctctatggtgggagagagagagaggggggctagagatgtggggtggccggccagcaaaagaggaaagaaggcagatggaatcgttagtaataaataagtagtaattatttttttaaaatgacacatttataatgatatggatccaattaactttattagtttgtctaaacacgaagaaatttaacgttgaaaaccttacgaaccatacagctggttgttttggctcattgttttcattgatcgttactccaaaccaaagacgtgatttcaaaaaaaaaaaaccaaagacgtcaaaggctcaaagcttagcacacgacacatgcacaaaaacccatgtacgttcatctgcatcctcctcatcccatataatactcctagtccgtaacgacccatatgacacatgcatcggacaaattccgttgccgccgctcgatcgcgcgagagagatttgttgtatgcgcgtacgtacgtgtcctctatctcgtatgatctcacgctaaaacaacaaaaaaaccaaacagcttccgcgagtagagtagcggccaaggccatccatgtcgacgccgcaagccgcatcatcgccatgcctgtccagcagcggccgcagtcagcacacacatgcagcggcatgggcgacgtctggatttcctccgctcaccagttaactccaactcccccccatcccctcgctgaatcggacgatgactttgctttccccgatgcgcagtgcaacacaaccccaaaaatacttttattttttcgttgtcatcgagattcagaatagaccacacacggcgtgtgtaatgtaatgttaaagctagattgatttacacactgtggcctaaagttacagccactgtgatctgcacatctgaggttcggaagagctgatagctcccgaaagcgaattatccgtcttttcttatcgttttaagcttttgaatgaaataatagcctattatatgttatcaatgatgaagcattcctgatcaggcacggaactaaattggcagcacatatatcggtgcatgcaacgtgtgcaacgatgccagcaatatagcagacctagtagcctaaacctagatgtaatctgaaagaaattaagaagtggagacaaacatatgaattacatgtatgacattagtgaaagactgaaacgactgcgaaattgtttgggcttccatggctacgtcagagaaacaaactgaaccgctagccgcagatagaaaaggagaagattgcattgctcgccacgaatttggccaaaaaaaaaagtctatggctgctttgctttgcttctttcttgcagccactgcttgcgttgctcacttgctcatcaatcatcattacgcgcgttaattccgttgcgatacgggacaatatgtagctgatatatgtagttctcctgatcatcaatacgggaaattaaattggatggttagaagttgcagcagggggcatagaagaaaacagaacttcatctgaactttatactactccttttgttaatgtcactgtgtgaaggtcagatccttaaaaatcaattgatcaggttgatcacctgctggtcatacagatgtatactactggttggattattggcaacgtttgggtggtttcatcttttctgtttctggtttaattgagcacattgtaatgaccctttcaagccacttctttattttttttctgaaagtttggcgaaaaggtgtcccagttgactgagatcaggatttggcctccccattcgtctctgccgtctgctttcgaaacacatgtatcttatgggtctcatcacctgtttaggataagtaattgttggcgcatgcagcatacataaataatggcatgcctatccttgggtttgacaagaaagaaaaacaaagtgttaacgatgtgaggaggagatcaggttgattaattcagtggtactcgtccttgcactgtagctacgtcaggtgttgagtaataatccaatatataatctgggctatatggctaggagtaaagtagctggtgactgatcaggtgagctgatggtgtagctaacagcgctgtcttagttaacacggctgtttttttgtttttttttcttcgtccagatagcggatgtgtcatgtcggagagtctttgtcaatgttaattcgatcgtgggaaaagaaatgcagagagaatgattccaattgcaaccgttgatggctgtccgtgggttccaaaagtgctgtgacgtattggacatttgggcgctctcactctcatcatacagtatatatgctgcagctagctcctgcaagcaactcggtgctttgattaatcgcaacgtttatgccttgaagaacaattttgaagctaatgtgtatgattaattgaaatcgcaggacttggtctgtttggaatctaattaaccatcgtttgtgagcatctcgcctagctgatctgagctccaggtgactaaactaaatactaataaggctttatttggcatagctctatatccaagctttcattgagttagatactcctggctccacaaatctatagatatagatatagacctacaattacgttaataataattgcaagaatcattttgttcttagtttagatgaaatataaaattttaaatgcaatttagcatacaaacttcaaatccattatgaatctggagctatggcaaatagggactgaatttaacattaaatcatcatcgtattgcaaagtgagcgtagctcaaccgattagattccttgtgttggagacagtccacccagattcaaattttagattttacacacggatgctcgcatttacttcagaagggtttgcatgtgtgttcacaggatgctcacatttacttcataagggtgtgcgtgtgtgttcacaggggataagtatgcacgtattgtggacatctgcgtttgcaccgtgtttataaaaaaaattatcatctcctgccagtgggcgtacgtgtgcttgtgcacggtagcacgcacgcacgcaggcgatcgacgatccgaccgaagcatgtgcgcgcgcgcgcgcctaacacacctaactcgaaccgatgggttgtcgacctaacacgtacgtgattcgctggtgcaacctaacctcgtgtgcaaaattaaccgcgacgccgcgcgcgcgcgcggcgtacgtggagaattacgacgcgccgatgcgtccgctcgtgcgccggagcggccgccgcgcgaggcgagacgcatcgccggcgattggcgtttgcattgccatgcgtggaaggaagagagacggggtgaggtgactcgatcgatcggtgagcgaaatgccaaattactgtgcatccttgagcgtatacccagttaccaccgcggcatctcgtggtgtgtgtggcgaaagatcagatttttttttgttttgttttgttttttttttcgcgtgcgattcgatctagaacatggatcttacagtacataccacaacgtgtgggctggctcgacgatggagctcagctgaggcttgtcaccagctaggttgtttcgttgggccgcggaatatcgcgttcccgtaatccaagcccatctttgtctgccgtaaatccaagcccatcttctcaccagctagaaacacccgcgcgccggcctagctagtaaaacgaggatgcgcaatgtggaaaaagtatatatgagggcaatgtggaaaaagtatatatgagatccctcatcttgttatccaattacaaaataatccctcaatcataaaactagatatatgaaatccctcgacatacaaaaccgggttactctgggtccttaggtagtattgatcccggtcttgtctgacgtcgtggctgagtcagcgtgggacacacgtaggccccatatgtcagcatgtccctcaatcctctcttcataactaggatcgacttctccgacgtggcgtggacccggcggcaccgaggacaaggcggtgagcggaggtgcgtgcccaggtgatggatgcgctcacaacccactgttggttcgatgcgcactacccgcagttcacttcggagattcgcgctagcctatttgacaatgccgttcggccgctcttcacgctcccgtcgacaccaagcaccgcaactactatggacccaagaagcccttccacagctacatcgacagcctctcgggccttgatgcctataagagcctctcaatcattgacgacctcaagcctaagaacatcggcgccttcgctgaccttgtcgctggcctgggcttcctctcccgctgcatcttcggtcgctgtaatgccaccagttcatccaccaccacctctctcctcgatggcttcctcttcctccgctaggagaagggcgacgatcggcggagaggtggtgggcggcggcaccgagctcgaatgctgtggggaggtccagggacctccgctcctatcgctcctcctccgctaccacgtctccctccgccgaccaacgctgtggcctcgacagccattcctaccccgcgtcgctcctgcgccccctgacaacgggcagtggctagcagggagaagggcggcgcagaggagctaggcagcagcggcaccggcggagcacgagcgtggtgatagcatcgagcaaggtaccgaggtggcggaggacggcacagcaatggcgacgcccatggagcgagccaacgagatggagagtcgtgcggccaaaaagcggtggagggattgattcgttggcagcggtgatgctggagaccggcacagagcttcctccactctctctcttccctcaaactcttcccgttgccgctaggccgtcgacgttccttggagccacctaccaccggctgccactccgatccttagcgccaccgcagccggggccacctcccgccgccgtcgaggtcgccgacagccgacggagccacgccctctcctctgcgcttcctccctacatggtgcaagaaagagaggaagaagagagaaaaggaagaagatggggatctaagccgtgggcccaactttttattattttattactttttcggatcaaactgtcacgtaagcgtcatgtatatgtcacgtggaacgaagacctagtcaaaggagccacgtaaacgccacgtcagtcaaaaccgaggacaataacaccgagagacctcgtttgcagtggttttagaaattggaggatacgttttatttgattttttttgattcagggacgattttgtaactcggtaacaaggtaagggacctcaggtatacttttgcctgcacttgttgctgggtcgggctgtaacttaggtaagggatctcgtttgcagtggttttagaaattggaggatacgttttatctgatttttttggttcagggacgattttgtaactcggtaagacggtaacaaggtaagggacctcaggtatactttttcctgcactctgttgctgggtcgggctgtaacttaggtggagcttggagccgggggcctcttccgcgtttgggcctgaggcaacagcatatctccgcgtccgggtgcaacaagcccttgccggggggccatccgttcactcgtgtcaagcataaccctcttcttgatgaaataaagggttttattttcacaccgaatttggaagtagattgttaatttgttacactatatatgttgatgtgacctcacatgatcgatgtcttcgcctcctgttggttacatcatgtctacatgcgtgtagtacattagtgtttatatgtctagatttcaaataataagatttgtttaattttatattagattgttatatttcatgacgaaacatgttatgtgttaccttttcaccaactcaatattgaaaaacgatttctgtgaaaacatcaccttttttaggcggactaaaagaaagcccatatgtaaaaggattcgaaaaactcccaatatagacccgtttataaaaatccattttcacaggtggacgtcttaagaggcatgcctgtgaatatttgcacccgaccggctccatctcttttctttctcctgttaagtcttttcctctcctctctactccatagccctctcccccattttctctcctctcatccatcgactctccttgacgaccgacgatgggagcgaccagcaggcggcaacgcgaggggcagtccaccattggaggcctgcgggaggagagcgttgctgatgggcaccagtgagtgccagtgccataatgggcggattcgccgttgatgactaggtggtggtagtggtgcctcatctggcgtggcggggaggggcaagcacgacaatagcggcggccataggtatcatgaaaaaaaatgtcagttttgcttctagctaggcaatatttttttaacctaattttatgtcttacatctgtgttttcaatttctcagggattggtagctcagtgattatagataaaaagcatttttcttagcaatgtatgatgccattttctttgtacaaacagggggcggacaaagacttattatataatagaagtcattttccttcccaggttttttcttattaaagggacatatgttttcaagtctgtacatgttttggacctcatggttcatgtattgtttaattctagttaaatttagtaaaatatataagtcaagaatgtttgttgattactcgaatagagcatatttttattttacaacgtcagctttgtgcaaacctattgtaaacagttgctttctatactgcagacaagtacgagtctaagcacgaggttttactcctcatgtttgttgattggcaactattttttttttcaattttaaaatagtgccagcgtgtgcaaatctagtcaaatggataaaaatatagtttttatgacgtatgagaaaagtataatttctcagcctttttttcataaaattgattgaattccaaagggaaataaaaaaataaagcctataaagatggcttttttgcgccaaattttgtgcactttcattgtgaatagcaggccgggaatatttgaaaaattgtttgcatttcaaaaatgttttggaagttttaagctaatacgaatgaaagttcatttattatatttaaaaaaaaaaactttccacgtctcggacaaaatatttacgtattttcaaaagaaagttatacttctatataatctccctatccaaattttatgcctaccataccccatccctgaaaaataaatggatagagaacaaacaatctttttttattgccaggatgttctttttgggggacgcagattcagtgacattcccccgtgacattttgagtcactgacatgtggaacccacatgtgctgggcccacatgggtcccacacgtcagtgactcattgtcacagggtatgtcaccagagcaatgtcaccgaatcccaatccctttttgggccgggtataaagagaaaatcaatgagtcttcttttttggctgggacgtgtgtatgaaaggaaaagaaaaggtgcacacacactccgccgccgcaactagcgcaagaacgagagagagatgtgtggatagggttcagtggatggataggtttcctaaggggtattatgggtattatgaatattagttacattctttttgtattttaaatcaaaatttaacgggttagtggaagcagggtcagacggaagcttcattttggaaaaggagggtcaaataagcaaacttaaaaaaatatagacaaattagcagttagggttcaaaacgggatcatataagcaattgtcccaataattaataacccatatatattcacctttcttaatatataaatggagtacctagctaatacgcacgattgtgaaccatttattatgtgcgatataaaatttattaattctaggctgtcctttttctttttgcccttaattaatatccccgacctgtgctagctgattgaacgtatcaatgggcaatgcatacaaaattcatcagagaacgtgcaaactgtggaattaaatgttgaacatattgtgggggcaacttcctttttctttcgagggtacgtagaggagattttattattattattattattattattattattattattattattattattattattattattattattattattattattattattattattattatgcagcttgattaaacatcgttcgatgtagtccagaacctcgatcagctactggctagctagctagtaatgtgccaagcgtaaataccatgcatattttgagcagctcatggcctatactttattagtatgatctctcttaaccttttgcgacatcgatccttacatataaattaaagctgacaactgacaatatctcgcaaacacaaaaaaacttgtagtaataattagtgtagcaaattaagccaaatcgatcggccaaatgtgtgtatacatatatattcgtgttacatcacctttgcaggcgcacattgagcagggtttgagacacactaatgcaacaacagtgtacaacacggttacacggccacacaatcattaataatgccccggccattaatttaatccggactagtccggccgtacatgaacacgtacacacagcacacaataatgcatgctgatatatgtgtgtgtgtgtgtgtgtgtgtgtgtgtgttcgttctccacgcgtcacacaagaaacttaaccaagccaaactatattaattaagttaactgcaagctcatcaatataatcaagcaaattaacctttttgcttgtgcatgcataatacagccatacagtactgtacacacacgctttatatatgctaaaaatcagtcgtacgtgcccgatcgatgagtagaagtggtacgcagctggcagctgatagctatggatcatcataattcatactagtgatcatggacgacagatgttaaattagctagctagttatcaaggaccttgaagtggtcgcggttcttgaggacgacgtcgtacatgtgggtggagcggaagcgggcgaagtcgcgggggagggagatgaggtcggcgccgccgtcgcggcggtggagctgcaccacggcgcggtcctcgtagtagcgctcccacccgagccccgccagcctccgctccagcgcctgcagcgaccccatcgtctcgttcgccggcacgtacaccagcctcctctgcctcctccccgtcccccccctccacgtccgcctccagctgcatcaccccgtccctcttgaacacccacacccccgtccccgccatccaactcacacggtttttttcgatgttttcgtgagagatgttgtttactgctataacgttgctggggtgggggtggttggtttatataggccaccaccaccaccacgatgacgctgctgtcgatcgccggctgcgactgcagtaaagcatagctaggttcagtggcacggcagcaggcaggtagggtctgggaccgtgtgaccggttgaccgaatgaatggatgaattatgaatgaaatgcaatgcaatggcacgcgtggacaccgggagaggataatacagataacggaatatgcatgtgcggggagggcgacccgtcaattcaatgtggggggggggggggggggtcctacggacggggtgagctggataaacagaggggatcggaggagtccagaggaacgcatcaatggcgcgccatgcatggcggtggtggttgtattatttgttcttcaacagcttcctctgatgatgatttttatgacagtctcattgcaaaatatcgatagaaccatcaccactaatagcgagtacaataacggaaaacaagagagaaggaatgcagcacggacattatgtgtgtatgagaggttggatatatatcaatgttgtagtatatatatacttatactccctctgtcccataatagatgacgtttttgactttttatttgtaacgtttgaccattcgtttttttaaaaaattagtgcaaatataaaaaaagataagtcatatgtaaagtacttttaataataaagcaaatgataaacaaaataaataataattccaaatttttttaaataagacgaatgatcaaacattgacaaacaaaaactcaaaaagacaagtaatatgggacggaggtagtaggtaataactattgtatgaatgagctattagattggctatagatgatttggagttagtagttggctatactattaaacttattaaacttgctctaatgaccgcatcgaggtttctctgacggccaaaggtggcgccaagcgaccaatgtctactgaaaatacgtttgttttgctggcggtaatcgaccgcaggggtgaaaccgttttcgttgctggacaaatatagcccagtcacctgcgaaaatattcttcacgcgtgtccagctaatgatgtgcgccagcgaaaatgtttttcaatttctaccgatgattttttggtgacagtctcattgcaaagtatcgatagaccatcactactaatggccacatcgagttttctccgacggctaaaggtggcgccaagcgacctgtgcccaatgaaaataggggcaattgcaaatttaccaccggtttttttaatattgcaaggatgccacttgaatgacagttctaatgacatttttgcaattttctagtggcagttttgcaataacgattcaaagtagtggtaaatttgcaattgccccataaaaatacgtcccttttgctggcggtaatcaatcgtaggggtaaaaccattttccttgacgggcgacgtagcccagtcacctccaaaactcaacatggccccattcgtgtagaaggtaagattttaccagcactggtggagaaacgtttttttactcccggtttgcaaccccctatagtcccggttttctaaccgggactacgaatctgggactaaagatcgctatctttagtcccggttcaaatacccgggactaaaaatcgatctttagtcccggttggtaacaccaacaccaaccgggactaaagatggagccatttttaaccccggttggtattaccaaccgggactaaaaataaagccagatccggttagtattttcttttttcttttattgttttttactttgaatattgatttcaccatatccccaaatcatccctaaaatcacagaacaaaagatcatctccaaatcccaaatcgatcgtctacaaatccaccatatccaaatacatcacaaataatcaaaacaaatacatcacaaattctaaaaagaaacatcacaaatacatcacatatttacatcgcacagatcaaatacaccacaaattctcaaaagcaaattcatcgcttcaccgctgtcacttggccgccgccctccgccaggccacacggccgccgccgcggccgcttctgccacacgcgccgcctgcaccgccgccgccctccgccgggcggcagaagcgccgccgcggctgcatccgccgctcgccgcgcgcggccgggcctgcgtcggggagggatctgccacggccgcaggggagggggaggagaggggaaggggaggaagagggaagaagacaagaaggagatgagaagatgagaagggaggagaagatgggagaagataagggagaggaggagagatgagtggatgagaggataaggctgttggtcctctcgaggaggcgcggcgcgatttttttttcgtttttcttttgtctcggttgttataagcaaccgggattaaaattggatctaccaaccgggactaaagatcatagaggggtctaacacatcttgccttctttcgaaccgggactaaaaatgatctttagtcccggttagtgttaccaaccgggactaaagatcaaaaagtgacgtcagctttttcaaccgggactaaagatcatttttagtcccggtttttatttaaaccggaattattatggattttgggcaaccgaccaaagatggtttctctaccagtgcagttttcccaaaaaaaaaaaaggaaaaaagaatgtagagctgctgtgagttggtaagaggaatgcatgcatcgctcagcttggaaaggatgtatgtgtacccaactacccatcggtatacacatccactggccctcctcccctccctgatcaccttcccactgcaccaaccatgccaatcatcctgaattcctgattggtatatccttccattaatttgatcgattcacgtgtagctagcttatagttagcccagccagctcgatcaacggcgcctacggtcatacagggccaccactccacagtccacaccaattgaggcagaggacccggctatactcgagctatagctagacttgggacatattctgtgatgatatttgacggcatcaggttcactatagcttttctctccgtggacatcgatggggcggattaggcctgtttggttcccaaaattttttcaaaaaacatcacatcgaatatttaaacacatacatagaacattaaatatagattaaaaaaactaattgcacagttagggaggaaatcgtgagacgaatctttttagtctaattagtctataattagccataagtgctacattaattcacatatgctaatgacggcttaattaggctcaaaagattcgtctcgcggtttccaggcgagttatgaaattagtttttcattcgtgtccgaaaacctctttcaatatccggtcaaatatccgatgtgacactcaaaaattttattttcggcttttcgcgaattaaacatgcccttattttggccccaaggaatcaagcaattcagcggccagcgaccagcggcagcagccgcggtcattccaccgcgctagaattgctgcaactaatacattatatcatcatgcgctcgatggatgggtccgtacgcctggacatatcatcttcgttttctcgacccactgactgtatcatcgcatgcatgcgcgttttttttttttgttttttcagacagaggacgctgacaagcggaaggccatcagataagggggggaccgggtcggccgggcatgaattattgctacactgtattaggccatcaccaatgcgtaaccccaggtcatccccctatccccctccgtccgtcgccgattgctttatcgttggcatcatctcccatgatggaacgcgtccctctgttggggggacgtgtccctcgctcgcttttggcaggggaacacagccgaggggggcgcgttgggcacgagcgtggcctgtggacacctttcctaccgaaaaatttccccttccactcctcgtggccgccggcgacgggagagagagggggagagagagaggccagcggcagcggcgagggagagaggtgtgagtcggcggcgagaaggagagggagacgagcggcggagacgatgccagcgacgacctacgcaacctcctccgccggcgtcgcggcctcctcctcgatgcgacgcggccgaagccgctccatcccgatctggccacgagggggccagatccacgcacgacggcgccggatctgccgtctccggctgccggcggcgccggaaccgaggtcggcgacggtgccggggtgaggcggcgacgagcgggggttttgccgcctccggccggcgacggcgtcggcctaggtcgtgaacccgacccagcgacgaccgcgcgatggagacgaccccgccggcgccgcttgccatcggccaccgcaagggagagagaggcaacgacgagagagggagagagaggcggcgacgagagagagagagagagagagaggggatccggcgccggcgaggtagaaggggagggcggaggaaacggagcggcgggggagagagcggaggaaaaatcggtggagaagagtagagaaagagataggagcggctgtagggaggggtattttcggattttttcagttgaggctacaggggccaggacactcattgtgagcttgagtatcttcatccagttagctcatattttagggagcacatctagagcgtcctcaattgtgagatgagttcctcggagagtgccctcagttagtgagggcatccatagagtgtccctgattatagatacccttactactactactgggaccgtgaaggtgtacccctcggtctcaaaaagaattcaatcctaactacaaagtaggatttgctttttttttaatggagtagtacgtaccaaatggtaatcggctttattttgtgatttcccttcaaatttcctagctagggttataaaatagccattaattggggatgaaaacattcagaaaatggtagcctctacgggaacggttctcggttggtcaagaatcagccatatttatcaatttatttaactatttagtgtcggtttgcaatataatgcttaaaagatttagaaaaatataattttttgtatggctggaatcggaaacgtaccacttttactgaaaccatggtcgattagcaatttcagtcaccatttttaacccctccccctactccattccatgtaaatttcaacagaatttaattgtagttgcgcgccagatctgtgatccaaaaagattcatatgaaccttctcccttttgttattctctaagagtgtgttcaggagtacactttcccagctttcactgcgcatgcttcctaatctacttaaaaaaaccttttttaaaaatatatatattggaatattgctttaaatattatattgatttttaatagtacttaattaatacgctaatctgcagctccatttatatgccggggaacccaatccccaaaacgtataacctaaatttgcctatcaggccattcccaacccaagacactagacatagtttctataaactccacattatcaagaaaccaatactagacactactcttcaatataagcacaactattctatacttaaatttaatgctacttatctcacatgatatctcagatgttgtgtagaaaacatatttcatgcaagacatagtttccttctctttcctcatttattcacttgccacatcatttttcatcttatgtggcagcttatttaatgttatggataccatcctattcattgggttaggaatgtcctcatacggagtatcacactattaaaaaacgatttttcatgacgttgccctataatttttgctggtagaaaaatacgaaacagccagcgaaaacataatgaggggtgggggggctacggaccaccatcgaaaaacaatttttactggcggtcacactaagagatccgccataaaaaacaactcaatttttcgaggcgggcctcttaagcaatcgccagcaaaaattggattttcactggcggaggctaaatgtaccgcttgtaaataaatatacgccttatttaatcttctccactttgccattctcttcttctccactttacccattctcttcttctctgctcgcgagctccactcccttctctcccctcccgagctcctcccttctctccccacacagcagaggtgatgcagacgcggtggcgcggcaaaggttgcggcggcgtgatgggaggaggcctaaccttcccctttccctgacacatcaataagaaacaagctgcagattatctatgttttactgtattattgctaccgggcattatttatatttaagatttaactactattttctcataaataatgttttgaaatcttaaatatatactagtatatagtaccgaagtacgttacgaaagatataatcatgtaacttccatttcataataatttacagttcataataatctaacgatttatagcctcttttggaatagatgacactactacgaaaaccatcttttgtggcggttattttaagtttttgctggtggaatttgaagccgccacaaagcaaaggccagtgacgccagctagcgaaaaaatatctttgctggcagctgtcttaagctagccgctagcaaaaatgaccattttcgctagtggcaccattaggtcaactgccagtgaagagatttttcccaaaaaagaattaaatccacatattcatcatgattttcaaaacaaaaacacctcaacatcattttcaaaacaaaaaaacacatcaacatcaacagattcatcgatagatcagcagattcacatcaacatattcaacaaatcagcagactcacataaaaaaattaacataaacaaatccttcacaggaagcaaatcgatttcacagcagtcagcatgcatcaacaaatcctttacaggaagcaaatcgatctggagagaggcggtcgccgtcctgtcgctgcggtcgctgtcgagccggagagccggagaaaggcgaagggaggtgggaggttggaggcacagagaggagagagccgcgcgccgtcaccgctgccagcacgcgtcgtcaccaccgagacccaccacgcgccatccgctgccgccgagcgtcgtcaccgctgagcgccgtccccttgccactgccgagcccctaccccgtgccgccgccgccgagccccctccccggtctccgccaccacagatctggggggagatggcggatttgggagaggagagggcggatctggactcgtacctatctagcctccgcccatcccgcaccagcaccggcatcctcctcccatcccgcgccgcagcctctgttgtcgccgccgccgcctcccctcccccatccggatttgagagaaggagggtagccgcgcagagaggagagagttgtatgccattggtaggacggaccttctaaaaagagtggcatgctagtggagcattttatagaaaatagtacaaattccagttagatcaaaacgtactacagtacaactttttaacgatgattcttaaaaagcagtcagttgtagagttgtaggtaagattgagcatgcatggcccataccaaatttcaataacagaatcttttgtgcgtagagagagagagggggggagagtagagggagaagatagatctcccctctgccaccccttgttccttctatcgttcaaaacatgagccatatcagactcttgacacggttaatgacattttttttcccttgttccatagcagtatgaaatttgtttctgtatatgtgcattgaaaaaacaattgcagctgtaagcctgaaattatgccttgatcaatttgcaactagtccctttgtttcatatgaaaagatgttttgcctttttataagttaaacttttaactaagtttatagaaaaatatagtaactcttaaaacacaaaattaatttcattaaatatattttgataatatgtttatttaatattgaaaatattgttatgtttttctatgaactgatagtcaaatgacttggaaaaaaaaagttaaaatgttttatagtacgaagcgaaggagtagatatataaagtccggtgaaattattaacacaatatttgtcaggaattggtgacaaatcgatcggtcaccggtgaccgcgcgtcgcacagaaaaacgatcgggcatgcgtgaatggccactggccacgtagctgaattccaaataaaccaaatcttaaccctgttgcctctgggaagtatcgaaaaggatccaactatagacagatcacagatagagttctttccgtttccatctttaccttcgtctttagctataaatctggacacacagttattcaaatttatagctaaaaaatatttatattttggaacgagagagtcctagcggttccatcaagattcaaatcaagacgaagaaaacagaaaacatggaatgattgattttgcattcgtcctaaaacataaacagtagtaccacagtaatttggagtatctcagtagtcactagtcagtacagctttataggtcacgggtgaggaagttcaatctgcaatagttaatcacggaggtgtactcttgattctctccgtacgtgcaggcagatgattaatactattgtgaagcagtgcatagaaattggcaaaacactgtgcaacatctaggaggaagtacgggcaattttggtttcttacaataatatggtagggtaagaaatcaaatgtttggccatcacatttttggtaaaaaaaattgcttttaatcctgactattattgaagttgccaattaattggttgtgcatacttttatcagtccaaaatagctcaagaagtagttaaagcactaattaattaacgagtgtagcttatatttatggcatctatttttttgaatgaaaaatagtaaaatcgtttttacatgtaaattatcacctatttcattgtaattatattgtaaggtttaatatttacattatattttttctaatataccatgtatatagaattagaattaaaagtaatttattatcaactgaaaataggacatagaaggatacttacatatagacgacataggaaagagatgatgaaaaaatgtggcgtcataattttagcaataccgttaataattcatatgtgttactcattacatggtgcatgctcaagtggactatgagttgagtaaaatccatcactggtctctaaacttgtaccgatgtatcatcccggtctctaaactcgcaaatcgaccattcatgtcctcaaacttgtttgactgtgtcatcctggtccctaaacttgcagatcactcgtttaggtcctccaacttattcagttatgtcacccggtccctaaacttggatttgaatatcatctgggtcaaataggacggtataaaaactttatatttaaaaataattcatatttttttcatgtgaactctaatgaaggcaaactttatatcaaatttgtagccctcgacgcgatctacaactttgtagttgaattttttttattgtaagtcattttttgtcccaaaatgtaattttaaaattaaaatttcaaaatctataaatatgcaacaatattttgggaccctaaacagttttaattaaaaaacttttcaactacaaagttgcaggtcacgtcgagggttacaattttgatacaaagtttgtcttcattagagttcacataaaaaagttatgaattattttttgatataaagtttttagaccgtcttgtttagggaccagggtgacacaactgaacaagttggaggacctaaacgagtcatctacaagtttagggaccgggatgatacaggcgaacaagcttgaggacctgaacggtcgatttgcaagtttagggaccgggatgacacagcggtataagtttagggaccggtgatggactttactcttatgagttcatgataacctcactcagtgtaattattcacgtactcgatcggtttggcaaataacttttcttttaatttatttacaaagtgataatatttttgtcaaaaaaaatcatatttttatcccaactaaattagcagggggtaattgttagatacacgatagttagatatacatataacatattctgtcaaaaagaaagtgtgtacatctatacaaaagaacttgcgtttctcgttgccaatgcctcaccaccaaattaaacacacatccatgacaatatgacatatgtcgaggatgaatcgaattcctcactcatttaagttgcacagtatgaggcccatcgatcgagatgcgaattttatatgaaggcccataagtcaatggcgatgacgcccgatgatcatcgggtgggcctctttgatcgtgtaaaccttcagtttctgggcttacctcttgattcctttttgttgggctctgtctgaaactctgaatggatctggccttttcccagctttacacagtacattgaattagaaaaagtacaccgaaggtccctcaacttgtcatcaagttacaaaatcgtcccctaaccgcaaaaccagatatccggtgtcccttaactaatcaaaaccggtcacagcagatccttcggtggctttgacctcgattttatcctacatatcggctgagttagcgtgggacccacatgggccccacatgtcagtgtggccacgtcagcatcctctctctttccctcttctctcccttcctcatatctcactcacttctctgcggcacgacggcatggtgtaggacggcagctcgttcagcggtgcgacgaccctggcgcgggggcagagcggccgtgcaacggcgctgtctggcgaaggatggccgcgtcagcgcagtcgtgcgaatcctgggcggcggtttcggcgtgggctgcccggcagcagccatgtgccgtggcagcgcggcgcggcggccggcgacgcgggggcagcggcaaggacggatgagaatccgaggatacggaggcagcggtgaggagggatggggatccagggacgtaggggcggagaggtagccgtcgagctcggccccggccgagctttgccgccgccaccgctcgctgggcttggtcaagggaggggccggtgagcccgttcggacagtgaggagaaagccatgcccaccttccccttccccacggcgcagatgaatgccgaagaagagatggaatctgagacaggaacgacagcggttggagtgtgctggggcatgagcggcgacaacctgccgccggcgagcaaagtcaccgagatgctccgagagaacggcttcaccgtcgtccgcctctacacgccggacagcgccgctctcgtggcgctcggcagcacaggcatctgcgtcgtcgtcggtgcgcccaactacgacctccccgccctggcgcacggcaggacagccgccacggccgcctggatccgcgagaacatccaggcctacccgacggtgttattccggttcgtcgtcgtgggcaacgaggtctccagcgccgacatgcagctcctcgtcccggccatggagacgtccacgccgcgctcgcggcggctggtttgggacacatcaaggtgacgacgtcgtccgcctgcgccagcctgccgccatgcagctgctcccccgcgcagctgttcccccgctggagcccgtgaagaagagaggagagaggaatagaggtagggaggggaggtgaagaagaggctgatgcgtggggcccacgtggatcccacgctgagtccactgccatgtcggataaaaccggagtcaaaaccgccgagggacctagtttgcactggttttgtaagttgggggatacgttgtatccggttttacggttgggtgacgattttgtaactcgatgacaagttgagggaccttcggtgtacttttttccattgaattcgaaagcaagcattgtgcgatcaggttcaaaatttatgattgaaatacaatttgaatagtgaaaggattatcgagtggtatcttccatgctatggtattgtataaaatacatgattttgacaaaaatatatgtgcagaacagagtattataatgatacaaatagaactcaaacgtcttcctagaaattttctataggattgttcaattctttgtttgaaggtctccctagaaattcccataggattaaaattctttaatttcctatgttttcctacaaatcaaataggtttaaaatagagaattgcaaaatgcataaaaatataggaatgatggcttggttagactgcaggaaaaatataggatggtgaggagagaaaaagactcaaagaaaacttttcatgaaaacatgatgtatggattgaggcatcttatatggatttcatatgatccaatagcgtgcagtcctttatttcaaaggtccgtttaggaaaaaaatgtccattaaaattaaaatcatacaagaccttttgaaacaatcatatagaaaattcacacgatcccataggatatcagagtacctaccgttcatggtaacataaatctaaacgtaaatcccataggattgttcatattcgatcgatctaaattcacacataaatccaaacgtttgcatgaaagcattagtatcattctaacaactgcattagccattttgacgttcgtttcatttcttttctcgctggtctcaccatgttcatgttgttgtcacacattgacttaatttcatatcatccttcttgttcccgggtgaatccggtgaagacagaacttgtcacccggttgaaattagccaaattagccaaatccagtggtggtttgttaccgagaaaaagatttatgagtttgatgacaggagaaaaagatttaaaagaacattcgatgtatagcaccaaaaataacttggtactataagaatttttcttcgaccaaaagcatagactaccagtttttctttaacctatagcacttctgttgtattttgaggtggcgacgttagatcggggtagagaaaattatcctcagtctcatttgccattcgttttccacaccacatacactcatctctttcctgttcctcatctcctctttctcgttccccatctcctcgttctactaagcattatcgcttgaaaaaaagaaatatatgttaaatcctattctggacacaagacaagttctatcttattccatgttctagataagttctactcatgcctttacctagcaggtagctccctttaatccaccgtcgtgagcaagccaccaactgccgctatcgttaagcaagctgccagttgtcgtcgtcaaacaagctgctagctgccatcatcagcggcgtgaccaccgtcgccctttgcccaacgtggaatgccttacaagcaaccgccgccattgccctttctcttccgtggtgtgcgacattacggctctgttcttttggaggggttggtaacccctcctctcttcataaaaaacggagcgatagattaacacacgattaattaagtattagccatagaaaactttaaaaattgattaatatgattttttaaagcaactttcttgtataaactttttgcaaaacgtgtaccgtttagcagtttgaaaagtgtgtatgtggaaaatgagggaaatgggttgggaacccatgagaaagaacacaacctaagtatgatggaacgaacatcagcctaaccatgattgctatgctagacatacatgaccaggggaaaattagtatatctaaaaataagtgctgactcacggctaaacactccaccatatttatggttgtcatggaagtgctatgagtcaaataaaaactggtggtctgtgcttctggtcgaaaacaaaaggttctttttttttgccggattgttttcttcttacgtatcaaattttctccaaattagaggcatcgcccgtccctcaccctctcgaccacatgtcgtcttagatagttgaattgcaggggccatcgttcaacctgaaggtacatgagtgctacaatcaacaagatgagacggaccctcttaacctgtagggagaggccacatcaatagttgccgttgctcttggcactattccctacccctttccttatttcattgtgatatgaagaaaatataagacaatgagcgaaatgatagtgatactgttctttttggttaagatgtagtttctatctcggttttcatcggtacttatttcaaaaccgctaaaacggtgtgttttgtatgaaaactttctatatagaaactgctctaaactatcaaataaatccatttgtaataattaaattttagtaattcatagggcgttaatgcttttcttgttgtacgaatcatcagcttcgaacagaacccacgagcgtcgattttcaatctgacgccgcttgtagatgcattgactgtcctgcagtactgcctggcgagcccaacccccacggccgtgccaagtcgtcgcatcgcaccaggcgatctcgtcgtccctttccttgtcgcaaaccgcgctggcccctctgcaaactcgtctcgtaccgtaccccaaaaaagcccaaatccctcactccacccgcgtgatctcgcaggggcaatccggtaaaactcctccctgcctcctcctcctctcctccgcctcaacgcaacgcgcgtgctgctgcgccgcgccgcgcctcgcctcgcctcgcctgtgtgtctctctctcccccacagtgcgcagcacagcacaggttgtgtgacgcagggaaaggaaagcgggggacgaggagaggggaaaaaaaaggaaggaaggagttactactccccgcaccaaaaaccaggcgccagcagcagcagcaaccagcaagcggagaggagatggagactactactcctcctacttgcaccgcagccgcagccgcagcccaccaccaccgtccgcgcgcgcggctgcctccgcaacgcaacgaggagaagagtcgaggagcccaaccaccacccgagacttgacccccacccgcgactctcattcgatcacgcggcgcccacccacgcttttaccccttcctggtttcctctcccctcctcccccttcccctccccgcgcgatctccccaaaccctagaaacccccctcctccgccgcggcggcgccggcggcggggtgtgacgccgcggtggggggacggggatggaggcggcggcggcggcggccgccgtgccgcgaggagctgcggtgcaagcgctccgacggcaagcagtggcgatgcagcgcgccctcatgcccgacaagaccgtctgcgagaagcactacgtccaggccaagaagcgcgccgcctcctccgcgctccgggcctccctccgcaggtcctcagcctccgcctccgccgcgcggggcacgaccccgcctgcgcggatggcggtcggcaggcccatctccggcagggtcgcgggggagccggtgcacgtcgcggagctggtgntcncgccgctgcggccgccgccacggaggaggcagccggtccacgggctgcccatgggcaatgctgccggcgcgcgcaccgcggcggtgagttgggttccgggacgcgttctagttttgggtaaatccacggtgtgcttggtgctgattgattcgtcgtgccttgtgatggtaggagctggtcgggaggggctcggcggggctggttgcctgcagctcggcggcgggggcggcagcggccgcaacctgccatcagtgccggagggtcgctaataccatttgttgtacaagctgcgacagaagggggtactgcaccaactgcatctcgagatggtatgctccggtatatgttgtgctgttatagagtaaattttagttccccataaggatgatttccgagtagattcagaacaggcttgaggactgaccatttgtaactattattagagaattttattttcagcactcagtttttgtgttctaaaagtccctgctaggtgcagggtagccaccgcgattaagcattagatggtggattatgcagctaacctgccttgggggctattctgctgctactttagtgttatatcgtgtatttttatgtaatatgcttgctaattgcttggaattctctggtcgagtttgccctaggcagagcccttgccgacctattagaatctagcatcttcttcaactatgtgtgcagcttatgattagtatatgatcacactgaaagaattattcctcagaagttgttgctagacaattaatgtttgtgatcacactgcggttagtaatggtaattcccaaactatcatcttattgttcacatagaaaacccttgtgtatacaatgttttttttttttaaaaaaaaaactgttttagggcattctattccaatatgcagccaaagcacatggatattttactagttaccttattaatttcagaagtacaatcttcgccttgtcttttaaaggctaatttttccccatcggctcactcaaaatcaccaaatgcaaaggcaatggctatccggacaccacagacctatcatatgaagtactccctccagtcacagaaaaactgtcctcgttggaagtgtgaagccaaactattgaaaattgaccaggacatccttgtgattatttggccagatttcatatatctagccatctggatacttttggatcattacatgcattatgttgtcctacacttttttaatgttaccatgaactgtaggtactctgatatcccaattgatgatgttcgaaaggtttgtccagcatgtcgtggcatttgtaactgcagagtttgcttactaggagataatgtaataaaggtatttaacctttaccaagagtttttcccttctccgttgccatatttatttattatttttatgctgactgatttttcttaaatttattattttcactcttaaatcacaaggcaagggttcaggagatatctgctgtagataagttggaatatcttcatagcattctggcatctgtccttccagtattaaagcagatttattctgatcaatgtttcgaaattggtgttgatacaaaagcttatggtattccagttcccctcttaacattcttttctgttattttcatccgaataatctcatatttctaacactagcgcaccatattctttgtgtaggacttaggacagatataatcagggcgaaggtcaatcctgatgagcaaatgtgctggtactgtctgttgcttatttttcacaagaagattcttatttctatgctttggcttgtagtgatacctcaaattatcctcgcagtgacttctgcaaagtgccagtatttgattatcaccgacactgcccaaggtgtttgtatgacttatgtcttgactgttgtcgagacataaggcgatctaggaccagtgttgcaagaggagaatatgctgaaggtcgtgtggtagatagaagtaaagatacttcgaataaaagagcaagaatggaaccatctgcagaaagtgcaaatgataagtcagtcccacaacgaagggacataaaaaatattgacattagatctttattccctacatggagagtcaataatgatggaagcattacttgtgggcctcatgaggctggtggttgtggctcctcgaagttagtgttaaggcgaatattcaaaataaactggattagtaagcttgtaaaaaattctgaggaaatggtcaatggttgtaaagtacatgttcttgagaatggatgctcatcctgcaatgatggcagaacattagagttaactggtcatcgtaactttggtgtctcaacatgttcaaataatggtggtattgatcggttctgtgtgttctctcctgtattagaggacttgaaatctgaaggtattattcattttcgtaaacactggataaaaggagaacctgtagttatcaggaatgcgtttgagccttctctgtcatcaagctgggacccactaaatatttggcgaggaatccaggaaatcatggatgaagaagtggatgacgatgtcattgtcaaagctgtggattgctcaaaccaagcagaggttagcaggaaattttagttgctaatttgtctttctgaacaaaagttactctttttagatagaggaatagatttatctcgccttctgcataaggcacgcgaacaaaaaagttgcttcctatttgaattcactgtgcctcctgtttgcactatatagattcccaagtgctatgacttctattctgggatgttgccatgctattaacttttagtgctactgctagtctatttgaatatgaattcatgatcatagcacgtattactcatctggcaaatatgtaacatagaagtgatggattggataactttttctagctaccaagtcttagtactatgatcatctgaacaatatatcctgtgttctatttcttttcaggtggatattgagctgaaacagtttatcaaaggttattcagatggtcacaagggggaagatggggaattgatgatgctgaaattgaaagagtggcccccacccagtgtattggaggagtttctgctatgccaaagaccagaatttattgtcaattttccattagttgattttatacattccaggtgggggctcctaaatctttctgctaaattgcccccagacaccctacaacctgaagttggcttgaagctgttaattgcatatggaagacatcaagaagctggtaaaggtgattcagtgacaaatctaatgattaacatggctgatgtggtaagtagggctttctagattcacttcgagtttcttgtgattttgttgcaaagggaggaggcaagaacatgcgattttcttttagatcctgttcgaagattcgtgctgtcaagcaccagagtaaaggtaaagggtggggaggggaaagagaaggttggggaggggaaagagagggtgctccgaggttatggtaggaagccaggctggcgtgtggcactgccctgtgtgccggttgggtgagagcagtgggttgggtcgaggttgggggaaacgaagaacacaagcgtgaatagattggggcagttaaagggcatcaggggatgcccggatgggcaggaagtggattagggagttgtctgatctgttggatatttatccaatggtcagaaaggagaatgcttgagggagaaaaaaaacatttgaattctaaacagataagtgcatgaaataaaagtcatctgatacatgtgctatttattcctcttgtaggtgcatatgctaatgcatacagccaaagggcatgacgtatgtccaaagaggctacaacctgagcgatctgaaaagattgccaatggaatgacaatgcatgtaaatgctcatgcacctgttcaaaatttgaatgtggatatgggggaacaatcacctgaccatgtaagctcaaagtttgatgaaagagcgcatgcgtctgccttgcgattacaagagaagtcttcagatgccaaacttaattgtggtttcgaaggctcttcaactgagttatcttgctcgtcacattcagaggaaccaaaagttaatggttcagaaagaagtcaggctggttctgtttgggatgtgttccgcaggcaggatatttcaaagctgaatgaatatttaactgctaactgggaagaactggcagctagtagtcaggtagcgctctctgtaatgacatcacaattctttatgacggatattgttgacatatccttgagaaagctatttcatgattatctgtttttgttgcaggttaagaatcctatttatgaacaatctatatatctcaacaagtatcataaaaggatactgaaggatcaatatggtaagcacaaagtacggcatggatgattgtcgcttctaaattggcagatgatttagctgtgaacttatcattactgatatgccatagcatctcatttcatgtagttacttcactcactcctcagactttgtgtccatattccaaagaaaacatttcattgcaataccaaagcaaatagacaatagctgtctaaatttccagtaaccaataagactccattggttctttgcttgaagggcaaccaagtgctgcagtctgctttgctaggatctgcttgctgcctgatctctgatttccgtgctacagtacatgcgcttagtgaaccatgcagaatgctaataatatttatgaggataatctcaggctattgaaatttagttctatcttattaatgtggttctaagttactttttgtgagagccttaatttggatcttgttacaggaattgaaccctggacattccaacaacatatcggtgaggctgtatttgttcctgctggctgcccattccaagtgaaaaatctccaggtgtgattcttccgttcctcgtatttgcccttttattgtccttaaatatttttgtttgctttgtaagtgatcatttagaatatgcaacctaaatatgtgaagattttggataaagcataatttttgctccatcaaattcttaccatggtactccaaacactaattatgtgctcatacttcccttctctgtatggtcaaaagctttcttctatgaataaagaatgtgctgatgtgaatgtcgatttgggtaaacaatctctatggcggttaaaaattgggcaaatgaactataaaaaacaaaaaatgcagggttttcatataatcatatgtttaattatctagtgatttggatgtagacataccaaaagaataaatacagatagaaaatagatgctgggaggcatcgatgcttagggagcacatgataattgcacatggtgttgattctctctcactggagagttaaatcttctcttttttcttcaaaatgtttcagtctacggttcaattggctcttgatttcctgtcaccggaaagtttgggggagtcggcccgaatggcccaggagattcgctgcctaccaaatgatcatgatgcaaaactgaagatgctcgaggtacctgactagtactaatctggttataagttgacttcatgcctaactttcttaggttttggagaacctgaaaaaagttttgtccctgtacagattggaaaaatctctttatatgcagctagttctgctgtcagagaaattcagagaataaccctcgatcccaagtaagtggattatttcttggagtattagagaaagtttcacctgttgtgttcatttctttatgcattgcctgccagcttggaattatatcttgagcaccgtcatcaaattattaaaactttgaactataacatctcgaacaactttgctatttacccgtacaaattataatcagtttccttcgcattttctcaggtttaatctagaccttaaattcgaggatcagaatctaactcaggcggtttctgagaacttggctagagtcaccaaacaacggaatgtaccatgcagctgagatactccatttaaattagatatagcaattgtacatgtattacatggtgtcatatgaaaggaacacaatgacacattctaattgttatcagatagcataagccctcacctgtatattggaattggactaggactaacggctgagctcatgtaaacagaataaacgtggagcaattatttagcattagattgtcagaatgagatttactgggttgcttagagactgtcactttgatacaactaattcttctgccgcttctgggagaaattttacatctgttgactgttattaagtaactttgcttaacatgttgaacttgttacagtgagcaatctgtattctggagattggcactgttttatcatggtgaatgtgcattttctcgaaagagaactagtctccttccattgcagatgaactagcttacgaagtactccctccgtcccataatataagggattttgagtttttgcttgtcctgtttgaccactcaccttattaaaaaaatttgtgcaaatataaaaaacgaaaagttgtgcttaaagtactttggataataaagcaagtcacaaaaaaaataaataactctaaaattttttgaataagacgagtgatcaaagagtacagataaaaactcaaaatcccttatattatgggacggagggagtagtgcatttgtgtgactccaaccatcttgttgctagtgataataagttttgaaagaagtgttgttttaagagatactatgtttgttgagtaattttcaacgtaatttctttttagcgttagtttttaagtcgctacgaataaatacgtaaaaaagttatctatattttaattttattctctaataagacattctggcttattagttaatatgggcaaaggctctaaccattggcaaaatttaacatttaaaacttaactttggagataattttatgatgttttcaatgaaatatattttattgtattggcttttaagttgcttaggactcatctctactgttataaaaattgaaggtttttaccggtactttggtacgtcattcgtgtataagtatgttattttgtgttattatgtatgagtcggtttttaatgtcgttcgcttttggaaatatagaagaacacatataagaaatctctttaaataaacttgcatgctaacttgagacgatcaaactcctaactataagtcatgtttttctaaaaatatatatatccaagtgaattcccacagtgaattttaccttaactaaaccataataacaataataagattaccgttgcattgcatgggcatatttttctagtaaatactccctccgtcagattttggagtaatgtgatactataacctaatacaacgaatctggataggctcatcgtctagattcatagtactaagttatgtcatatccctctaaaaccccttatattatgagacggagggaatataaattaaattgtttttgtcctaataatttgtgtagcttgtaatcacctcatggccaatcgatgattgttaagtctcgtggtaatttcagacacaagtttgaacggttttgctattttacttgtgacatatttttaggctcttgtctttcactttttagttcataggatcttgcatcttgtatatctttttaattacacatggttacagagttatattgtacttatattgagttgtagtgcacttgcactcaattacagtgcacaaaaaatagatgttggaattaatgtttttctctaaatttatgatttttttgacacgattgtctctttttttaaaaaaattcatttaaaacaggctatatcccttggttgaaaattttgcaagattcaaaactataaatttgtccaaaaatcattagttaattccagtttgatttgtaaaatcatgtttttcagcgatgaacttcttcttgttctactactacattttttattattacgatggacatggcgtgaaatcttgtaaaattttatgaaaaaggtacaagtagtgtccacaagtgaaaagaaatcgttgaaactgagaaaaatttcgtcaatattttgaaattctgctatatttttttctaaaaaaaagtttgaccagttaacctagcggttcaaaattttgaaattttgtgaaaaatgtaatagtactagcaatttaggcaattgacgaagcttgggacaggagcagggtttacattactggttgaccactaaatttcgagcactattagtatcgcggtttccaataaatttcgatcagatttcgataaattttgattgaatttcaatcaaatctactgtttaaccctcaaaatttcaatcgaaacttaattccgagcatgtcgctcgcacgccacccccgaagaatctggagagatcagccttcgcttccccccgaacgccgatgggcttccgcctcgcccacctcgccgcctgcgtggcccgcgccgcggcctcctcctcccgcctccgggggccacgccccgccgcctccgcgctcgtcgcccctctcctcgcctcgccgtgggagccgagcggcggcggccagccgcactggctcgtcccctcccgcggccacgtgggccactcccaccaccaccaccacggcgaggaggtggggggcgaggcgtcggagaggatcttccggctggggctcgcggccgacgtcgtcctcaccgtcgggaaggccgtcaccggctacctctccggcagcaccgcgatcgccgccgacgccgctcactccctctccgacattgtgcgttgcctgagccctgatgacaaaatcggtgctccttttcggcttgatttttttttttggtgctgattgtgcagggtttttttgagatgtgcaggtgctgagcggggtggctctgctgtcgtacaaggcggccaaggctcccagagacaaggagcatccgtatggtcagtctcccaattctcttctactctgtgatcctcgtttgtatacggatgtgattcttggctatggtggcaggactgatacttaggtaaatgtcatgcattgttctaagctcgtggcaaaccgagggtccaatagatactaattatctaattattgactgatatactaattaatatgatgtaaattaactagaattgaataatctacctggggacctctgaccccaggaattactatgtagtaacgccacttctaagaggcatctgtctaccaatttatgggagttttgcaattagttaactgatatactgactgacaagacgacaatctcctgttcccacttcctttgttgacataggcagtttacttgcattcataatggaattgcagaaacttagctccactagaacataggctgttactagggtcatgttttatgtgttaaaactgttaagaatagtcaaggctcatatatgatgattagcctactttttgaaagaaaaaaaaaagaatatgaagggagctgaaatccgtcagttgtttacagtatggaagctattactacatgtgcttgtgcgttattgcagccacatgcatgttcatgtgtgcaacaagatataaatgctagaaaagttagtaagggcattttcttactgattctcatgttttttctaagctacctgaattgcttgcgttataataattattaaagtctacatagaacagcctccatgcctatttgatttattgtcttgtttgattgcgctaaaagtgttgaagattccatgtcttattttgcttcccttccaggtcatggaaagtttgagagtttaggagctcttggaatttcaagtatgttattagttactgcaggtgggattgcctggcatgcttttgacgttcttcaggtctattactactcaatgtcacaatgtcaagaacactaaatttatgtttttcagtgatgttgtccttttttcttatataatttctgtttttgtaaattagtgtttggtccctgatgacatatactcccatcatacataattacacatggacttcacatgttgaagtttgtttatttcagggagttatgtcttctgctccagatattattggcaatgtatcgcatgctcatcatagccatggtagcagtgggcatcaccatggaatagatttggaacatccaatccttgcattgagtgtgacagcttttgcaatatctgtcaaagaagggtaagtgagtgttttctactgtactcatgctgcgaaaactgtgtaagtttttcttttgttgttctaccagattttacaatcttatcttatgtggtgtacttcttgctgttttcagctactaagtgttattcgctacccttcttgatattatttttgcctaccatgattttaaattttatggtctcctgtaatataatgcttgtaattcaatggcagaagtgtttctttgttaactttgttgatagtagaatatatgtagctctgaacacctgacattatgtttctatgttttggctaatgattatttttctatccgtttatatccatagcaggtagcagcatctccttaaaactcttctgttttaatctgaatttattttgtttattaatgcacagttaattatcatgcgacaaatcacataagaagatctgaaagtgtaaaattaagttacggtctggaattacaggctctattggatcacaaaaagagctggagaaaaggaagggagcgggctgatgaaagctaatgcatggcaccatcgctcagatgctatttcttctgttgttgccctattaggggtaggtaagaccttaaatgaaggcctgaactcccattttctagtaggcaagttttcttcatgttttagatcctgaatggtagaatgatgcattatgaaccccgagctagaaatagcatccattactccctgtgtacagtgggggactgttggctttggaaatagttgtatatgtatttgacctggagtttttatgcaattgatatgagagcactattttatcttgtagttagcagtattaagaaaaatcacctggtttataaatttcaccttgaaggtcttacagaaattacagtgtttatgttaagacattgttttgtttttcaggtggctccattcttggagttccttatcttgatccactagctggacttgttgtctcgggcatgattcttaaagctggtgttcatactggatatgagaggtaactctctttttattgtcaagcaggattgtcaattgaacttgttttgtcagtcagggttttcaatttaacttggtcatgatgagttcaatgatattttgtcaatctcaaatcaagaattgttttctactcaaggaatattttgttacgcattagtgtttcttcttgtctaattaattaggaatgtttggattttttttttttgctgaaaatcattttcaagaatgaaagaaatttggtctgtttacatttactgttccttgtttagtgctttacagtcttcacctttagaagtttatattcaagcagtagtggagacagggaggggcaggaaggggtctcgcctcccccaagcacactatatttactgtagcttttataaaattttaaaccgttagtattgttgggcccctccaactaataaaatccagtgtttctgctccgccactgtattcaaggctagctttcatgatgctacttgaagtgatgatttcactgatgcagtgtgctggaactagttgatgcagctgtggatccatcgcttctacaaccaatcaaggaaacaattttgcaggttgatggtgtaaaggtaatacagcctggataaatttcctttgtgccatcatgatttttaaaatgttaaaccgataagtcgaaaacaatgaaagtattgaaataattctagggatgccatcggttgaggggaagaaaagctgggacctccttatatcttgatgtacacattgaggtacatggcattgtgatttagtttattgctttggtatttattttttttggatttcaagatgagagccctgacagttttgtaatgtgggtgcttaggtgctaaataagagaaattgattatgatatctgttgtattgtaggtatatcctttcttaagtgtcagtgcagcacatgatattggggagactgtccgtcatcaaatacaaaagtcacacaatcaagttgctgaggttttcatacacataggtagcctgcaacctttaaaccagaatgctctctaaccatttggctactgtacgcattgagttctttgcatgtactaattggtatctctagctttttttttaatatcgcaaacccgtatatacatactgcctactggaatgcatttcattatgtgaaacaagctattattatatgttttgggcagctaccttgattgtgcattatcttattttagtccaatctatggtttgcgggactgctactagtatgcatacttgttcaaaaaaaaaagtgtataaatacatcttttactcatagtactacgattatgtaaaactgttagacacagagaatttagtgttgcaggcttgaaattttagagttctaactcttgtggctttctgaaaagctgttagacacatgcagtttgtattgcaaacgtacagttctgaagtacatggttgtgcaattaaccacgagacatggttgtgcaatctttctcatggttaattgcacaaccatgccaaaacccacagcaggaatatttatgaagtacatgcattgtagatccttcatattcagtggaatccaacatggaccaaaaagggatttgggagaatatagagagaagaaactcagatgctatcccacgacaacaaacggcagaagccattgtgtcttgtataatttcctcccatttctcaaaggtaaatcttttcacagtccatgacaatgcgaacacctccctcctgcatctactgaaaccatgatttggtgcagaaaatgtcacttgaacacctaatgctgcattacttgcaaggacgagtgttacttcaggtcgaagtttcaatgtctccagaaattatgatccggtaaattagctcttccatttctatcccaaatcttcaccttacaagtttctaaccctgtgttttttttttctccaattgctcgacccaaagggatgcaatggacattgcaaagcaagcggaagaggagatactgaaggctgattccagcataagccaagtaagcgtacagctaagattgggccagcaaattaagcaacttaagctgccaggaggcaaaaatagagcgaagaatcaacaggcacaaatgcagtagcgtcagctacactgtcacggttgattaggctgttttttttttcttttttttttcaaacattattcgatcgacttcgcttgctgctgagtgctgaggcagtagactagttctagcttcgtacagagtgatcttagcctgttcaggcttcagagatactactatggagcagtatatatatatatatatatatatatatatatatatatatatatatatatatatatatatatatatatatatatatatatatatatatatatataggccactcatatggggcaccatggtgcccgggcaccatggtatcaaatacacaaaatcactcaaatttttcaaaattttcaaattgtgagtatatacctagttataataactcgattcatacctatacctatcaacaaaacaactcaaatttaactttatttcacaatccatgattacatacctaactaattatatgtatggatgctatatacctagaatcaaaatctaacaaaaacaagttcaaattcagttcaaacttgctttgaactagttagtaaagtagctaatgttaatatctaagtaattgaaaaagtttcatactcatttgaattaggtatatactcaatttcaacaatggtgcccgggcaccatggagcaccaaacaaatttactatatatatatatatatatatatatatatatatatatatccataaaggttttactataataataatgtagagagcagacatgcttagagatggctactggaagagactacgaccttaacgaccggctgtgaacttccaatgtataaattgcccgataccaggagaggctgctgctgcttctcctttgtatcgcgggaacacttgttatttcgatgaaaatttgagtaatctaccaactatactaccatacgaggctgcattcatattttgatctatattgcacacaagttggcatgtttttttgcacccagactgacaaaaccatgcatgcaactggccagatgcgctaggttgcacctcggtcctgttcaggattatggattactgtgacatgctttttataagcttctaaaactctcttcatcagcatatcttagagagcttgaaatcaacttaattatcgactttctaattcattcgttttgtgttattatggaacaataataatcattgtaaaaccagcttcagacacatcgacctcgtcattggcatcccgatcatgtggggtatgatagtctaaccatcatgtagggtctactcgtacgcacggacggggtggtggtctggtggcgtcggcaaccacccacacagacggacacaggctgcctccaatatccatctcgtccctcatcacttcatcagccggacggagctcctccgacgtcaaaaaatgattgttccaattttccgttaatgggtcggtccagcaatggcaaggatgccctagacgagtttgttatcgttcgacttctgagctttgctgttgcttgcttgcttagcgttgccgagttgttgctttctcgactatggagctcggctcgggatgatcggcgacgtgcagagactgtgtggtggattacgcgtgctagtagctagtagtacgcacgtgtaggaagctgctccaactgcctagtacaagtgtaggaggttcctctaacgtacgagagatttgggtcacacctgtcaattctaaaccggtcagaaactttttatattcattgatttaactatagtaacgataattagaaaaataaataaatttggtactcctatttgactagaaatagaaagtcacacaaatagtcagaatcaaaatcaataccacttgtacgaaaaccatacttaagtcagtcgggaatttccttccccgttttcatcccaccccacaaaacgatagcaccgggacaggagaggagaaatgaataaaagaaggtatcgcaccgagaccaccattgcatgcaggtgacacaactcacaaactgtcgcataacaacattgcattgcatggtaagttaaaggacggtaaaatggatacagccacttgctgctcctactatcatcatcaagctaagctaacatatccaccatggatgatcagtgcatcatcaacgagaacattaaaaaaagaaaaccctgttgttaatcacagaatgaatttctctaaaagtacggtgtactgcctctctcgttcttttcctctcccggtacaagagccgcacctacgcaaagccttcacatggcagcaacacgcaactccctctaaactacagcagctcacctttgcatatctccctatctgcataaaccgtcgcttccaacaatgtcacctgatgttcttcttccttcggcaaggctggtgtcgatcgatcactctcacaatgccgaaatgggtgtcttcctcgtttgtcatctgcgggcaccagacaggcaaaagctcattgccgagctccagagtgcatgctcgacttctcggtgtcgctgctggtggacacggaagctgcctccttggtggacttgcgagctcgctgacgaggcctgctcgagccagtggggtcagccttgcgcttcccgcttccgaggaggccaaaggcgaccgcttcaagggctcttgccgtgggaggcctgactctggttccttgcctccgaggattcattgcctgcgaagaagcctgaagatcaggctgagggttggcaggtcctcctcttgttgcctccggggcatcatgagcgatctcggtgtttgaactggaagtagtctccttattcttgaggatgctaccatggttgtctgatgaaggggcgtgcgcaattgtgacagtcttatcatcctgcggtgtttctagtttaacctgattagccaccaaatcactagactgagctactcctttggcaggttttgtatcctcaacggcggtcttcgaatgaacagaagccagtgtatctaccttatgcccagatggcttctcctttggccttgccacattcatcttctcatttgatctgtcattggcatgagagtttgatgcatcctttatctgctgacatggcttctccttgccagaacagctcgcaagtgatttggattgaaaactaccaccaacatcaatagcagttggttttgatgaagttgatggcagcttgactttctctttttctaaaccggggccttttgagaaagaaaagctgcgtcgactggtctggtcattgctacagctagttagtcttctgcgcttcgtcactggggataagtacttgcgcttttcaattttagttttctggggaaagaagcttgtcgcaccaattgtgtcaccattgccattagaagaatggccattaactggaaaaactgagcatgatgtagcagccatatttcgaaaagagtccacttggctttcattgtctgcattcttggatgaaaccatttcagtgccattctcatcagctgtaactcctgcgtagccttccttgtaatctgatgatctgtcatctgtgtcatgttcgtctgaggaactatcactcaccatattatgtgtatgacgcaaagggccaaaactaatatttgcatcagcaggcaagttcctcagctccctcacttgcgagggctcttccccttggaccaagctagtatcgattattgtaaactttggaagctcgtgatagccatcgaaaggaacatcttggttcagtttcatggctgtgtcaaagccatttttctcagcattaacaccattgcccattccatcaacctctatctcaagaagaacagggtctgctaccactttcttgaggacatcactaacagaatcaaaataatgagtgccttttgtaagttcacttcttgaaaacctttgaataccaggcacaatgaatacaaggcaattcttcgttgtgctgacatcatttggcttctctgagtgccaccctcttgcaagcaaacgaggccagacagcttcccaaaaaagatcatttgatcttgtcttgcttcttctgaaatcacccgttaagaatttgattatatcttctgaagcaagagaggaacaatctttgcctgcaggcatgccgggctgaacagaaaggacttggtttggtttggatgggtccaaaacaaaaccagtcaaatcatccttccctttaccgatcgcaaccgcctcaacaaaagcttctattccaacaacagatttcagatgaaaaacaaaatccattaatgatgtttggctgtcgttgaaagatttgaacatctgcaacatgaaaaaaacaatgcaactcatatagcactgattgatagaaaaacattatctattaatatccataaatttgaaataacttagttctgtgaaattaaactacgtaaagttccttggaccattgcaaattgaactccttgtgtgtactcatacttggagagcactagggttttttgtctttttggaacagctctaccttaaaaagtgcaaagagaatacaattcacaaaaaaggtagatcaagacacagaaaatcccaacataatagccaaatgaagtgtactgtgcacttgcttcaattttcaggtgtaacatctatatttataactgaaatcctatagtaatagttgcaatagagtagttattacactctgatgcaagatcagccaaaacacatgccatgacacttggatagctctccatatgattaagtcaagataactttgttcattctatttatatggcatatgatgaggtgagacttatacctacgaaaataggtaagagattaatctggttgacataacttggcaagaatctaaaaagagaatctggcttgaaactaaaacttcaaagaatggaagtgttttccattataacaagaaatgctatgagaaaaaaaaaaacagtgatggaactggcgttcagactaacagaacctcatttaatcatgagaatagtatcatgatgaggcatctcaatgtttaattactcggtgcatagatagaaatagaagagccgaataggtgatcaaagtatgagtgataattgtgacgtacctcatccaacagatcatgagcttctttagggattttagatttaaggcgagatataagctcctgccttcgccaacctataaaaatgcgttccccaagaatgcatctccttatttttgcttttctgcaggctgaccatcttttatatgcttctcctttgtagaactttccataatagtaggaaagcacatccccaacagtcttactacctacaaatctgctcaacacatgcagatttttgccaaaaatatagaggccaaggagcaataattctgcttcctgatcactccaaatggaagtggatgaattaggcactggaataaactgttcaatttctccttgatctgccatggccttatcagtgaagtttagaccttcttgagtggaacatggagccaatttatcatcgtgtgcttgatgactgtcagatactatctgatcaggtagctctggatgcggatcctgagatgttgaacactgtccacttgtgttattactggttgggcaaattgaggtcgtttggctatccccatctctgctattttctatagccttggtttctgaagaatgctgcttttgtatttcctcttccttcttattgaattcacttggtaatgtccacataattggtatagggcaatcataaccaagtgccatgcaactatcagttgtgttgctcatgtactgacgacgctcatcctctgtggcaagattagggatctctgcttggtacgcttttccagtgcatatacgtggtggtaagtcgtcatctgtagcatctgattggtgtccatcaccgtcttctggctcaagtgactccatctattaaaattacaaaaaaaaagaacatttgtaaaacatttcacattgatacaaaaaaaagtgcattatcacttcaccatcagcacaaataattaaattgtcaatgtactttcgaattatgaatcagaaggatgcatcatcaacacagctcttctttgttaacacatggaaaaacaaaaacagctaactgcagtaagttcaacgcatgtaaaatcttcttcctttttaagcccaagtctaatctcctagaactcttatatacttacatttttccctatgatgcaccatcttttggcatctaaaatatactgtatgcaacagaaaatgaccaagtactaatttatgaacttggcagttagaaactgaagcagaaacatagtctacatggcatcaataatgtactatacctaactgtatctacagttctacaaagtccctgaagttacccattctcatgaaagattgataatagaaaacaatgctttataaaaaggggttaaattttcccagcaaccacaactcatttggaaaaaccttgctactctcacaattgcagcaaagttcccctgtaatgcaaacatccataatgcattcaaaatgccgcatagcagacgaccaccaaacttactttccgagccccaaagctttcggagactcgtgcgcatattcgcatcgtattgccggcagcaatatggcttgcaggaagcaaaccaacacaatgtctgtcatgtataaccactggctgagtagggttcatcgttggacataacccacaggcagaatgattgacgaaaagaaaagaaattttaccagccacccaacagattgaattactcgacatcaacacaaattgctcactggcaacattgcatcaaagagtgcaccatggctagaacctatcaagattgctcgcggcatcggcgagggtctcgtggcacacagctacaacccaaaacacgagtaaaattcgagccatgttggtagatacagggtcaacaattgcattccgcgaaatctaaggcccgggcacggtggcaacacaccaccacccgcgaccaacccacccaatcccacctcccgcggcggccgcatcccgtcgagcacgagatacccaggcgagccacgcccacgcgcgaccacgacacggagcagcaacgggggcctaatccatggcgctccaagaacccgcacgaacgactagcacggacctaaaagaaaatctcggggggaagggatgacgtgatcacggaaggaaaccacccacccacggtcaaagcaagaacacgggcggacaagcaaagcagcagcagcaggcgaggcgagctaaagattggagggagggaacaagagcgaggcgaggagaggagaggagagaatcaccttagccgcctccatgtccatgtccatgcacgcacgcgaagccgccaccgccgccgacgccgccctcctcccgagctcccccccccaatctcccctcgcgccaaccgccaagaaccccacgcctccccccctccccgcggagcagacggcagaatctggaccacgcgcacggacaggagagagcccccacagccaccacccccgcgcggcgtgattccggacgcgcagggacgaggcagcgccgccccacgcgacgttgacgacgacgacctcgagacgcggtggtggtggtggtggtggtggtggttcggggcggaggcggaggcggagacggggaggctttaaagaggaggaggagcaaagagagaagaggagacgagacgggggccgaggcgagagaggaagagagaaacggtgacagcgagcgactgctgcgagagagattggtggtggtcacgccgcgcacacaccccccgccccctcgtgggccgctcgctgctggtgggctgggcttgggaggctgggccgtcctccgcgcggagagcgtgacgaacgtggtgggtggggtgccgcgcgtggacgaccgggaacccgcggacggacggacgctgggccgcccttcccgtgtgccgtccgcgtgcggatgcgggcgtgtacgccacgctatagctgcagccgcccagcggttgaacaaggggcggatcccgggggaaatgtgtgtggtgtgtgtgtgtggggggtggtggggggggggggtgttggacactttcaccacaggttatgtgagtttacgtgaaaaaagaaatgtattcgacataaacgatgaaatctcgatagaattttctttaccttgtgtttcttccataggttatgtattacgtgaaaataaaaggcattacaatcaaacggtgaaaacttgatagaattttctaacattgtgttttggagctttcttcttcattgcttggacgatggttgatgctggtggacgctaccgccgaaccaccggcttacgagttacgacaggtgctcgtcggggcttggagggaggcatcggttgctgcgggctccgtctccatgtggggtggtggccgccagtggtcttctggtccatagtgaatccgcggcgtggtggcggcactagtacgagccttggttgacggatctatgcggaggtaagaggcccttgcaggtgggtcttttttcctcacaagtaagaagaatgttgtcttagatggggatggtggaggttaggtagaacttagtttatatagagatgaaggggatcggctaggcgtggtgtttagcagatctacaaagtgacaagaagcccttgcgaatacgcctcgatcctttgttcttgagtgagaatgatggcgccttcgatggagatggagataaggtatctacaaatgagtttatatagagatgaaaaggatcagctggttgattggatctacatcaaatggctatccaaagagattaaatttagcatcaaataaatgggcatatgacatccaagaatggccgtcaacattcattttattttccagctctaccgtttctcgagaaaaagtatggttgtggaaatgattgatgttggtttccaaccaatatcacacctacatgtgggcgaggggtagtggtgttggccaccaacagtctttgggtccatgatgaacccacgggtgaggcggaggtgctatgaccaccgtcttactggttaagactaataaccaccttcggaccaacaacttacaggttacggccggtgtttgttgagcttagagagaagcgttggttgttgcggtctccgtttccatatgaggtggtggccattgacgatattttggtccacaatgaacccgttgcatggtggaggttctagtaggtgttgtggtcgacatatatgtgtggtggtaagaggctcttactggtggaccttatttcctcctaagtaagaataatgacgtcttaggtagggatggtggagatttggtagaagtgtgttcatatataaatgaagggaattggttaggcgtcatggttagggatctacacggcaacgagagtaccttgcaggcaggcccacagccactccacacgtgatcccccctccctcgtccggatggagcagcgtcctcgatggcaacgacaccaccctcgatgtggtggtggtggtggtggttcgaagaatcagagttgaggtggagacgggggctgaggcggagtcaagagaggctttaaagacgcgaggagcaaagaagaggagatgagatgggggctgaggcgaggcgaggcgagagaaagagagagaacagtgacagtgactacgagagagattggtggtggtcatgccacgcacatatgccctcgtgggcctctcgctcctgggataggccgtccgcgtgcagagcatgacgacatcgtgccgcgcgtgcacgacctcgaacctgcaaatgggcgttggctgcggctgccttcccatgtgccgtctacatgcggatgcggtcgtggacaccacgctagttgttgcagccacctgatggttatggcttcgaataggcgacggattcgagggcaaatgtgggttcaacacttccatgggttatcagctatttgggtttacttgataaaaatgtatttgacacaaatggtgagatcttgacaaaaaaattttgacctgtgtcttggggctttcttctccatctcttggatgatggttgatgccggtagccattgtcgccagacagcggcttaccggtcaagaccgataacagctgccgaaccaccagcttacgggttacggctaatgtttgttgagacttgtagggaggcactagttgttgtgggctccatttccctattgagttgttgccgctgaaagtctttggttccataataaacccacaatatagtaggcactagtaggtgtcgtgttcaacggatctgcaaggtggcgagcttttgcgagtggtccttctttcctcccaaagtacgaagaatggtgtcttaggtagggatggtagatattgggtagaagtgagtttatatagagatgaaggggattggctagccgttgtggtcaatggatctacacgataatgagaggctgttgcaagtgggcctcctttgctctcaagtaagaataatgacgtcttaggtggagatggtatagattaggtctagaagtgaatttatatagaaatgaaggtgaccggcaagacgattggatctacatcaaatgactatcgaaagagattaaatctagaatcaattaaatggacatatctatctaaaaatgcccaacatcactcattttacttataaaaaccccttagctttcacatggtggtggttggtcgagtccatggtaactcgacgatacggaaaggtgcaagaacaccatagcctccatgtacgtgagcaaccttcaccctctattcaaggccccatagatcgaagcccctacctaactccctcccttgtggcctttttttaaccgattgaaccatttgggaatggtaaaccatcagaaatagaaaacaaaaggataaaccattgaaaacataaatggtaaaaaaaacaaaaatgtttgtgttgtactaccaaatgttttcttggtttatcatattttttacatagattattatgcttctaaatactcccaataaccatggcccatgtctccatttggctcgtaggccaacaggccatcaactctcattcatgttaagttccacatgtgattttacattcaatgttttcaacttgaatttccattctttgatcgatacaacatgttctaccctaacaaatttgtttctggcattttttccattttcggctctaccgctttctgagaaaaaaatgatagaggttgtttttcaaccattttcaggcctacacgtggaagaggggtagtgatggtggttgctgacgatcttggtccatgatgaacccacggtgaggtggaagggtagtggtggtgtccgctagcggtctttgggtctataatgaacccacaatgaggtggaggtgataggattgtgcagtgatgagaggcccttgaaggtgggcctcctttgctctcaagtgagaatgacaacgccttaggtggggatggcaaagattaagtgtagaataagtttacacagtgatgaagggaatcaactaggtgtcgtgattaatggatctgcctgagaggcacttgcaggtgggcctacttgccctcaagtgagaataacgattccttgggtggtaatggcggagattaggtctaaaagtgagtttgtatagagatgaagaggaacggctagacggttggatctacagcaaatgacaattgaaagagaatcaatttgttagcaaataaatggacacacaccatccaaaagtgcccaacaacatttattttttacttctaaaagccatgcatatgtgccatccaaaagtgccttaaaaacatgcattttgcttctaaaagccaagtggcttatcccatggtggttcttagcatggttgcattgttggttcggagcagaagcggtgggtggagttacacctttaaagacaacacgtggagcaaagagagaatgaggcggacgagagataagatggagagagagaatggtgacaacaagcaagagaaagaggcttgtggttaggacagacggtcttgtaggttgttgggctaccattgggccgataacatcgtgggttgggccggaaaaggtggtggaggtgatgcatgtgggaggtaacagggttgtgtggacaatgaatggacattggcctttattggtgttaacggcaaaatttggcaatttttgttagtcaaggttgagtcaaagatggtattcacgccataattttagttgatttggttagcaagattatccacatttttgtaatgtacttccatgataaggaatatttttaagtttctatttctatagatagaattctgggccaacggagtcatattaagatcgggctcagataagtttttcttttagtttagctgattagagtcgtgtctgaattggagttgtattagtagtttccttaattagagatagagtccttagttgatccgatcgtaatagagtcggacttagtataacctatgggtataaatatgtacacacaaggtctttataaattaacgacagttcaatatataacttttggcacatcgtcaaccctagttttactttcgacgagttcttgttttcaagtttaggctgcatcaattttgatctcccgcgagaaagtaagttccatcaacttcgcttgtatcggaggaattaatactttctcagttaagtccgatatactagttaagctttgcttgcattgcctattggatatatcatgtctttctttgattgttcatgccattattattagggtttttatatcaatcactatcaaaagtatcaatcaattaggttagatctaccaaacttgttattgatctagaactatcttggttaagtccaatcttctaggttataatctgttagttagatttgttcaagtcaataaatacttgatatagtttaatcgaaatattagccgatgagttatctatttattataaattaatctactgtatcgaataatgcataaattttgccataatcggttaagttgttatttttattagtttcaatcttatactgtctcggttaggcccgatctatcaagattgtgattaataaatttagattgctaacaattataagctgggatagcctatattagtttgtctacttaatgagtaatgataggttttaattgatattatggtacatcagcctatatttagggacaaatataattgtcaaagtgcttattttatcactttcaatattatactgcctcggttgagtccgatctatcaagattaattgtaataaagttagaatatttacaagcatatacatacatacatacatacatgcatacatacatacatacatacatacatatatatatatatacacacacacacacacacacatatacctagactccggccgatgtcattttaatccttcatttttttttcatccattggttatagccgatcgatccgaaattccatgggcattggttgggcactcaatactatatcagccctatggctgatcggccccacgatctaatcttttttgtttttcttattaattgcagaatcaaactaattagcacgctctgaacccaatttgataggacatgcactatagtaaaataaatctctcaagccttcatatgtgcgacgaatttcacgtcaacaactgcatgtcatccgcatgtagatgtgtattctatcctagtgcaaccgaggattatagcttcgagctgggggtgggtttctctactaatgtaaaagcgaagttgtcgtgttgcaattccctcccagaatgcacaacacccacgtacgcgtgtgtaactctcggatcgaatgccttatcctcaatcacactcttagcccatccctaattatatgggcctggcccgctacaacatatggtatgttactagtaagggaaaaagtgggacaactaggtgtgtgcttcccactttcgcgggttatgtgtgatgcattaaaaaaatgtatttgacacaaacaatagagtatcgacatgattttctaacctcttgattgtgggtctttcttcttcattgcttgcaagatggttgatgttggtggccgcctccaccagaccaccaccttaccaatcaagactgatagccgccatcagaccatcggacaaacaatgtgtgggctccatttccgttggaaaagtgggagaaccgggtgtgtgctccacacttccgcaggttatgtgtgttacataaaaaaatattttggacacaaatggtaaaatctcaatagaattttctaacctcttgattgtgggcttccttcttcatcgcacagacgacgattactactggtggctgctaccgccataccaccaacttgctggtcaagactgataaccaccgctagaccaccagcttacatgttacgcccagtgctcgtcggggcttggagggaggcattggttggtatgggccccattttagtaaacctgcagcatgatggagacactagtaggtgccatggtcgatggatccacacgacgatgggaggctcttgtaggtgggccttctttcctcccaagtaagaataatggcatcttaggtagggatggtggagactaggtagaagtaagtttatatagagatgaacgggattggctaggtgttatggttaacgaatgcacatggctatgagagtccctttcatgtgggcctccctttctctaaaatgagaataaggttgtcctagatgaggatggtggagattaggtctagaagtgagtttatacagagatgaaggggatcggcttgacggttggatctatatcaaatgactattgaaagatattaaatttagtatcaaataaataaacatatgccatccaaaaatgtccaacaacattcattttatttccaaaatccaagcaatctatcccatagctttgcaagccctacttttgtacggggtgatgactggtctttgagtccatgatgggtcaacgatgtggtggaggtgcaagaacatcatagcctccatgcacgtgagcatccaccaccctctacacgaggcctcccacctcaaaacctcaacccaactctgtcccttacgcacatgttaagattgaaaagcgccggtaagtcttcattgagtagctattgctccccctttttttcacctattggaccttagggaatggtaaccgtaaaaaatggaaaacataagggtaaaacatttgcaaatggaagtattaaaagactcgttagcttcctcacttgcaaggcttctttcccttggaccatgttagtatcaattactgtgaactttggaagctcgtggtatccatccaaaggaacatcttggttcagttttatgtctgtatcaaagccttttttcttagcattaacaccattgcccatttcatcaacctctagcttaagacaaacaagatctgctactactttcttgaggtcatcactggcaaaatcaaaataatgagtgccttttgtaagttcacttcttgaaaacctttgaataccaggcgcaatgaatagacaaggcaattcttagtggtgctgacatcatttggcttctctgagtgccaccctcttgcaagcaaacgaggccagacagcttccccaaaaagattatttgatcttgtcttgcttcttttgaaatcacccgttaagaattcgattatatctcttgaagcaagagaggaacaatctttgcctgcaggtatgccaggctgaatagaaaggacttggtttggtttggatgtgtccaaaacaaaaccagtcaaatcatccttccctttaccgattgcaaccgcctcaacaaaagcttctattccaacaacagatttcaaataaaaacaaaatccattagcgatgtttggccgtcgttgaaagatttgaacatctgcaacatgaaaaaggcaatgaaactttcgatcactagggtttggaggaagatgttggttgctatgggcttcattgtcgcgtagagtggtgactggtcttcgagtccatgattggttgcagatgttacggagatgttaggaggtgttgtggtgaacgggtctatattacgatgagaggccctggtgggtgcgcctcctttgctcccaagggagaatactggtgtcctaaaatgaaattagctctaggagggagtttatatagagatcaaagttatcagcttgacggttggatctatctcaaatggctatcaaaagtgagtaaaatttagcaattaataaatgggcacataccgtccataaatacccaatttcatataatttatacttctaaaagctaagtagcttaccatgtagctttgtatcccgcgactcttatacaaggcggtgtccaatctttaggtataatacgatggaggtccaagagtatcacaacctccattcattttctatgccttgcctaactcaatgtttagtgacatatctataacaaatttaagtaccatataattcacacatatctattacgtttgagtccgcgtatttaatcgatgacatctttttacaaaagttaatcagcttagcagagtgtatttgatttgtgatcatcctttatgtgtatcacggaaacctacgctagtgctatatatatgtcacatacacaattattttgttttgagttggactagtcacacaaattaccgtgcttcatcaacgacactttaatacgcaaacttaacacaaaccccctcggcgaccggccgcccacacgcatctcccaactcgactcgacccaacgtcccaacccaagccggtcgagttcgcgttcgcgtcgcaccgcgtcacgtgacgaacccgatatcaaaacccccgccgcgcccgctcccgaaccaaaaccctcgaacccgacgagtatcccgaccaccactctctctctctctctactctccctcctcgccgcgccgcgccgccgccgccgccatgagcgcgggctggaggacgctgctgctgcggatcggcgacaggtgcccggagtacgggggctccgccgaccacaaggagcacatcgtgagcgccccccccccccgtttccctcccctccccgctcgttttgttctctcccccccgggggggcctcccgcgcccgaaccctaggttttcggcgtccggatttggggggcgtgcttgcgttggttcgtgcttgagtgggcgtcgttcctggttgcctgcggtagggggagtgaggcggtagtggtggagctggggagctcaaaaccctagccacctgttaacaattgctgggcgcttggggtttgggtgtgtggagcggagccgtgacggtcttgtccggatgatggagatgaggagagtagtaacaacaggaaggacagaacgacgtgttttgataatttgttctgcataatttctaccatttgaatattggaaaatgtgtgtgtgtgtgtgtgttttaatgatgaaaacagttcaaggtagagagatcaaaattgaaccctgctaaagtacttcacagatgtagtcacaaggcaatgcacatttggaagactgtagtctgtaaatgcacagcaatcttgatgtgctttaagtgttgttattacactatgttccagcttctagttgaaaaggctctttttttagtgaaattgtggcgctatgcatggtagcatggaaggtggtgctgtaatgtgttgatgcaattctgaactttttactcttttatatgctatatgtgttgatggcatgtttatttgagaaccagtgcaaccaatggacaaatattctagtcaactaatttgaccttgcttacattcatgaatcctctgaagattagctcagagcacagcatcaccaccatcaactcttttaagtagtataaattaatatttttattttatgatccttctacacttgttttgaccaagcgttttctttgtaggaaacttgttatggtgtgctttgtcgagaatacgaacactccaaagatgcaatgtttgaggtcagcacccaatattctatcatgtgccttttcacatagtattgtctaaattcacaattaattcggtcttttgtttttatagcaagctatatattgtcttagtcctatgaagaaatatcgatgcctaaaattggcatatttccaactgcagtcagtttccccttctagaaaaaaaaaactatagtccattggctaagccaatcttagtattccctactttctcaaatataagcatttctaggattcgaattttgtacacaatataagcattcctgtagtactacttgtcccatcaacctctcattcaaaagttccccatctttatccgcaaccaccctcccattcccaaccacccctcatttattttcaaaccttattccttaatctctactaaacaacctacaaatacttatatttggaatggaggtagtatttgtaaagaattctaaagccaagatgtctatttatcttgtcaacttttctgcagtgaaggcagaaaataaagatatcaatggagagatagtatatcttatattctgcatcttgtgaatgaattgatatgatactaactgaacatactttttttttgagcagtttctcctccaatgtgcagatcaattgcctcacaagattcctttctttggagtattggtgtgcacctacttgaaccttataaaactacatgctattttatggccttataacttggttattgctatttgtgagcattttattttttttgtcacaatataatgatatgctactgtgccctcttaatcctttgttatccccagaaggtgaatgcacaacaaattcaaccactattagtgtagtactaaaaaaaatctagtactcatatgccttttgaatttatgaagcctttgaagtttttatttttcgagaacaagccttgagaagttagattagctcttaaaggtggttgcaagccacaaacacactgcataattgtgagtgctgattaacatgattgatgaaactattgtgtgagaggaatccgaagttgacatacgctttgcttcatattttgttttgcttggtcctgttatttcttgagctgttgcatatgactatgctctgttcttttaaatatagttttttttcctgaagctgttattgttcattattctgccgcctatgcgtgtttgactgttcactatgtatcctctatggaacttggattgtcaatttcgttccaaacattacctatatcttgttttaagtttatttttacacaatattggtgtaagaacaagacatggcaatttagtttttattatttgacctaggcattaaactaagtccgtaagatggctctttttttgtttctaatttcagataggtttgataaacttggaaaatgaagatttttccaagggtattgtcgatacaacacatgccaatttacaggtacatgtagatgtttttcttatgccccagcagtattaggtctatgtagatgtttttctttcggtgctgaatactaagtcgaaatcacattatggttctccttcttaaagattatcttaggttataaatgatgtcttaattgcaggatgccttgcataatgaaaatcgtgacagaatcaggatattgctgcgatttctctgtggcctggtaagttttgtatttggttgatttgatttgattttgttgttgacattattgtgcttgttgctttcctaatcttaattggtgatgcctgaaatgtgtctaactgacgtactatcatagtgttatgtttcatacaaacaacacatctttgcgaataattgaatctgtttgtcaacattcccaagtatgcaaggctattagttcttgtctttcaaccttactaacttgagcgcttatgaatcatgcaacagtgcatttgcatgacacaacatagcaaactcacaggcatttataactagtgattcataaaatttgcatttggttagcataatctttacttttggtctgcattctaaaagttagtgctaggcgctgggtagccattccgattaggcattagatggtcaatcaggcagctaactatccgtggcgactcttgtgctactattttagtgttcatttatctaacttctctgtcatatacttgctaattgcttttaattgactaattatgttggacctaggtgccacctaggcggtgtgcaggcaccgaccctgcccgatcctctagcacctagagccttcttgagccatgtttttagttctgattctccaaattgccacctaggactgagttgacaagttataaactgtgaatgctttaggtctcctctccaaaagagcagagtgacttctttctacactcttcaattcttcatatgtcgtgacaaacattttctttaattgcacactatatggatatgattgagctgtttgtggtgcaacatagttttgttttttcttttctccattcttttcataactatttaatgtttgccttgtagatgtgcagcaaagttgtcctgccaaattctattattgaaacatttgaggcactattatcatctgctgcaacaatattagatgaggaaaccggaaatccttcgtggcaaccacgtgctgatttctatgtttattgtatcttggcttcccttccatggggtggctcagaattgtttgaggtaacttgaactgctgttctttactgctgatgtgaacatatgcagttcagcatgactgtatcactgtatctaaattagttgtgcatgtgaatactatttcatgtacatttctgttttatcatttttcttagttttatttcctatatgagcagctagagggaaagctgaagcgtcaacaattttttgaaacatgtgaaactatatgaaaatacaatacatttccactttaggagcacccgttgttcaattattcttttaccttgggatccatgacatgctaccttcgtttttgaagccattttgaaattgtatactagaaaattctgcagataatccagtggtataatacactaatgatatgtaacatgcagcaagttccagatgaatttgagagagttctggttggtatacagtcttatataagcattagaaggcattttgatgatattgctttctcagtctttgaaacagatgaaggcaactctcccaacaaaaaggtgaacatacactgtttctccttatcaactcagactccactagtgatatctagatcaatgttattaaagttagtccttgcaggatttcatcgaagatttatgggagcgtattcaagttctttctcgcaatgggtggaaggttaagagtggtatgcgatagtccatatgatttcttaatgaacaaatgttgttgaccttcagttgcaattgcatatgatatgtgacaattatacagagttatatcacaatatgtttcaaaaaccctatatgcatccaatagttacattcagaacacctttttcttatattaaattgggctggtggtattccaaaatcttagacatgcttgtgtctaattggtttctgcactctattttacttccttggcagttccaaaacctcacctgtcgtttgaagctcagctggtagctggagtttctcaccgtttctccccaattagttgccccccacctactatctcgcaatcatcttctgaaatagtaaaaggtcaagaaaagcatgaagctgatctgaagtatcctcaaaggcttcgtaggcttcacatatttccaacaaataaagctgaggtaatgtgcaaattttcttctgttcatgatatcagtgcaacttttcatgtttttgattatcacgttttcaagtttataccactttgttatacactacaaagtcattttgttatataactcttctttaaataatacattgcaatatttcactctgagtttgctcaatttgttgccagctgtgttcctatatgcttcatgctgtcccagtatgtacaacccagagtctaaaattaaattttatttcataaagacgcaattacacagatactgttattagatagaagcaaataatatctgaacattggaccaatatgttccttaatacctgactttgtgtgaaatggaattaaaataatctgttacttttaatgattcgaatattattaattaattccttgtagctgttccatttgtcagacaaaaatagtcacacaggcagacatctcttgtcgtatatgactagtcatgtgaaaatggtatgattagatttgtcctggaaaatatttttatattatataatgattgaacgaacagctgctaacacattcatataacaagtagcggtcaaagttgaatcttgaataccaaggtgatgtcaaacatgtcatattaattgcatgcagttacaccagaaactactgtgcacatcagcttcagtaacagtaacaattccatcatttcttggtttgattcatttctcatatgtactttttgcaactaatgtactgtatcaatatgtatgacaactgtattccatgtcctttatgtctaaccatctagttttggctgcagaacatgcaacctgtagatcgttttgttgttgaagaatgcatattggatgtgctacttttcttcaatggatggtcagtagttcaatttttccaagattatcaacacctttatatttttcacagtagttgagactggagggtatcacctacatacctgctaatatttcatggaaggcatagttgaccatcaagtcacaagatttgcttgtcagtctttatgctaaacatgcactaccatattcttattgctcttgtgtcttgcttctcttacaaacaaaaattggtcatatttagcccccatacttttgtcttattgtctattgctatgttttgctcggatgtagccagtgaggagttttaacttggttttacctaacaagacttactcttctcaaaataagttgtggagagcctatgctttaagatttggagtttcttcttcttcttctttcctttttggtgctggcactgttttggttctgatcatacttgcattataacactacctccgttctcaaaatgatgtcattttggacacattgacatactacctccgtcccaaaaaacttgacgttctaccgcctagccgatgtcccaaaaaacaagtcgttttggatatttaatcagagaaagtggggcccatgtttctgtttttttttcttccggtcgatggaatcctcgcgtaacagcacagaaaccttatcctctcgccgtctcgcgtcctgaaaccttatctcttctgttctctcacctcctctgtcgctcctcatcctcctcacctctcctctcctctgcactaccggcgttggtgacggtgaggcgggcacgctccgagtcgcggctacggaggtcgcggcgcagccggtacgcatcgattcgctggccggcgtagcggctgtggaggtcacggcgcagcgaacacgcgctgagtcgctggtcgtatacggagccgcaggcgcgctgagtcgacgggtatcacggctgcggaggtcacggcgcggcccgcacccgccgagtcgccggtcgtcgcggctgcggaggtcacggcatggcgggcacaccgagtcgtcgccggtcatggcgtggcggccagggccggacgcatgtgtagggtggcggaaacggaccttcactcaccgcaggcaactggaggaaggcgaagaggatgcaggcggcatggtgatgggggctcagcgtcgaatcaaatcctagggacaatttggtcattttaccctgatactaattttggctgtcaaccttaaaacgtcaacttttttgggacggaggaagtagtctctaatgcaaatgttctatcattactttctcaaactatatatttataaaaaaatattaacaatataactacatgaaagagtttttcatgacaaatctactaatataatttttcatattttaaatcctaataatttttcatattttaagtcataatctactaatacaagaagtagcatctattaatgatttaagattttgaggtttgattgcacgcattctaggatttcatcttttcaagtttcaagaacggaggtagtactatatctttatatattgagcattcttgcgagagctttattggtagcaaaagatatcagcaaattgttttgacacgatttaatgtttgcctactgattagtgaaatttcaacttgtttactgattctatctttgttatgtttttctttgaaagacagtcgcaaagaatgtgcattttatctggtcagcttacctgtgcctttccgttatgaatacctgatggctgagaccatattttcacaggtactttttaatcttcagtgtttgatttttgattttagttgatttagtagtgtagtttgtatagagaacttcactatgaaaaacaacccttcatgcaacgcattctaaccagcttcaatgtgacatagttttggtttaaaaacccaaaaaatcttggactaagttatattccactctatgcaaactggctcaaatcagtatatgcgcatagctaggatactacctgctaacggtatttatgcatgttgcacattaactagtcaagaaaagcatatgtttttgtgtgtttaatcatgtattatattgatattttgcagctactgttattgccgaatccccctttcaggccaatttactataccttggttattatcgacctttgcaaggtactattttcatgcttttgatcttgtgagctaacactgtttgttgtgactgcgttactgtgtgataccaatatattgttgagactaatatgccccccttagcaatatgttgtctagatcatggctgttttgatggtttactcaacttgccaaacttctatgccacaagtgtggcttgccacagtttttgtggtgccaaaaaagctagctacacttgtggcaaattttggcttgcaagtgagtctgacttgtggggcataagaatagtgaagtgtggcacaccataactttggcttgcaaccaaacgcttgcctcaaaaagtcaaacttccctaacttgagttgacagtttggcaatgaatcaaacaccacctattgtttcattttggtaaacaaccagcttctgtgaaaaaatgttagtagcattgtgttgtacatctctgaactatattcaagaacagctgttgatacaaaaatgtagcatattggcctaatgtaagattgttttggtgagctgaggttatcagaaaaaaacaatcagttctctgtactgttgcaaagctaattcgacctatattgatctttcatgaacttctggatacggggaacgcatgctgccgttttttttttaacttctgggtattcaattaaaagcattctttgggtattcaattatgcttttaatgcataagtacaacgcccaaagaataattcagcttctggcacttttagtattctttgggatgatacactgagttaattgtctaaattccaggcattgccaggtgcatttccttcagttgtggtaggagcagtacatgctctttttgacagaattagcaacatggatatggagtgccgcacccgacttatcctatggttttcacatcacttgtaagttgattgttctactgtttactgtctgacctgctatacatattttttctgttgtttactatctatacgtctttttcttgggaatttcttgtggaccattacatgagatattccaaaacctttaaaaaaatcgtcgccttctttctcatatcaccctcaagacaaacttcaagtcttattgctgccaaattgtgatcgatattgttctgctttggcaggtcaaattttcagttcatttggccttggcaggagtgggcttacgtcaaggaccttccaaaatgggctccacagcgtgtttttgtccaagaagtattagaaagggaaattcgcttgtcctactttgacaaaattaagcaggttagtgatatgcaaggaagcatattccttctcactgtttctactgatggaccaacagtcatttgaattggatcttgtctcttatttctttcccagagcatagaggatgctgttgaattggaagaactgttacccccaaaagctgggcctaacttcagatatcatagtgatgaaggcaaagaaagcactgatggccacagactctccaaggaacttgttgccatggttagaggaaggaagacacaaggtgatattatttcatgggtagacgaaaaaataattcctgtaaatggtgccaaatttgcacttgatgtagttagccagacacttctggacattggctcaaaaagtttcacccatcttatcactgttttggagagatatggtcaaataatatcaaagctgtgcccgaatgaagaaatgcagttattgttgatggatgaagtcagtgcttattggaagaacagtacccagatgattgccatagctattgataggatgatgggttatcgcctactttccaatctggctatagtcaaatgggttttttctcctgctaatgttgatcaatttcatgtttcagatcgtccatgggaggtacatcctttatcctcatcgaataaccaaacctattctgcatttaaaacaaacctatactgcttgtgagtgatggcgcactgtaggagctttctgctttcagtgctttgtgcatgcatgtttagttacttttattgaatggtgaaatactcaagccatctagaactgccaagacaatccttcattaattttctgtattataatatagctcaatattttaattaaatctttctgatctacattcccttatgcagattcttagaaatgctgttagtaaaacatacaatcggatttttgacctccggaaagaaattcagacactcaggaaaggtcttcaagctgctaaagaggccagtgaaaaggccgccagagagttggaggaggctaaatctattattgagattgtagatggccaacctgtgccatctgaaaatccaggaaggctaagacgacttcaagcgcgtgctgacaaagcgaaagaaggagaagtaaccactgaagaatctttagaagcaaaggaggccctccttgctcgagggcttgaagaaagcaaggtgctccgttgcttttattatcaccttaattttgtactgttgcttggtactttgccccataataatagagttgagcatcctttcttcatgtggttttgcaggaattgcttaggttactattcaagagctttgttgaagtgctaactgaacgtttgccacctatttctgctgatggagatgttcctaatttacgtgctggagacccgaatgtaaattcttcagcccgtgaccctgaagcaacaaccatggaaatagacaatgaaaatggaggagataacgataggtcagtttattattttgtttgcaatgctattactaggataactacttttacaggatggacaactatttttcatgggcggttcattctgaaacgagctttttgtggaaagcttgcatgaactctagtagactaggattttgtattagtcctgcatatatctataagagtaatttactcttaaaatgtagaaaaaaaattcagtagagattgctagataccagtcaagacaaacaggttcttggatggattaatatcagctgaccatgatttaattgcagtattcacctatgtcttgaagtgccaggaacccatatttactgttcagtataaatatgttcgtgcctgcattaggggcttggctgtcattattcggctgctaacttgtcttcatgctttagcagtcagctgaatggtcaaaacaagaaaatcagtcacaatgttggagagcttgagcaatggtgtctctgcacattgggctatctcaagtcgttttctcgtcaatatgctactgaggtgaggacctgtggggagttagagttatcatgctgtaatatggatacctgttagatcaaattcctttttataaatgattaggccaaactggatttctccagtgtagttaaactatctgtctgacaatttctgtatactctctttgattccaaatgtaaatcattttatacttgtgcaccgtagttaagaaaaaagctcaaatgattctgttacccttaatttacactgttctggaaaaaagaatagtcatttatttgtgagaggtgtagtagtatttatttttttcaagggcaaacatgaaagaaaagaaacaaatggcctagaagttccaaacagcttacagtcaggagaaagttgagaagcctaatgtgttagcatttgaaatatccaggctacggtgtactagagccaaatatcacaggctgcatgttaaaattgttttattattacaaaagaactcaaggtcttagtaaatgactgatttttctgcagtacgttttaagtagttttcttttccatggcctccatagcttctactaattggatattacacatattttgcagatctggtcccatattgccatgttggatcaggagattttcgttgggaatattcaccctcttatccggaaagctgctttctccggtttgtgcagacctaccagtgaagggtctcacctttgattttgacccttccagtgagttggagtttacctgtattatacgcgacaaatttttcatcatgcttcactaactggacatgcccaaaagtactctgatgtgtactcaggaactccatcgattctcctgtaatcctggccccgaggaacacccttggtggaaagcactgtaacgactttaggtgattaaattatcagttaggtttatttgaattgtagtggactaattttcttgggtgagtaattgctatggtctagctttcttaattccctctgcctgtgttaggacaacgccgtgtttattgataagctgatctgaagccgtcattactttacatgttgagctgtcgcattggtgggtttgttacttggtccaaattccaatggaacttgcttgcaacactggtccttgcaacgtcttctgagcttctactgagcatgcactgtcaaagctgtttttttacctgccatggagtctggagctgccataacgaaaatcttggtaatgctatgctttgtacactagcgactattttatctctgggttagggtagatcggaaaaaggatcacgagctaggtccaagaggggtctcttcacgctttcctgtctttaatttgttgtttctatgcaattgcaaagaatcattacggagtaaaacggaagattctgtgccacaaacaaaacagcatagctactacaactggaatgggacgtttaccaactgaagccgaactatacttcttgtttatccctaggatgcaacggaatatttattcactaatcaggtggatgaaaattaaggcgcttgatttgaaaaatgacagatgaatcatccagcgaaaaatggacggtttttttagggtgccgaagtcaccaattagtgtgttaaacaagggcaacaaaacgaatgtttcggataatgattatactcatttgatcgggcacataattagtgcgtaaaatatttacgcggcaaagcgtactcagcctaatccttacatatcataatccataaactatgtttaggagctgacaaaaattgcaagcaaataatatctacaggtttatggctttgttttgcagagaaacacgtggaaaaaatctctttggtttcgggtaaatgacaatgcgcaggtgctggttctgtttactgtaatgaacaaacaggttaatctctactgtacatgagatttacagggttatagaattcattgcccaccatgcttccaaaccgttccatttcgtaagacctggaaacaaacaatccataatcagcaggagatttcgtataagtacaaaaacttcaccattttaatgcatttattcaacacagtgaatttcagaagctatgcgcatgtaaggggcaattcatgactactccctctgtctcaaaatataagaatctgtgtccagataagacatcctaatactatgattctggacaagactcaattctagaatcttatattttgggggagggagtaattaataggtggagtatcaccattttccagtatgctcaatagggtttcacacttcgtggcaaatgcgaagcaggacaaatcaatcaagtataaggttggctaaagcttgttagaggatttctgttatgagccaagttcaatcttaacctgtactaagaaaactgtactagggggaggcttccaagaggtaggtctacataagtgcaattcagcaccaattaatgagcatagatacctttttatattattttatctgcaggcatatgttgctcacaaataagtggaaattcaggcagcatctccaaacagggaaaatagttagctttcaaataacgggtcagtctacgatagttttgtgggcaattataaggtcggaatgaaatgaaaaatatatgctttgcttaaagcaggagacatgaactgatgatgataatattgtaattgctaattcaaaaataccaatacctgcttgaggagacggagaatacttatcttggttagcacagctcatttctctcatcccccctgctcaagactgtaccaaatgtcatggaaagacgagaaggactaaccatttagccttcagaattttatactcaggtggaacttaccaattaccaattacaaaattgttcttgagtgctggcacatcatcagtgccccacagtaacaccaataaaaggtattatgctgcttcgaagttagtataagtaagcgtcagtcaaagattcacctaatctatagaaccatggcaggggaatgcttgatatggagcccatatgttcccgataaaacacatttgcctacctacagcagaatggttgccagagttcaaaccatcacgcatgaaaatccggttctacctcagctggatccgttcacacagtaattgcgtaccaactgccaagaagatgctctaaactgtacaatatgcttccaaaaggaacaggttaatcgaagatgctccaaactgtacccaaaaaaaaaaaaaaacactgaatgcctccaaaacgtataagattaatccgaagtggtgatcctatttgtatgaaaaagcgctggatgcctctaaatgtacataaaccaggcaagccggtcccagttcctatggagctcacgcagacttagtagacccatctcttttgcaccgtgtaaatatgctgaggtaactgcagccaggcattccaacaatagctattcatggggtgccatttcatgcaattctgaacatatcaggtgttgattaactccatagaaagccggacaagtctcagtagctcattgacattgttgaagttaaaatctaaaactgttcttactgaagcaagaccatcgtccacagtttttcccctttcctgactgctagcagcagaagcaatagcaacctgtgatttccgagttgcatcgaatgcacaattgacatcatttgtctaaagatcagaaaaaacaaacataagttagattccgaatatcattattcgatggcaaagcactgaagtttcattatgctaactcattaattactacaatcacagtcagttattgatgatgataaataaatattcaattcaattaaaaattggttccatgctatctgcttcctgtggaccaatgtggaagcatatttgccaagcacaggatggtgtccaaaacagggacaacaatgtttaggtaccagtaccactctcgattgttttttaagttgcatattcactttatgtacatctgacccaattatcaccaaaccaaaagtaattttggtagacatttgaccaaactatcatttacattttctatggtcaaagtgtaaacaactcctgtcatcaaagcggatgctgttcatattactgtattaaattgcaatatttatggtattcatggtttcgctactaaccaaaattacggatgtaagtggctaacccgtgaacccgcttataggtcaaaataagcgagttcgcggcttattttgatctataagtggattcgcgggtagccacttacaccttacccaaaatgttaatgagttaaatgccattttgaccattgataatgtaatttcaatttagctattgagaactgcctgattttaggccctgtttggcaatgcagtgacttttcaaaagcactcattatctatatttttttattaaaatattagttgatttttttagctttaacagcaaagccttactggaatcactaaagatttccctcactaaatagattccaaagcacaggatagcagtagcaccatagcacaaataaccactactgcctgtactaattgagctaaagaaaatgttactgcatcaaactcctactaattcatttccaatttgaagggtatagtcgttaatatacattgttcaaatccccaaaagagattatgtattaaattgcaattggttctgcctgtacgaaacaagcctccacagcacagagacataaaccatagactagaaacagttcacaatggaacagcttgcatatccatatctataaacatgttttcatgaagggacagatgaaggaacctagtaataaaaagattgtaccaggctaaaggtaaatagcttgattgaaagtaacaattaattgggacatgtgcaataaggtacttacataggcaagtaacctcaataagtgtgcttggttacgaacggccagtggcaaatggttgccagccacttggggtgagtttccacccttggttgaaagggcctttgacaatccatggctatttaaattatcgatatctgaggcagacgatgatggagattcacctatataaagataagaaataatatacacataaagctccatacactgccataaaatacttaatacaaataaaattttcagagtatactatgaagtctgagaattgataacaatgcaatagtatagaaaacaaaattggtagaaaccagattacatcatgaaaaaaaaactaagtacctatcaattttcaaatggttagattgcagaatgcaccaagcataatttgattactccctccagttctatattaaggtggtgtttgaatctccttaagatgaagatgaagatgaagattaagttttttacgcaaaacgagatggtattaacgtgtgattaattgagttttaattatttcaaacttattttagaacaaatttcatatagaaagttttcgtacgaaacacaccgtttagcagtttgaaaagcgtgccactttaatccaaaacttcatccaagttttgttggacattcgaacacggcctaactggcgttatgggttaatgctgtttggatggcaaaaactgacgttttagctttctccacaactctctcccttttatttctccagaatacccctcatgcatgcatgcaaacagtaaatgctgttgcttcgtctccatccagcggaaaaggctatatgggtatttaataagggtataacaggaaatatggtgactaattaataagtcattggtatttgcaatgctgtccaaaatgtcagttaatatagaattggagggagtacagtttatagtgaccagatagccatatcagcaaaatggatttaccaagaatcgtataaaccaaattagatattcggtaatgccaggtcaatataatccatatatccacatgcaggcatgcggcactctctaggccaacaaatccattactagtatatgcctgtaactgtattttttgtataatttggtttatctagtaaaccatttgtagttacataatacaaaactatgattactatgattacataaatacaagttgcatagccatttgtgatgtgatgaaggaaggatgcaaactgttggagaaaactgtcgtgcacttctttggtaaagatcgatggaacatgagaaagcggttaagggggtaatgtggtcgttggtttgtttggaaggtctttttcgctttgaaaggctttggagtctttgtgctcttttagttttatgtaaggtgcttgagcctctgtgctccttttgtttgtaaacttgtgtaagaactgagcttgttcactcggaatttctgtggctgtatacacccctgttggtgtagaagccgggttttataaattcccattatctaaaaaaaatagctgagccctgtgcctggacttccaaaattctacccattcttgatgcacaacataggaaaacgacgaacaatttggtcccacaacttacattcaaatcttactttagtctgtgagcttttaaaatagtcaatttcgtccatcaacttatacatttggatcaaatggtccttttactgatgtggcgtacaagtagcactgacttgggatttagatgactcagaatgccatgagaagacaaaatataccattcccttacatatcacacacacaatcaatgttctctttcaacaaagaatgcaattcattattctctatgaataccaaatccagtccctacatgtttggatgcacacagacctcgcataaacaagtcaagaagcagcaagcggttattttcatcttaatcatttagtgtaaggcaactgaattgatggtcaaaattggtccttttgatgagctaagtgagaaagttggggaccaaattgctcatcatcctaaataaataaattggtaatactcgaactccagtgagtgacacagtgcggaacaaaggatagtagaagcagcctccaactcccagaaaagctcagcaggaataaaaaggattcaaatatttcaaattaaagtttacaagctagaacaaacatttttttagacatcaattacctggagctatctgtacaaccgactgtagttcttgtcgatccttgcttgcactagggtgtttgtaatacgctgctttgaggtaagccacttctacacatttatatgctaaagcggcagaagccattttattgcatcgttcataggcatgagcacaaaagctggacagtcaaataaaaaaaaaagcattttagtatactgcatttaaaaagcttagttcatatagtttcaaagttagacatagctaaccatacgtgaagaaaactctgatcaatttaatatggatgagtattcactacgtgattagatgcaaccatccaattcgtcatcattcagtgtagtttaattaaaacagccagatttatcttcaatttgtttgaaaaaaagtccactttactacctcaaactattttcacagtccaacctaccctctaaacattatttaggctcacttaatcccttagtttatttgtgcagacatatgtttgcaccctaacctggtactaggtggtattgccagtgtcgagtagtttttaccggtaaacctagccacgccacacatatgtgctgaggtggagtataagggtcatggcaggcgccaggcggagcaaaggtaggatagatcatgacattcatgcttcgcgtggctttctgatttctgcttccagatagttgcatttgctcacgtggcgaggctgtggtcaaggttcctgcccaccgtcaaccgtctccaattctccatcctagcgatcgcagccactaccgcatccttagtaactaataatccattgcagcaacatcagatacagaagatggatgttaaatccagttttaaagaatagtcagatcagatggatgttgctgcgtaacagaattttggttgccatagctgcaccagcgctgtgcgatgcagccgatgctgtgggcctgttactgtgacatcatccatcctacacttttcggcatgctgccaactgtccctctaaattacaggtgaccacaaccacgacgaagtccaagtgagaaaccaacaggcaacagctcattgaagaagacgcagttgctgcccttcaagcttcaaccacagcaaggacatagccaggctgcgtctggcgcacaagacgtgacttgactgatcaaaaccactccacgctggcaataccacctaacaaaactgggttagggtgctaagtgggctggtattaatagattagggggttaagtgagcctacaatgagggcacactatggtgtatggcgggagcttctaacctccaagagctgttggccaaggcaatacttgtgccctaggagggggcgaatgtgggtgggtcttttttgtgttttcagcgggtgtgatggcgtgtttttgttttgtaagtccgaccttttattccttgcttaatgaaatgatacacagatctcctgcgtgtttgggaaaaaaaagtgagcctacaatatgtttagggggtgaagtggacttatgaaatagtttgaggtagtaaagtggactttttcgtatttttaaatacctagactgttttcatcccttggtgaatcgtggtgtgtctttcttttgtacctatgacaactttatataaacttttgctgaaacgaagtatataaactttatagacttattcaatggacatcacaggtagctcacctgcagagttttgcagtttcagaatacatcttcattgactgagcaacatcgcctgatctcgaattgtccagattaggagtttcccaaagagatgcaacatgcagaaacttcaaagccgcttcaaagtacaggcccatactttcaagttcaagtcctttttcctgcagggaaaattgtcattagatacttccaagcaaaattgacagcacaattatgctgcctgagacaacatttaacacaattggtgtcaccaaccttcaaatgattagccttgtgttttagatcccgagcttccttgagtgcaaatgcaatcatattaccatccctcctaattggactcgcagaatctccattttcaacattggaccttaattgtgtgtggttttttgaagcacctggttttactctagtggtgtgaacctctgatttgccttctttcatatgagaatgattatcttgaccaatagacttttgcatatcttgattatcaatactaggacgtaatttctcttttctggatgacatctctatctgcttatttccctctgaaatcaagttactggatccatttctaccttggcgtgaaggagcactatttttacttttatgtccagtggaatcagctgtagccctcgggttaaaacaatcctgctgatcaggttgtagtgtagggccatgcatatccaagatctttttatcaccagggtacaattgattatctactctccccataccggagttatttgtagaaccacgcagaatggcttcacccacagcttgctgcccagtatgtagtaaaccaacttcgtgggttggatatttcattggggtatgcaagatgcttgaatcagcattcaattctccatcttttccagttttcctggccttagaaatcttatcagtgtttgaatttttcagtggtgatgaagatactgattcaacgggagagccctttgcttctcgagaatttttgtttctccgagagcttgagacctttgaagagcttgaagttgcaaccgtagaagactgaagacaggcaacatccctcctagtgggttccgccaagttcaagacctgtctgggaggttgattatcccatagttctgatggaccttctttacaagtaacaaatttgttgtcagcaactagctcattatcttgacgccttccagcagaagaaaataatgcatttgcatcctgaacttcttcaggcctagcttcggacttctttatctttgataatctctcgttcaaattctcattatcgccccctttgcttgtgtggtccattgaactgagccggttatcctcccattccttcactgtcttctttttgccagacaaatctaatgtttctatgcctgcacgatgttctttcatcttctcatgaaaggccacatcatcatcattaattctctttgttttttccaaaatatcaaaccttgaagctttttccttgcgtaaagaaaactcatcttgttcacatgagtcctttgacatttttgcttttgcagataaagctttggtttcatcacgaactttgttgccagctaaatcgtattcatttttccaatctttgttaaagtaatgtcgatcctctttttttgtcttcttagatgttttgtgctcatctcgatcaattcctctcctgttttttgattttgaatgcttcttcgatttttctgtaagatctcctgtatttaaataggaattatatgtcagtaaacaatttaaataactaaacacagtatttactgaaaaatatcagaagataatacatatcagctaaatataagcaataaacatgaaagagagcagaacctccatctgagtggctactgcgactcttgtgcttagacttatgcctttcagaagctgatttgctctgtggcaccagatcatgtgtgcttacaggatctctgtcattagtataatgttcactatcaacaacttctctattttttgcaggggcttgttgattgctcgtgagagtcatttttgcaggggcttgttgatcatgctcgtaacagttttcgtctttcagagcatttttccttttcctactctgtcccagttgtccacttatattgtaggtgctagatgctgctacacttgcatgcgcagtgtgagggccacctgaagaaacaccagcggcagggatttgagtgacataaagtgcatttagagcatttgttgtttcatcctcactaatgtcgcatttgttcatcccaggtctgcaaagacaaatttggattgtatttttcagtaatggaattttttcttccccaattgtcagaccactcagagaaagaaaactgcatgacccttgaattagagtgctacctcaatgttgaatttgcacagcttatggaccacttaaaaatacttttttttttgtttaaggcggggtggatgggtgttcggggggagatatcagaatctagtcaaattacctgtctaatcagaaatcgtttaaggtgtacaaagaaattccagatcaaataactatatttaacaacgtttaaccatgtactaaggacaacttaacatatgtaaggtgccaattgaagcaagcatgtatggtgaggcataacactggataaatgcaattctaatcaaactgaactagaacttacagccagtcaagcatgctgcatatccacttttttggaagcatggaagtgtttgtcccgtaggggaggagacgccatttatgacacatgtcacagcatacccaattatcctctatcaaaacaggtgcaggaagagaagctgcatttgcaggtccaggtataatcccgccatttgacggcatatgcaactgctgttcctctgaacctggaaatgtgccatgctttacactggaagggatctccttttttgctggcccagttatatgaagttccttctcattatcactgttcatcatcttctctttccgttgaccctgaacacttacactctccaatgaagccccttccttgtttcctatagatctcttaggcagattttcactaaggtctttatgagatttttctttcgatttattttcaaaatgattagacttcaaatgagaatcagttgccccatcattaactagtacagaagaatgggtaaaattaccatcctctaagaaactagatggtgctacaaaattagctttgtgttccttctgcattcgtttgacctccgttctagagttatcttccacagttctctcactggcaaaggtttctttaccatgaattgtcttcaaatcatctgatgacccagcaccccagtccttgtccacattgccttcaaaatcatccatggcaggctcaaatgttctcataggttttactttgctttctttcttcctatcatacggagaaaatttgtgactacttatattcatgtcttctgaagtcctgtccactttactcgccttaagttttactttcccccgtggtgctaaacaaccatttcctgaactgtcaaaactactgttttcttctatatgctttgttacttctgttttgactgcttcgcttttaactgttcccaggtcattgcagcccatctgttgtttcggtcgagcatctttagttgattcttctgtgaattgacttacaccttttaactctgtggttggggcgccagaagaacaggttatatcatgtgtgtctgataaaatcactcggctgccaggtatttctacattagcctccttgcccaatattgcactagtattatttgcatcttttctagtctttgtatctatggacttctttttcttgccatcaggcttcattttcttagccacatgggctttgacatgcccagacgaaagagaaagttctgaatggccatcaactgctctaggtacattttttaagtccagattagtttcccatttgttaaccaatggggtgaccttattcgtcaatttcagaatgtttccatgcagaggtgacagcaagaatcctccaggaactgaaaagtacgtcatgatctgattgatcatgcagataaaaatataagctattataaccattgtttgactatgcttaatgacatagaagtgataattcagtggttataaagcatttatacctgcaggatggtccgaggagattcatatggcacattactacacactggagattgaccctcatgaccatcaggacttccttccatggatgaagaagaagaaatatcaaggcccaggccactgtagatagatgcattctttcttgccaaagtattagtggaaccaactttgatccgaactttgagtgtcttctggtcactaccattaaatgagctgtccaaggaatcagaacaagcaacagagtccttctcaccgtttgtgcttgagcatatttctcttttacataaatcaccagatgacggtgcagtggaaccattatttcgggagatagattcatttgccacagttgaagggtattgacccatgctctgcatttgtaatcatgacacatgaacatacgccagaatatacattggttaacagcacaaggaaaactaataaagcacctcagcagattgttgataaggtgatcttgaagtgccaacgtttgcaaccttgggtgggcttctgctttgaggcaaaggtggaggtgagcgctggtatgtgggcaaaaacgaaccatatccaccgtattttgatcctgtcaaaaagtttttcccacttaatatgactgaaatgcaatgaacaaaagcgacaagtacagcaactactagctctttacctaggttatctgcggatactcctccttcaaagtctttctgaaaatgtccaagaacatgttgaatcttttcatcctgagaaaaaaaaaacatggaaagcaattaatgaggaccagagataaatgctttgatcacagaaacggacatatcacacacaagcaaacataaaggtttctgggtttcctcaaaataaatgctctcagttcgtttttacttgtaatttacgacatcaacacagtctccaattcatatgttttatcattgccttctccaaccatacatttattaaaagaaatttgaaatataacaatatgaaagcaccattcgttacaaatctagtaataacatttttacatttcaaatcttagtatgtttgcaaattagggtttatgttttcaagatttcattgcacgcattccataacggcatctatttgtgaatggagggagtaactggtctcggaggcaataactgcagcaatcacctaaaaacactaaaaagaccatgtgtgtgtgtgtgtgtgtgtgcctgcctttaacagaatttcaacatcttttagttagggtgtccaagcaaaccaaacacccttttgaccataagtcagaactttggataccagatggggtcaatcaacaagaaatgaatgccccaaaaatggataacaattcttataagtcggtaaagacttgcgcatttaattaaaagggaattattacaatttaatgtttattaatgggtcgtttagtcagttggcttttaccgcacaccaaaagtggattagtagtaaactcaacacatcacagataaccgaaacaacgaggcaagctagcatcgcttcacttgtgaggacagcgcaatgaaagaagcttggactaaattgatcattgcgcttacacgaatcacctaaacgagcagagttcaccattcatcctccaaataattcgaatggaacgaaggcgcttcctcaccctaccgagacaaagacgaaactgagatgttgatggtaaccacttaatttaactaaaccaacatcctgcctaccaatcaacgaactgcgaaatcgtgcaaaagctgccgcgcatctcctcccaaaaccataccgatccagcagtcccccgcgctgaacggcgccgaaatcaacacattcattcgttcattcattcatttccgcgaggccacgcgagagagagggaggcaacaaggatgggtgggggcgctcacgatgtaggagaaggcgacttcgggatcgaggcagagcgcgccgccgccgccgtcgtcgtcggggaaggcctccccctcctccagctcgacgtcgccgtggcccatcacacggaacccctcctcctgccgcccccgcaccgacagcatccgccgccgccgccgccgccacccagctccaaatcgcccgctccctcgctagggtttgaaggggatcacgcgattcggcggctccccgtcgacgctggctgtggccgccccgcccccctcctccggcttcgacctcgccgcagatattttttaccgcggggcccctccgattatctctatttctgtttctatccctctccctcctgtctctctctcaggctcagcttagctagagctactcctagtactaggctactactactagctgtgtatgtgcgtgttgcgtttggttggttggatggttggttggttgggttgggttgggtggcggcgcgtgaccgggtcgtttcgtttccttgtgtggccgccgacttggggcccatcacctgacacctgcgggtcggtttggtttgagatatgcggacccatcgtttatttacggaaaaaaaagtaatttatgattaatatatatatatatatatgtatatatatatatatatatatattattagcgattaaaagacttaaaaataaaatttgataaagaaaacttcaaatcagctttaaatttaatgttgaaaattcaaattttatctaagggtgtgtttaatttttttggtgtaaagtttttgaaatacacggacacacatttgaagtattaaacgtgcactaataacaaaagaaattacatattccacatgtaaattacgagacgaatttattaagcctaattaatctttcattagcaaatgtttacttataacatcacattgtcaaatcatggcgtagttaggttcaagagattcgtctcgtaatttacatgcaaactgtgtaattgttttttttatatatttagtatcatatgtatgtgtccaaatatttgatgtgatatttttattcaaaattttttgatctaaacccggcctgataagcataaacgaaaaaagatgtgacccgttatgcgatgcgtttcggttccgacacgggagcgggcaggccgggggtcacgccaacggtgtttgcgttgtgggcgtcacgtccgcggtacgcggcctcgttcgatctcctgtgggcctttcttcgtgggcctccgccacagccacaccctacagcagtatagcccgataggcgagagcgcgtgaagtgaattgattgtcttgggtgcaacgggagcacccacaacaacatcagagtggcgcagcggaagcgtggtgggcccataacccacaggtcccaggatcgaaacctggctctgatacacgattttttttcatctcaattactactctccaattaatttttattttctcttactactctcgaattactctccaattaatttttattttctcttattactctcgatttttttaatgtcttctcaattactactctccaattaatttttattttattttgtattttgtcatctcaattactgctctccaattaatttttattttattttgtattttctcttctcagttagtactactcttgaattttcttctcaattactccctcaaactcctaatataagctccaattaatttttattttctcttactactctcgaattactctccaattaatttttattttctcttattactctcgattttttttaattttgtcttctcaattactgctctccaattaatttttattttattttgtattttctcttctcaattagtactactcttgaattttcttctcaattactccctcaaactcctaatataagagattttactttcactgtttgaccattcgttttattcaaaaaaatttggaattattattatttttgacttaatttattatccaaagtattttaagcataacttttcattttttatatttacacaaattttttaaataagatgagtggtcaaacaatgcaagcaaaatgtcaaaattccttatattatagtacggagggagtaccactctcaatttttaattctattttattttgtattttgtcttcttaattagtagtactactcttgaatttttcttctcaattactactctccaattaatgtttatttggtcttaccactgtcgatttttttcttattttgtcttctcaattactacactctccaattaatttttattttattttttcttatcagttagtactactcttggattttattctcaattgctactctcgattttgttatgttgacttctcaattactactcttgatttttttttagtctcctcttttatttctttttgttttctgaattactactattgatgtgcgacagatatcgtcatcagggatgcatgactgccaatttttttcaatctattaaacttcatatgttttgcctttcatcttgctaacgatcatgccgtatatcaccggtcgaacgatgcttccccgattcatctgcatgccaatgccattttgcctccgcccgaccggcgacgccaaaactgaccagttcaagaagatatcaaagcaacaaattctactgtacggtaaataatcgaactcgatcgaatcaatagtcaatctaatctggaaaacacaagtttacatgcatactaagcttaacgagcagtactaaaggacagagctcctctgacataaagtcagagggacgtgaatatccctaacaggtaggtcctatctttatggacacacgtgtcagtgatcatgtctctttacgtcagagaagcctcttccgtattaagaaagtggtagttacacagagcacattagtaattactccgtaaatttcccaaaataaattactccgtaaaatcgaagagacgaaacaattgatacatgggcttttattgattggagagcagtacagtgtctagctagtaccataaactgagatgccacgtactagcatgcagatgcagtacacgtgtccccaatcatacacgtacggcgatacacgcatcgaccagcagctgatagatgatcatgtgcatacatgtacttagcccactagcaaaattctaatcatcctacaactcagaataaagaacgcggcaacagatacatacagtcacatatatatcgcgacttaattaattaagcatgcagatatatataataattaattagctaagatgcatgcgattcagctagaatgagctgcagctaacacacagtaattaggtcactctggtcagtcgtggtcatcacgcgtgcagtacaagcagctcaatacgtcaccctctcactgatcgatcaggccacctccccggccggcagcgccggcggcggctgcggcggcggcgggatgtcgacgacgacgctcctgtggtcgatggcgtcatcgtcagctggccgctgcggggtggccggcgccgccgcctccaagtcggcgtcggcgtcggcgtcgacgtcgagcggcgccaccgccggcgacgcctggagctgcatctgcagctgctgctggtccttgacctcaacctgctgggcggcggccgcctccgacacggcggagttcttcttggggttcttgtacaccacgtacagccccttttgggccagcccaaccagcaatcccagcacgttgggcgtctgcatataaatgcgatattaataatttaagggagtatttaaacccctcccgctaaaaagttgttataatataattaaaatgtaattacttcctccgtccgtttcacaatgtaagtcattctagtatttaccatattcattagcattaatatgaatgtggaaaatgttagaatgacttacattatgaaacggagggagtacatggtaactacgatataacttacaacactataaaacttgcattcaactagtattgaaattttacacgtaacatgtgtgaaattttatttttattaatttttttcttcatgcacaagcctcgagaaaagttttgagctagggaaaaaaacttgtgaaaattttctagcaaatccgtaatttaatcaatatatatagcttaatttattgttctaattaattactactggaatatatgcggggatgcatgcagctggctacaacaaaaatctcctggttaaatataatcgtgtgtgatgagtacgtttacgtagtttaatcagggctttttaggcttgcgagagtacgtaagctctgctttggcgaaagataggttatacaagtgatgaatagtggcggtgatcttttgtgctgtgctctcgcctctcggcagaaaacatctggctcatgggcggtgacacaagcgacacgcactagctcacatcactatccatgcatgattaattaattattactacctaataaaagcacaacaattaacagttgcttagagcacccgcaatggtaaagtaaggtgctatctataaaacatgtacatctcagcaatagactagattaatagtaaactacttcaatggtatgtctacatgggtatctatagctgtctaatccattgcctcgtttttctctatagactatctccaggttagtagatagctttgctctctctcttcatttaatctcttccaagtagtaaaatatgctgacatggatctcttgtagagagcctatagatagccattgtgggtgcccttaagctggctagctagctacttcctccgttttataatgtaagtcattctaacattctccacatttatattgatgttaataaatttagacatatatatctatctagattcattaacatcaatataaatacggaaaatcttaaaatgatttacattgtgaaacggagggagtagcttgcatggctggatggactccttgcttgctactagctagagatgttgagaaagaacgggacaaaaacaagtaaaaaagagaaaataataggacgtacggcaacgaagaagtctttcatgaggaggccgtagaagaaccagacgacggcgctgagggtgaggaagaaggagagccagaagggcatgaactccacgctcttggtcctgatcacttgcctctgcaaaaccaaatttaatcaaacttgatgttagttcttgttaatatgctaattaattaattatcttataatcaaattaatgaaacagatatatagttagatgaagctatggtattttttaatagataatatcgtatacatatttgatcatttgtgtaattaaaaattatataattatcatctattttattatgagttgttttataacttaaaaatatttaaagcatgatttatatcttatatattttatgtttaaaagttaatggtagcctctattaacaaacggaggtattatgtatgtgactatgtgaggaatgaattaatgcgcttacgatgatggtgagcggggcgacgaagacggcgagggcgaaggaggcgccgatgccgccggcgagcgtgacgcggcggtcggtggccttgacgaggagctggagggcggcgacgacggcggcgaagagggcgaggttcatggcgcagacgagcttgagggtgaaggccatggcctgcctgggggcgtagaggaggtagacggtgaggtagagggactcgacgaggcagccgatggagttgatggagaggaggaggaggtcggaggtgaggagggcgtagtagagccacagcattgcgctcagcagcgccaccgcgtacggcaccgactggaacgactccgtcgacttcttcttgtacacccgataaaacgtcggcctgcattaatttgcattgcattcacatcatatatatccattaattagcttaacatgttctctctctttttttttcaagatgcatgcaaattattaacagatcatggacttaattagctcaatgctcatgaagctagtaggtacttacactggtgcaaggatgaccaagaacgacaatatgttgcctgcaaaaatcatttaccagcaataaggaaaattagttagttcgagtggcaaattgaagtataatgcatgcatgcatggatgcatactatacttgttgtggaaaccactaatactactgcatgctagatgtggttagttgttatagaagtgtgtaatctcgaattagctagtgtgtgcatgtgtgttacctacgatccccacagcaaagaccaatgcctgaaccatcttggaggatatgagatgctagcttaattagagtttgatcagaggatgatctcctctcctgctctacacaccagtattaatccaagagcaatttaggagatcaaccctctagctagctgtgtgtgtgtttgctactaccacctgaactgacacaggttgctcttcctgggcatcgtccctggtatttatagggccaagaaaggagagcccaacatttatattattagtagctcgctcgatcgccggatcaactcaagattagctagctaaattaaagaggccggagagatgatcgagttccatttgcttgtttgatcgagctttgccagtgaatgcatacgtgtggccgggcgcactcacttttgcttgcattgatccccggcctaatctcccctggaccctctctactgttcatgcctttgactggcctatgtgtcggtcatccgttcatgacatgttacattaggctagggcacttcgactgacacatggaaattcaccctctacatgtgtcgatggaagtcccaataatggaagcatgatgataatatatatgcatatgtagctatatgtatgtatagcttggtgacagcttggcatgcatagatcgattcaatacatacattcttgatcactcagaaaaaaattatgagggtttgaaccaaactatgtacatggcagagtctcgacgtttaatttgttcctcagatattgaatttggattgcaaacaaatgttagtttcaaacccctagctagctaaaatttcatgtaggcggtaatttcagcattaaaaaactcttaactatccaaacttggcacgcaaattggggagctagctcaaaatttgtttgaaagtagtcttatatttgatggataactcttgtttgtttttctatacattcaattgttgtttctaagtgaatatattgaacatctataacaaaccaattaatctagctagctacaccagttgattaattaaaggtatatattttcttctccctatttaattatcatggcaatttcttagcttgagagcagatgttgttgctaaaacgagatgaacgagtgatcaggtgctttgacctttgtttctatggttgacttttcctttttacattgatggagattcaactttgagtaggtctgcatttagccttcctcttaataatatgtgagatgttttttttaaaaaaaacaataatatgtgagattgaaagagtgataatatatatatgtaaacagccaggggcggttgtgttagcgtcggtgtcagacgacaccgacgactttcagcaaaacctatggttaaactgcttatccatatattataacactatagtttaagtataattagtatgctatgataccaatgaatcaattttatggatccaccacggtaattaaacagccaccaaatagtttggtgtttggaattaatcaccagtcacaaaatccaggtttgatttttttccccaaaacacaattttggctattaatctgatgatttgttttatatcatatataccggtgtgattaattgtaatactatgaaataaatttctgaaaaaatatgcatattttctttcttttctatatgcacctatacaatttatattactacaatacactttgactttttctcaaagttaatctttttaaaataactaaatttacagaaagtacaacaatattttcaatacaaaataacatattatcaaaatatatttaatattatatttaatacaactaatctggtcttataggagttgctatattcctataagaagtttgttttttaaaaaaatcaaagcaacttataatataaaacggagggagtattcagtactctatcataaataattgtgtcttctgtcacttttaaaatttggagtacagaattactaaaatgttttaattggacgtatgaaaatcatacggatagatatgctcaaaaactacaatcacaaattagtatgcacagtttattgccccctttttttttttccggttttgctaaaaaactgttgacagttttttgtttggaaaactttcgattttctagccattagatgtgctctaggattcgtgcaacatatacacctagaataaaaaaaatcgcatgggcaaggcagtcatcgaacatgatgcacacgttaagctaagccatgcaccttcttattagcaataactcttttttattatatatcacttacaccctagttatatatcacttacatcttaattatagagtagttacataacacttacaccctagttacatagcacttacacactagttacagagtagttacacgatagttatagggtagttacattgtataaaattatgatttgcaatttttttaggagcgcatattacttttgaatttgaaagtttttttcccttctacatgtagaccaatttcttgttgttcaatcagcttagacactaaaattcatggtttgtactagtgtggattgttcccctataaccattgatgacaaattctgtagtcaaaaaatttgaaagttttggactaaaaaactgtcgacaactcccagctagtcccatatagaaattagcgcgataaaagttgcaacgacgcggagagagtaccttatcgatcgatcgacatccaaaacacaacaggtatcgtctgtgacccgaccgaaacttcgcttaattatcgaaagtgcttttcaattcgatcgttttctttaacatcaaactaacacactaacgcgaccaaaagttaaaaagagggttgggcacttctgcatgcatgtggataccccatatctttgctttgaagttcccattggagataaatgggttaactaataagaaagcgttttaggccagctatagtctcaagcttagctgcatgcttaattagttaattaggaggacaaattaaaactgttgcaatcgcacgcagcacgtaaacaaaaaaaaaaaaacccctagtccaatcctgtcctctttttttttacccatccgtgtgctgtaaaaatccgtaccggcaaagtggattagcttaatttggacccgcggtgaaagtgtgttacgacgcgcagcttagccctatagctactagctagtagtaagcttttgtctcccccgcgtaggcgcgtacgcgcgcgtcaaaaagcaaaagcatgcagcagcctacgcgcggttaggcctgggtgtgccggcgcgagatccgcaccgtccacgtggggcgacctacgttacgccttacgtggggtaatctcagccgttgacgtgtttctccggcgaaatatgttgtggttttttttttgttactaaacggcggctaattactagtgtctgcatgcaaaactaaaaaatatatattacaaaacgatatgagtgacaaattaacaacacactgctttacagtcaaaacaaaattttatggtcaggtcagtcgtcccacctatgaccaaatgcatgtaaaattaatcaattttgcaggcggttcaacgcccgcctgcgaaaatggcgatgccctaatagatccacgtatgaaaatcgattttcgcaaacggcacccttcagaccttgtaaaaaaaatttgttaaaaagaaaccaattttcacaccatgtagacacctatttaaatacacattcagagcatgacggtagaacatggcatgtaagaattttcaacaacagtagaacaatatcaacattgtcgtcgcagccagaagcaacacacttctggtcgtcatcattccatcacccgcgttgtggaatccgccttcttgcccacacgtcgctagatttgcccttccacttgcctgccattgagggatatgtggccgtcccaaggactaccgccgttgtggacgagctcgcctaagagggggagtggatgcaatggatgatgatgctgccaccagatattctctgtacactaaagtttaaatcatagtgcttatatttacgcgtatgatgtgaaaaaccattagtcatataatgacttgctgctggtgtaactatatagaattgcccctcaaaaagccacagattatttaagggaaagtagacgaactaataaatatgacgttttttatcattcaaaatgagcaacatgaaaagaatgggcaactaaatatatcattaatactaaaatcatttaaaacttataagggatgagatatttgtggccatgaacgacagggatagtggtatctggcactttgcatgagaagggcaggccataggctggccaaattagtaacttccttcctcaatccttttcctaccctcaccttattcttcccaaaatagttgggccatcttcaaaaatgccgaaatttcgattaatgtgggaatcgaaatctacaaaagtggcgcctataaaaatgccagaaaatcatttatctacaaagttcttgtgttttaacattgatttcgacaaatatatctattaattagttatagttttatatatctgtgaatattagttgaccatcaatagatgtttccaatagactatactgcatgtaaaaattttctagcgtgtgtattagacaagcacaatctaaataggtctcgtaaaactgcccgagagcagatcagtacatggttagcatagtactccttagactaagtagttattttcagagaccggattgtagaaacaaattatttccttcacgtttcgattttttttaaaaaataaacttttgtatttattgcttagaattaagtaacttgtgaagtttatttatcacaatatttaatttgtttctataattaagtagagctaatctcgctcaataatatgtatgtttcaaactagatcggtctagtgctactccaaattaagttttcttttaaaatgttgtgtattaataaatatagttaagcacctactaatggaaacctagttggtcgctcactcatttcgcttttctggccatgggcgcatgctcatgcgccagatggcatgttttcaggaggcgattgggcctagagagagatagataaccaatccggttgctcgatcggccacttcggcagcttaaatagtctcacatttgctcgcttaattggcagagcactagacgatgatgaggctagctatctagcataacgtcatgcgtgtgcatatagtatccatgcatggaccgatcgatcaggtttccgatatgagatgatatgcttaacaacgaaagaaagctagcatctcacttactagatgcataaacgctcgtatcagatcaggctatatgttgcatgcatatactgtacccaattgcccatggtatatatgaagtgcatctaattatttatgggtgttacaagtggcatgcggccatagctagtgaagacaggtgcccatggacagaatccagcgaccacttcgcctgacagatcatctgccccctgactcctcagccagccaccagatctggatgaatcaaagtagtggacaagcagtcaaattaacaatatcttgggatcctataataactaggagccaacatgacgataataacatgggtgcaagacggctcaagggtgaaaaaaataggcttacttttctcatgagttcccatgttgttctcgaaagagtcaaactattctctcttttcttctctcctccacacatttgttacatatctatacagtggttatataagaccgatcattcgttagatctttacatcctgtcgtgccacacgcaattgaatttttctacgaggcaatatattttatttattgcacacactaccacatgacctgcaataaaatgtaacgcgccctattagtgccggttaaacaaaaatcgatattataaggcatttctcgctcctagacctgcgtgtataagggtagacaaaaacctaactaatgatcccagttagtgctgatttttaatgaacaagtagaactatatgagcaagtcgccctagcgctccaagtgaaataagttcacattatccatctctaccttctattgctctctttatgccctttctcctttctctccccactcaccgaccccaacgagcgatggccatcactacctttcacgattgttccgtatccgtatccctccgggtcaccggatccaaccaccataagcttagatgcggcgatgacatgtcggttgctccaccatggcgaccataagccggagcagctatgactaagatatagaggtgactaggattaggacaacaaagctagtttttttaataatagaaatggtttacatcttcaatctctaccgacatgcacaaatctagtttagcgggagtagtgtgtaggcatatgtatggctatgccgagcgagctgtagcagagggcatcgagtagaaggagcggaactagcacgatggtgtgagaggctaccacacttcatattaattcctcaacgggcttagatcagatccagatctagtaacaattgtaagtatcaaagacatactccctccgtcccattttaagtatagcaatggttttccatgcccaactttaatcgttcgtcttatttaaaatatttttgaaaaaaaaacataagtcacgattaaaatattattcatgttttatcatcttataacaacaaaaatactaattataaaagaatttgaagtaaaacggactatcaaagttaggcacgaaaactcatggttacacttaaaatgggacggagggagtaatgctttacaattgttgagtaaatacattcagtcttaaaattccgcgtccaccacgagaaattagtgtaaccagctgaaattaaaatgactaaattatatctgattgcatgcactgcagcacatcaattaaactatcttaattagtcatcagcttaattcgtcgtgattagaaacgccggcctttcctcctaactgatcaactgagattgggactatatctcttggtgggtgcgcgtatgttctcctagttaaagaactgaagaaaccgctagcttttccatggaaaagaactaaacaaccgcaaagtgcaacgaattaacgatcgatatcctcgttacctcgtagtgtgcatcgatcatgcatgtatgagctagcggacgcgtgctttaattttcaacaatttttggatcgattctgcccactacaccagaatttgttaattgatactccctccgtttctaaatatttaatactgttaactttttagcacatatttaaccgttcgtctcattcagaaacttttgtgaaatatgtaaaactatatgtatacatataagtatatttaacgatgaatcaaatgatcataggaaaagaattaataattacttatttttaaaataagacgaacggtcaaacatatttaaaaaagtcaacggcgtcgaatatttagaaacggagggagtataagaatagggaccacctatacatttgccgataaattttctcctaaaaatttgacaaatgtaattacactgtaacttacgtgtaattacattataacttgcatataactatagtgtaacttgtatgtaactttcacgtaattttaaatcgttagattgttataagatttgtacaagtggggaagaaaaaaatcacagcagacacacatgtgagaggattagttcccacaacctccattttactgaaataacatgttacggagagatttttgaaagttacgttatagttacagtgtaattatatatgtcaaatttttgggagaaaatttgtcaagaaatatatagcaaaattgtaagaataagatggcaaacgaagtgcttgctatcttacgatttgttggtaattaatatccatctttgtatcttacagcatataacttttaatgtttgtcattaaaccaaatacagctttaccatcttactctatgccaaactttggcgggcaatgtatggttggtaccaagtataatcaaatatccagacaactttgactacggtctctccacatttcattgtttttccattcaattatttttgatagaatcggcgagccgtcaatttcatttagtagagaaggggtaaactctataaagcgaaaggaaagagaaaaaaggatttcaggatcttcggtccgaggtaactaaaagaaagccaattatgaagatttctcactcttgctaaggtccaagttttaacctctttcttaattttggctagtagggctttttccattcaatagaaaaagctattaaactgccaactcaatgagctagctagctagtagtaaaaccaaatggaggttaatattgttatctaataattaaggtgagatccttaaaatcaaattaataatcaataatggcttatatcgtttctaccaatagtattactggcgctagttgcatgtagagccaaattaaatctgtattgttgctgattggctagtgagcatttactgctggtttcccggtggtaagtacacatatgctcatcaaacatgctccaaccacacaagtctaacaaattttagtagctctcaaaacttccactcttagaacaacaccaaattttgataaaaacacaaatcaaatattacatatccacattcttcatcttaatgtttattttgacaatgaacgattaaacacgtcctaactattagcatgcctttaattaattactttttatattagtatcaattttattgagtagtgaaattgcacatagtctccacatccatcaaggatgtgcataacaaaaggaggaaaaacaaaagaaaaataaaagacaacataggcatatcgatcatgtcgtcgtcttgtgatgacaccaatatcttcaacagtccagaccatacaacacaactattttgtctaaaaggaacataaggttagcaagcaacctaattaaggatgtgtataacaaaaagaagaaaaacaaaagaaacaaatttaacatagatcatgtcgtcgtcttgtgatgacatcaatatcttcaacggtcgagaccacaacaaaactatatattttctccaaaagaaacacaaggtagcaagcaacctaacagatagatcaatcgtgcaaggccacattgtattttcttttagatgaaagtcacatcgtatacagtactagccaatgcaactatgcaaagcatcttaggcatatagcttagctagttcgatgatcattaagttaataaatatagaagaagaggaataacaaaagggcaccaactcagcatatatattatccatccatgcatcatgcatgtcatttcggtagcagtacgagcaaaaatgaaattgacatgtacgtgtgctacgagtaggggcttttcagaccttgacacgtcccccctctcggctacccaaagtggcatggttaattaaaatttttaataatttaaactaggcattaattaatcacagaaaggctaaacgtttagggacatacgtgttgatgatgtttacacatataggtgcaggtaattaaacgaccgagctaaggaagccaaagcgcacacacaaggggacagctaacgtacggtgattaataggatggtctaactacaagatgagtgttctggaatgttctgcaactgttgtaccttccagtcttattgggaaaccccgatgttaattaacgtggtagggttatagatatgcatatactattaattatgtgtatctctagttagtgtaggatcaagaaaccattaagcttaattagttaccaggattttatggtaacctaatttttaggtggagtaaaacttttttcatgaattgtacataaaactattattgtttcatgatgatacataggtagattggtttgagctaagaaatataaacatatatgttttcatgctatggaaactagaaaagtaataaaagaaccccagtccccaatcagggccggccaccaaagcaggtatgcaaaactggataatatcgtacctaattttatgaaaatacaataaagtcagtatctttttttaacctttaacccaaacataataaaatagtgccactgtgcatgggagactgtttggtttaaacggaacggcttccattttcttctctcccttttccatactttagcacgccctcatggagcggaagctatctatcgaacttgaacactaggatctcatcaccatcaaagagatatacctccatgggcatcaaatctcataaccaattgtcacctgccacggtgagacctcaatgcggtgagaagattaaagggcagaggtcatgaggtgacgagtgagcaagcatgagctagcgtacctggaagtggattgaggcatggtcgatggtgagatcggtagcgttgaggatgtggaagagatggacaggggatgatatcgatggcgtcgggcacgatgctagactaggtgcagtgacgaggtcgacaaaggcgaagctcgaaccgccgaaccactaggaacttatcatgttgaagaataaatacatatgagttataaggcaaatgctccgactgaccgactattaaggtgaaatgacactagtgggacaacccatatatgatgttagtatattttagtacaaaatcattataatgtggtcattgatatatgggttcacagaatatcaatagcaatatcacacaatgtacacttccattagagggactatttcccaacccagttacctcctcttcatcgaccactaagtcaaatattacgggcttattcactttgctaccattttcaaccttaccaagttttggcattgccaaattttggtaaggttgccaaaattttggcaaggttgtcaaattttggcaagatttcatatgtactccctccatccctaaatgtttgacgccgttgactttttaaaacatgtttgaccgttcgttttattcaaaaaatttaagtaattattaattctttttctatcatttgattcattgttaaatatgcttttatgtatacatatagttttacatatttcacaaaaaattttaaataagacgaatagtcaaacatgtttaaaaaaagtcaacggtgtcaaacatttaaggaaggaaggagtacatactaaaatttggaaacaaactaaatgtagccattttttaaagtaactttaccaaagataaggttgaaaatggtagcaaaatgaacaagccccacgatttacgagccacctcctcttcatcaacctagaagtcaaatattcttcatcaacctagaagtcaaatattatgcgtctcatgttttttaccgtggatgtggttagctagcatatttaagcttctagcatatattagaaggtttgagatgcccatgatgctcaatgtacgtgcccggccgaccagactcacgctatcttaactttgtgggctacgtacctagctagctagctagctaagctgctccgtgtttgctgcgaggtggccgaaagcttccatgattcatgcattgcattagcttggtgaattcattccatcatcatacatgagtgatgcagcgtactcctttcgtctcgcaataaatcaatatacgatcggatgagacatttaatagtaaaataaattaagatagatccaaatttatttttcttttgtctaaatttattttactattagatgttttattttagattgcttttacgattaaatttttcatttaatcatatattactatattatgggataaaaggagatacatccttttctttcttactttatcagtttctcctctccttttttttaaaccttttctgtgatgctgataataagtgaacctagctactcgccatcttgtagtttggttctttttgctgtttgactgcatgagtgcgacggtcagatctatcgtcctaccaccaattcaatgatgagagggagctttacctgcaggtctctcatcaacgacaaattggcatggaccatcgacgcacaatgtatctaagtcgttgattacgtggacaactgtatggtcaaagtttcaaagaagttttcgatcgaatctgcgttaaggccttttgttctgtagagaaaacataaaatagttggggattcaatccgaaccaaaaattcataggaaagtctttttaaaaaatgattcaatcatgtctttttttaaaaaaaaattctttttttagaatggattctgaaggaaagttagtaaagagctccaattaattaacctatatattgaagataaatcatttgggtcaatcttctcatctgatttctatatgtttcctactaaacaatcatttcacgcttcgcaattatatgtttttcttttactttatttttcaatctcgcatttcaaaagagcactaaatatttatgaccataggaaatatttggcacttaaggcatgaaccttacggtccaacttttaaaactttgttcatcaacttttactagaataaggagtttccaaagaaaaatattaaatacatttataaagttattggtactttatgtattgttatatttcttatgaaaggtttttgaaatctatgatagaatatttcgaagatatggaataattggctgaatattttatattttaagtatatcagataatttgccaattcccctaaagagtctaaacctacttgtggtgaatgacaaatcactgcaaaagataagctagccgtgctcttaggaatcactatgacacttagatcaatagaagacgcacaactctctagcaagcccgtgatgctgcagtattgtaaaaataaggatgaagccaaagttgagcctccctctccagcttctataaaagaggaagttggccgaactagaagaatacaaagaagcaagatcattcaactaaatcccagaagccactttctaattctagtagtaacatgttaagagtccaccttgctagtatgttggagtaaagattgtgacataatcagtgtaaggtaagcaaatcttatttgtattatccctcagagtttctgaaagggaaaatcagaagtacgatattttgtggatatgaagtagtgttgttaagcatcacttacttgatccttgaactatttatgtgagtttaagttctacgctaaggatcttgtagttctcacacatcatcctacgttcaaaacatgcaagaaaaacctttatctgttgaggaaatgtttcctttgggtagatctacctagggagataatagatttttttctctcatatatttagtcgcaaagcttaagccatttctaaagcaaaacagttagaaatatgatgagcaccaagtaagcttacacaactagtatcgcacaccccgttgtcccattggtctcgacaacctgtatagatccttaaaaatgaaagtaaaatgatattattaaaagtttggtatcagggtctggtcaccactgaaaaatatggtactacctactgttttttaatatatgacgttgttagctttttataaacgtttgatcatgcttaaaaaatatttaatgataaatcatgtcataataaaataaattatagttacataattgtttttaaataaggcgaatggctaaacgtatataaaaagtcaacggtgttatatatttaaaaaatagttacataattgtttttaaataaggcgaatggtaataatgttatttgcaagttgtcaaactttaaactttggttatcaatttttataagaaacttgagagtgcaaaacactgccctcctcttgaagcaccttgtaaagttttacaaagctgcagatttgccatgggttaaattgatttcagaatcatattatacttcaaaagtcccacatttaatcatgaataaaggatctttttggtggagggatattattgttctgacagatgtcttcaggggtatagccaagtgcacaatacagtcaggctcaactgtcctcttttggaatgatctttggaatgaggaattcaaatgcacaagcttcccacatttgtacaatgtggccaagtataaggaagattcggtcaaggatatgtgttctaggcaattggaagattctttcttactccccctatcgcctgaggcatatgctgagttcctacagctggaagaaaacttggatagcttaaaaatccaatctggaagaggtgacatctggagctttatatggaactctgatgtttacacaccaaagaggttttacaaaccaaacttcactgctttgcaaccccccagacctctcttgtggctatggaagacaaagtgtgtcatgaagataaaagtttttgcatggctcttgttctgcgatagactcaacacatgtgatatgttggacagacggcactgcgccaaagaagatgatgatcttacatgtgtcttgtgtgatactggccagagagagacaagactacatctttttttcacatgaccatttagtgcaacttgttggcaacacctagggatccaatagaaccgaaatttggaatttttttcagatggtggtcctggcaagatttcggtttgtacatcggggatttctggagatcttcttcttggctgcatggcatatctggaagcaaaggaatggacttatctttgaatatactcagcccaccttccaatcatggagattgctcttcaaaaaagttcttctgcatatgtgcaaaatgaaagatcctctcaaacaactagtttccgattggatacaaactatataggaatcctgtttttctttcacttttgttcttttccctgtaactttgtaaatattctctttcattttaaaattaaactgctaggcaaagccctggcagtattcctggatttttaatgaataataaattttcaagaaatatcttaaaataaatttataatatttaataattttattatattgtatttttaaatataataaatctatgtataacatttttattttttttaaactaaacaatatatgggaataaagtttgacctaatcatcctaaatgccaactatttattactgggatgaatacctttttcatttcctttttatatataaaaaataggtttaacaaaaaaaaaataggccttgtgaagcacatgttgggcttcaagtgctatgagcccaatcgaaaaggtcaatacagtttgaattagaagcttgcaacttttgttcttgtgagattgggtcagtttctgttcagaagtcggcccaacacagcccaagaaaggcaatgcaaatttgcaatgtaaatctagaaataggtctttttggcaaaattagttctatagcatcgaaagttcttgttttcgtttttatagcattgaaagtttgtggttcactttaatagtatatctccgctacttcttttagcactccgttagaacttccgtcacttattccccctgcccctacgtcttcttcatcctccatggcacagcggtaggcgaggtgtaggatggtgtagtcgatgaactcggcagcggcagacggcatggtctattgtggctgcgggagcgaactcgagggttgctgcaggggcatgttggagggcgacagtagtggtgctcaatctcagggagaaagagacgagggcggaaccatggtccgtggaggcgagatggcctggagccctggagcacggagctgttagattgagcatgccaagctggtggccttcctcgcacactaacatctagcgtggaggaaaaaggctgtgcttccgaccacggtcgattcaaatgatccagtgagagaatcaccggggggagagaatccccacctgaatatattaagaaaataggtaatttttgagaatctccttgcgtaatacataatgaaacactatactctcaggggtaatttatcgattcgtcgagcgaatttactctgttgatagtgcacctctgtcagaaaaaaaatataaaaataaggatagaaataaaaggacaggtagctggagtagctcagatggttagagcgtgtggctgttaaccacaaggtcgaaggttcaagcccttcctctagcgatatttttttaaattttttttagacttttctgctttgctgtttgaacaatttgtgtgagagaatttgaccatttgttgcattgctgtttgaacaatttatatatgtgataatttcaacaatttctgctttgttgatattttttataatttttttagacttttctgctttgctgtttgaacttttctgctttgctgtttgaacaatttgtgtgtgagagaatttgaccatttgttgcattgctgtgtgtgagagaatttgaccatttgttgcattgctgtttgaacaatttatatatgtgagaatttcaacaatttctactttgttgtttgaacaatttattttccgatttgctgtttgaacaatttttttgtgtgagaatttcaacagttagtatgcgtgacatgttttaaatgtgttagtagctttgtactctcagcaagaggaagaacaatcagccatcttatacatcacagaaacttagcatatgatccataatctgcacattaatttgtacacctacatcgaaatcatccatccatccatcaataacaatccccatattacaacaactgcaaattcgcatccaaatcccacaaaaattcacaacaacaacaacatccaaaaattcattaattgcaccatcaccatcgtcgtcaccatgatcaggagatggagtggcggcggcggcgctggaagaggaccttggcgtcggcggtggccttggcgccgagctgctggaggcccggctcggcggcggcgccccggaagtggaagagcgagccgagtcgccgcgcgaggccgcggaggaggcggttcgccgggccgacgcgcaccagctcccgccgcatgctcacctggtccttctccaggtccgtcagccgcatccgcatccgcgccacctccagcttcagctcccggttctcccgccgcaccgacgcgtagctgtcccgcggcgacatcgccccgctacccaccccgctccccgaccgcggcgccgcggcggcggcggcgcacccgaagaagagcgccgcgtcgtgcgcgccgccgatgctggtgttagtggttgtggtggtggtgccggtggcctggatcgcgctgcggaggcggagctgctcgaagtagagcacctgcacggccatctgcacggggaggcgctcgttctgcgccgcgtggctgcacgcgtccggggtcaggcgctggcagtcgatcgccttgcacatcctgtacctctccgcttccttgatgttcgggtgcacctgctcgatcaaaatcatcgagagttagtcgtatcggagaagaagattgcaatgtcgcttgcttgcttgcttgccttgaggaagatgtcgacggcgcggtagaggccgtcggtgacgaggcgggcgtggtcggggaggagctcggcgagggagatgaacttggaggggaggaggttggagtcgagggcgatctcggcgaggtagctgtcgagcagcttcgacgccttcacgaggaggctctgcttgggggacctcgggctgtcgtagtcgaacgcgccgcacccgccgccgacgacgacggcgtcctcgtcgttgctgtcgtcgtcgaggttgaggaacaccgcgaagatcctcgccaccacgtccgtgtcgtacagcgtgtgctccaccgccgccgccgccgccgcggcggagacgggcccggcggcgacgaggatgtcctccaggatggcctggtcgagctgcatcccgatccgcttctccaggtcggccctgcagatgctcgacgccgacgccgccatcgccgtcttgaggagccccgacaggaaggccatcggcacggggctcttcttcgactgcgccgggagcaaccccacgatggtctccaccacggcgcgctgcttcttgacggcgtcggtgtcgccgccgccgccgccgcatttggcggcggccgcgatgtccctcgccatgagcccgtggagcgagttctgggcgtagtttatgaggatgcgggtgaccgtctcctgcttgagccccttggacttgacggcggagagcagccgctggaagaagtcgagcccgaggccggcgactgacttgccccaccagtcccccggcgagtcgaggtcgccggcggcggcggcggccaccaccaccgcctgcggcggcggcggcggcttgagctggtccagcttggacagcccggaggtgagctgctccttgcagacgttgttggcgatggcggcgatgaggcgcgggacgaggttgacgtcctcggcggccgggagcagcgcctcgcagctgcggagcacggcgacggagccggcgatgctggggagcacggcgtcgcggaggaacgcctcggcgcggagctccaggttcttgtcggagaagtcctccgtcatctgcaggtagtgcgcggcgcaccggagcatggcgacgttgcccaccgtgacgtccacgcccacgccgtagcagaacttggcggcgagctcgaacgccgccgcgccgcccggcgtgccgtggagcccgaggcgcgccagcttgccgtccttggcctcggccaccgcccgccggatcttgccgctccgggacaccagcgggaactgcgcgagcagctatgccgtcgccattagcacaccattcttaatctcgatttcttcgtgcaaccaacaagaagaagaagaagatgaacctgctcttaccttgtgcagggcgaagctggacgtgccgacctcgacggtgaggtcgctggagacgtcggtcggaggcctgcatgcaagaacaagacggccaccatccatgtcacaatttagcatgcaaaatcatccataattcatctgattgtcatgcaaaatcttccataattcatggacaggtgacatgaacaatgatcaaaacaatggcgtactcaccattcattggcatggcggctggtgagggttggtcttaatgccctcttcccggagaagctctgcctcagctctgtcaccgtcgccacgcccatctctctctctctctctctctctctctctctccctctctctctccacaaatcacaatggagtactaacagtaagtgtgatcagtgcaaaaggatggcttgtttggttgtctcctagttcagctgcaagcgtgtgctaagcttcttctgtgctttgcagacttgcagttgggtgtcaagaaacttgtagggagagagtagagagagagagagagagagagagagagagagagagagaggtgaagtgaagagaaaggtcttaaatcttataattaggatttaagggctaactggcgagtgtgcggtgtgggagtgcgtgcgtaaagctagagctacatgcatgcattacaactatacaagctgtgactctgcatgagtgagtatctgaaattctgaatatctgatgggctaagctagctctgttcaaaagttgctactagtagtagtagtagtagtagtacaaaataacaaaaacactgctgctattgcaatttgcatagtcattttggctatcttgatgatgatgatgatggtgagggcacacaagctgctgctgcagagtcattttggctaggaaggattgatgagccatgagttacaatctgaaaaaaggagttggggggggggggggggggagtgcgcatcatgtaggctttcctgcagttgcttcttgtctctcctaatgaccactctgatgatgcagggtaagaactgccggaagggaaaatggttagctccaatcatgccgattcatgccaaatgtgtcatggaaaaagattaatcatatatatatatatatatatggatcaaagtggcacaagaacaatgaacagggaaaaatacagggaatgttgccaaattccatcgcctaaattgctgtttctgtcgagtgccgtcactactccatcaggacgtgacagcagctaggtatcaattataagctctagagttgcaaataataagagcaattatccctcaagtgataaaacggtttttcttctaataatgtctcctttggaacacaggagttttataggaactgaactattctcacatctgagcttaatgtacggttttacactcggtcatttccatgagtagaacattaatcagcttcaattaataaactgagtgtaaaactccagaaatgcttatcgtcgatcgaccttgttattcttgctaacctcaagcggcattttgtgatgaacaatgtgatgctcttgttgtcaccttatctcagcatggttgaatctaaactttggtctgatatctcatcataccgctggcctcaagattatctcccaattttgaagtatgtgtgtggggatcccagggcgaacaaactttctgccataaaaatttgcacgggcaatggctttctgttattcttctggtctaaaagctgccccctgctggttgaattggtgccatgtgaggtgcaaatcatttgtggcactgactctgtataagatatggttcacaatgtttatatcttaaattaccatgtggagtactccaaagcaggcttatcatcagcagggtagtttgcataatgcacattaagtcatgagaaatgttaattttaaggcaaatcttgatgtgctattcttttgcttgttgagttttgtagtcttaaagttttgtaatttccttttgctaccaacagaggatcttgattccatattgagaatagcctgctacaaagtgaaggggaataattgtatttaatatacttgattgatatcttagtttcttttgagatgagactactagtatcttaaattatgtttgatcataaaacaaaacaacaaagattgatatcttagttgttgcatgcaattactcgctggattcccgtggaccagcattggcgtttaacaagaaagtgaaaattccatgatggtgcatgactaagccctgggttttttataagccaaaaggaggatcaaaagagggggcttaaggcaaaagagaagcaaaggcaaaggccaaggcttagttaaacaaaagggtaggtattctttggcacccaaattgcctggaaagcttagcatgccagcatatgcattagctcctctctgtcatgtgggccatgcaacctaattaaattgccaatctatatactctatgtagtaggttgtcaccaaccggtttattttaataaactacctaatggctatattggctaagtacatttctttagtgtgtgagtgtaaagcattttgtcagagtcagactggaaatcataaggagggtggcaaagagcagaagaatcttgttgttatttgaaaaaatgacagagccgacactgaagcttgcttgctcccattcgattgtgttcagcctttcttcttcagaaatagagactattattattatcctcatcctaatgctactctttgcactgttaagtaggagtattactaaacaagctaggacacacatgcaggtatcatgaaaagcagcactgctagtactgcagttaaatatacactcactagcttaaagtttactgaattctaagatgatctctctcgttgtttcaagtactggctcgtagtataactttgatgcttgatcacattcgtaggctatcaatcattgagtagcagaatttcactttgtgaacagcaacctccactaaccattctctctctctattttttttagtaaaaaagaacttttacacaaatcatccttcacattttgttccctctctccatttattttctctctgatcgatcgagctttgagcttcaggcgtttattgccagacacagacaacgtttgagttcccccaaatgccggactgctccccatgaccagcaatgcagggatatatagcaacttgtccgggagaagatttcagagctaatctgaaacgacctgacgtgagagagaggacgaacggaacacatgacgaacacgcgagagagggagaaaacctgcgtctcgccactggcgcatcgatggggactgcgactctctcgcttggaatcattaggcgttagcgggttagcgtaggccacaggcgccaattggtcatgtactcctatgcagtactatgctcatggtcatggcaggccgaaaggaaggcgtctcatcatcatcaccatctttaatttgcttagactcatcactgaactactcgatctcttttggctaaacctatcatgcattgttcgtgatcaaagctagttagttaattagttaatctgatcactagagatgatcgatctgtacatgtgtgtacaaccgctgcctgattcgctacgcggacaaaagtactccctccatttcaaaatatttaacactgttgattttttaagtacgtgtttgaccattcgttttattcaaaaaatttaagtaattatttattcttttcatatcatttgattcatggttaaatatacttttatgtgcacatatagttttacatatttcatatttttttaataagatgaacggtcaaacgtgtgctaaaaattcaacggtgtcaaatattttgaaatggagggagtattatttactacttgatgatgatgatctgtgctgctgggtacgtagtaggagtacgcatttacgcaatgcggttgccggcggaaaggggcgcagtcggccgcgcgagctgcagtgcaccgcattgcttgatggagcaaaaaagggcacggcggttcggcgctttgggggctctttttataatctccccggagctaagctaagagagaggctaataatcgtcgccggcgccgcccggctgtgcttgtgcatgcacatgaacgaatgatatgatgcaacttttggccagcacaagcctttggaaattggagtttggaacgtgggggatttacatatcctctggtttccatgaaaactcaactgatttttctgtaaatccccatgtatgaattttcggttaaaagtgatttgtttagggatgtcaaacgagctcgacgtaaagttgagggataataaggccctctttgtttgggcttaggcttattagcttagacttttaagtcagtttattggcttatatgatttataagccggtggatttaatgttctaagtttaatggtggagtcatgcatctatctcacataagccaaaaaagcttctccaacctagcttttggcttaatagtgttagagtggcttatggcttaaaaaaaccaaacaaaaaagctgtttgtttgtttaggtttatactttttgacttataagttggcttataagtctaaacaaagagggcctaagtggacttattccaaaagtaaaatatactggtccaaatcggcccaaacccagggagaaattgcaccatagcccacagggcccaacatcctcgccggtcgccgccactctcgtccctctcccttccccgagcgccgccgcctccctcgcttccagctccgaaagcgccttccccccaagcccagcggcgtcgctgcctccctcctcggcgatcgccgcctccatttctcgcgctcgaggtccgcctcctttgcgccggcggcttgctggctggttgcttccccgccgcgtgcctcggaggggaccggccgtttcttgttgccctccttgcttgcttgcttgcttcctccccctcgtcgccgctcactccgcagcgggggtccccgccatatgtaagcagcatctcgacgatcttgtgtcgcgtagcctctaaacctgtgtgatttacaaggattagggcgtcgaattagacttccccgtgtaggtgtgcatcagagctgttcgacgtaatgcccgtgccgcatggcgatggttagtggcgcgcttccttccatgattgccatgtgtattgccgtattggcgttgaatgagcgaggcttattaatagtccacatcattttgattgctatgtatactattgtttctgttgtgtgtccgaaagaataatctggtcttctgctgcagactgccgcatctgtttttggatctggtggatgtttggaattactaacgtcgagtaaagccatgcgaggaaagctttggacaagacttgcccctttcatatccaagcgtcatgcttcaacctctcagacctcattatcttcatcttcttcgtcatgctccgtgataaatccatggctctttgttggtctcggcaaccctggtgagaagtatcaatgcaccagacacaatgtaagctttgcatctcattcttgtcttggtcatttattttcagaatcctatgacaccctttttcgctgcaggttgggtttgatatgatagacatgtttgcacagtctcagggtatatctctaaccaggcatcccttcaaggcactatttggggaaggtctggttcattacatctgatcccatagagaatgtatttttatattttgagcaatatatactctgttctctcggttgaaagggctgaattgaaactgttgtcttgtctttccattgatgcaggaatggtcgaaggtgtacctgttttgcttgctaagcctcaaacatatatgaatctcagtggtgaatctgtaagcatcacttttagaagtctttccatgttttagtatctgatttctactattccttactatcttggaataagtctatttcgtgtcaactcttggcatggtttaatttttgtccctgaactctaaaacccaaccgttctggttcatggtttattgccactacttatcttccaacagttctgtctcctcttcaagccctcaacaaaatcaattatgtttttgatgaatgcatgaatgtttcttatggtgctaattgaatcacaatgatttgctaagaaccatttccccctaaaatcaattatgtctgagctttattttggttggtgcaaccaaaatcctatcagcaatcagatattttagttgctatgatttgaacttgaaatctcaatacagaataaaatacataccaatgtctgttttggttagttctgtgtcttatttatagaaaggtcgtgtataattcagcttgtagaaatttctttaactggaaataaaaaaatggttataatacactgagcctgatctgatgactattggtgataagtccctttttggcctattgcaggttgggccacttgctgcctattataaattaccacttaatcgcgtccttgtggttagtattgtaatatctaatctttatgagcgctaagttacatggcaatctgatttctctattgtgagttttaggcatttgatgacatggacctgccctgtggagttcttcgtttacaacctaaaggaggatatgggcgccataatgggtctgttgattttataatcatgtgttttaatgaagtaatttgttgaaattaatttgtcatttaaaagactgacctgataagcaactttctgacaacctcatcaggaagagacaacatattgttcccttctaatatttttacttaataaatttttctcgtttgtagtggcaatttctgcatgcacctttccattttccccatatggacatgttctttttttttcccttttacatagcctgagacagccatagttctcttgaaaggtctaccagatataatgacactcttattagtgttctcttattttactcatttattttactattagctatatgatcctattttctgtttgtaaataagttttttttttacattgacaaaatatttacctttctagcttatcagggtgaagagcttgatataccattttcgtaagaaccgagaatttggtcgattaaggattggtaggttcgacatctgtgttcatttccctcccttaatgtggataaatattcttatactttaacttattcaggaattggacggccacctggccaaatggaccccaaagcttttgtgctccagaagtttaataagaccggtcgagaacgggtaaatatctatatggctagtacttgttagcgtcatgcccttttctgagtttttgtacagtaaccattggatgatttactttcataattctcaccggatgatcgtgctcatttgctgggatatatccatatgaccaaaaccatggctatattctgcatggaagtgagccgcacctagatttattctacttcagttaaatctgaataaattttgttgtgctatacgcaaatgagagatgatttataggcttgcaacatgtctatgtttagaagattaccttctggtcaacttccatgtggtgtgccaagccaatcctgtgaagtttacagcccttgagatctcttaaatctcaaattgttttaggtaataatgtcaccatgtcctcaaaattgaactgctggggttcctgaaggtacttggaggacttgttatgacaatctctgtcactcattagcgtttttttccatggaatcattctggtacatcatatttctggaagcaccatatttgacataattatttcactgtcacagtttttattattctgtatgtagcgaccctgaagaattgtgctgtgacaggtagtcttacgctttgcatgttttgttttatcctagattgattcagccatagaagagggtgttgagattcttaagttggttgttaccaagggtttgacagaggctgcaagatcatcaaatgtggatcagaagtataagcatctgacaacacacgacatgcaactgtaaagatgatgacagacgctgcttgtccgagagcgatccactattacctgttgaatgcctgatgggagaacctggtaacatctaaactgcttgattcattgatttgccaaacttattacaagggctgtcagccgtctcctttgcattggatttgtaagttttgatgctctcaatcttttttttttatacttttgaacaactgattcaataaataaaaacttgacggttctgtcagcttcaagattctatctaccatgcgctttaaagataaagctgatcatttttctttaaaagaagatggatatccattttacgcccgtattcagacctattacttatacaaggtgctaaaactcttcagcttctaccccatggactgaatggacggagccgaagaaacagcaaaagtacacggaagaggatcctctaacttacttccctctgactttgagtcattgacatgtgtacccgataggtaaagagcccacatatcaatgacacaagttagaggaaaataagttagaggattttaatccaaagcacacaagagtaagtagtactttccgtaataccatacgttctctgaacaagctggtaatattaggaaaaccacatgagcactgagcacacatatacatgcgccaagcagccctagattattaactaattttatttgctcttcagtccaaactcagcgtcgaaaattgcaatttgatgaacagtgatgtattcaacgaaatgacacttactgtgaaaacagagatgaacacagatttttgtgctgcctcaacaagcgcatcttttctgatccatttgaactgaaatatagggagaattacacaagtcatggcaaacagtttgccacgcacgacaacaaaacaccccagcaaactgcaagcacaaacactttttttttcttttttcttttttgcgaggacacaaacacctaattatatgcgtgcacacaattattcaacactcacaaagaattaaagacgttgcatgatgacaagatcatctaggcatctcatgtttactataggaattcactgctggcacatggagtgtagtataatatctagattatggggataggcttgacgaacagctgcttgatgatattcatgctgagcttgttgaaggtgtaggcgtcttcgctgccttggtagaagaacattatgctcatcgctaagttggcgactcggttcacagccggcacaagcgaggaacgctcaaagcgtgcttgattgatagttttccatgcgtcttcgaccagattacttatcacagccgtggcttcctcaccagtgacattgtgctccttcatgtaggactcaacagaggtggccatatctagtttgcccttcccgtgctgtgaccaacaaacacttaattagttactccctccatttgaactgactaataatgtcaaataaaaaaaaacgaaggtactcagttcaaatggagtagtattttatagaggattatattatatcccatgcacatgtcaaaataacataaaagattttgctaaaataaaaggacaccgacagaggataacattaatgaatttgctgcagctttgctcatggaatagtataaacaccttgaatgcagccaagtcatcctggaagcgtccaatttcgccacaagccttgacagcatcggtgcaaccaaaggcccattcaagggcttcttttgttgctaaatcaccggcactaacaaatgacacaacagatagcattgaagagcccgaggagatgatggacacatccaaatgttcttgaaagcttggtatgtaattctgatgaaaccatacagcttcctggaggtaagacttgcataacctttgatactgcaggtgagaaggaaaaacaaatcttgatgaatgataataaaaattaatgcgacaccttgatccaagccgaatatataatatgctatgtttgttagtggttttttagctccaattatttcaacggccactaagtgaacaaggaaaatccacttcattggattaattagcattcaagtacttgaacattcaaccgatttatattttttttgtcagctcaagaaaagctaaatgtttgagactctgctaagtgtatcttgagcaacatggtcaagtggagcagataagtcactcatttttggcttacaccatggagtcacacccaggaaagggggtggaccctacactacggatatcgtgttgtaagaaccccttgtcatctcgttaagggccaagtggcattctcacatatagaagattggtggatgtttgtcaccacatcacccttgggagcgatgcgcaggctgcagagcccatccatcgcattaactatagattccttcaagttgcctctcagcaatgctaagcgatacggtgtattcaagacgaccaagcctctcttggaaaatggtttttaaagactgtagttggactcgacgtggagccccatgagatatttattgttacaatagatcatacgaggagttagctacttagctcaggcttatgattgtataataggatttttgtctctcgtagtcgtaggagagagagccgatagccgtagggtataaaaaacacatctttagatcctatagaggggtgaaatgcatgatatgggcaagaaacctagtttcctactatctcaagagctcctaattataacttttacgaatttgcttgatagtgatgaagaacaagactagggtcattatcctttgggaggcccaaacctgtattggtgatcatgtctttctcgctcccgggcacactcggacatgctgtttagcctatttgcactgagagctcctagttgatcccaaatacatgttttctcttgtctgccgatgctcggacgtctacactttttttttctttctctcccttcaaatccaaatatagcggaaagtactggtccttgggcttccgttagctttcattcaacatgttttgtaccaccaaaaattcgaagataattctcacaattagacattactaatagctttggtaaaattggtttgatttcaacaactaaaatttggcacgtcaaataaatcagtcaaaacagtcaaatttgaaaattaattaaaacctaattggggtgcatcaaactctacggaagtatgcacgttaaataatttattcaaatattagtttatttacggtggattaatgtaaatttttcataactttgtccatcaatataacccctttaaaaattaaagcaagttttaaccagtcctcttttatgtaaatttctggaagcaagtcaattcaattcaaatttcacattttcactttgacaaatggaaactataggtactctgtggatgcagaggcgtatccagaattttattttagggtggtccaatttgatatttagttttttgaattacccatttcatgtttccaactcttaattcttcattgcttataaatttttattcaattgtacaaatataattcctcagttgtttaataaatagaccttgggccaaggaatatttgggtggtcccctcatccaccccttggatacgccaatgtgtagatatcacaccacaatgcccatgccttggaaacttatataggttggtctattcaaattcaaatgagagggaagaagtatttggccctgtttagatcccacacaaaaattttacaccctgtcacatcgaacgtttgaacacctgcatgaagtattaaatataggctaaaaaataactaattgcacagattgcgactaatttgcgagacaaatcttttgagcctaattgcttcatgatttgacaatgtggtgctacagtgaatatttgctaatgacggattaattaggcttaataaatccgtctcatggtttactaatgtattctgtaattagtttttttattagtgcccaaacactccatgcgacatcctatataatatcctatatgacacgtctgaactttacacccctttgtatgaaatcatgaaatagtcgcaatgttttatgcacctaggtttctactctctcctcactatgtttggtgggtcccacacctcctggaccccattggacacacatgtggatagaaaaattagggctttagacttttgctttgtcatctagagtttatgctgtgagattagagagaattgcttttataattcagcttgattttattgatttgatttctttaaatttgttccagaacaatatacaaaaagagttatccattttttgtccttttctttttcggtgaaatttcaattgtacaagatttttttttctaccactaccattcatcctacctttggttggctcttgctatgtttcaatcctacattatacatagtgagtgttcttcaactttttgcctatgattttgtgcctgttatacttttgttggctcgatcacgatcacacatagcaagtgtccatatgactctgtttgcattaacgaggatgacatacatatggagtaaaaaggattgatgagtactagtattgtaccgcttttacagcataagtaatgtagtacttctcctctgatttcagttcatcctcaatctctttgaaggtactcattagcttggcatagtaattcttcaagtactccggcaaaacagaaatggcactctcatcccatctgtgcacaaccattttagtttacatacaagttaatcaattgcaagatggatgcgaccatatatattataatatcaataggatcggttctcacaagtagtttactcatattctagtgataaaaaagaattattccctccgatccatttcttttcacttcgttaggacatcaacacatcaatctttaatgcacatgtgtatcatttttttaaaaatgtatttttcataaaaatattaaaaatataattatatgaacgtagttttgtcatgaaaaaaaaacatgagatgtctagaatggtagaacttaaagtaaatggtcttctggaagggaaaaaaatcattaaaattctgtctagaagaacaaaaatgagcatggtttattccgttaattaagggatgaggaagagtaagcaaaaatactttcccacctctgtattgcttcattgagcttttggccctcttccaatatagcatgcatatcataagtgtcatctagtaaggttgctagcacgaatatcttggcaaggatgattcgtgcttgcgcatatttctgttcgtagtaaattgtataggaccaaaagtagcattcaactatacgatctcgagagtaggttagttccactgcaccgtatagattatttccccacctgaaaataatatgggatacttttagcttgttgtatcttcataaaatgtgtgctttgtgcaataaattaaatcataattgtctttattatttttttgaacgcacaaatagccttgcacatcaatatacatattattagaaggagagaaaattgtacatatttggatcgatcatatatctagcttgtgtgcatgcacagcttcatttcatggaattgtgatgatgtgatttgctaaatcaattagttgaacatctgattaatattccattgcatatctatactatctatatatagttgatatccactaactcctaagggcaagtacaaaggtagagaccggtatggtctctacgttaattagaggctatcacgttacaatagttaagacaatacggtatctaatcattaatataccaaaatactttcttactagtcatcttttctttattagactcaatgcaacaaagagagaccgctaataaagaccattgtacatgccctaaagcacaccatacaagtagtcacatcgtcaaccactatcaattattatctattattatctagagtattttaaagcatatgcaagtatgccacatcatgacccactagcaattattatctagaacattttaaatatcatgcaaacatgatatatcatttacaatttgttgtatttttagaacttaatatgcgtcaaattattatctctacgtcattttcatattatttaaacatacacatctatcatttctataatgtataacatgcatttattcacatatcccgctgcaaagcgttgggtatcaactagtaaatcatacaaagagaaaccacgtagaagtcagaataatagtgtggaatttattttttgaaagttggaaggcctttttatatatcctgcactagtagtacaaatctgagttcacgacaacttaaataatgaccacatccccgcaacgttattacaaagaataccatacccaactccgaaaatttaatgatatttgcctatatacttatgtgacaatttgagatgatgtcattgactagtatatattggaaaagaaattaatttatgatattgttagtgatacacaaacaaaatatatcgtggcatcctacactagaagggataccatcatcttaatcaggcggtaagccccatctcaatcgagcacggcgtccgtcacaggctagaagtcacagatgttcatctgtgacgggcaataaatttacctgagaagaacttcctgatcggttacccatcttaaaattgcttcaggccaagcacgcttaacaccaaagttctttggagatcggcttccggaaaagtagttgtaacttgttggtatgagtattctattaatcctattaagccctaggccaacatgtcaaattggggttattaaatgatttcaaatggaaaagtcaccaaaaccaaagttgtagaactcatcgaggtgcaaaatttttattttggtcatttctccatctgactctatttaaacaatttgaaatttgaaattcagtttgaaaaattcaaatagaattttagatcagtgaacgacttcaaccgaaaacgtcatcaacaacaaacttgtataactcatcaagatctataacttttattttgggtatttttctatataacattttttgaaccgtttgaatttgaatttgaaaatatgacaacttcatacaatattttcaaatactaaatgatatcaactgaaaaagtcatcaacaacaaagttgaataactcatcaagatttaaaccttttatttgggcatttcttcacacgacaaagtgacagtaacattgttcacaaaattaacatatctcccgtctggttttataaactataacacatatatgtaaaatttgtgaataatattgctaacattttatcggatgaagaaataacaaaaataaaagttctagatcttgatgagttattcaactttgttgttgatgactttttcaattgaaatcatttagtatttgaaaatgttgtttgaagttgtcatattttcaaattcaaattcaaactgttcaaaaaatgttatatagaaaaatgaccaaactaaaagttgtaaatcttgataagttatacaacattgttgttgacattttttccatttgaaatcatttactacccgtaaaattattttgactcatgaaataaattattattttgcacttaattattttgttatagttcaacttacaaatataaacacttcatatgaaaaatggaaaaatacttatcggtgacgggctttagttaatgcccgatagagattaagtatatagcccgtcactgatgagtcatctgtgacgggcctagttgttatctcaaacgggcctcaaattggtgcacgtcacggatgatggtcatctgtgacggaccctaacttgaggcccgtttgaaatatggaatgttatctcaatcgggactacagttggtgcccgtcacatggttatctgtgacgggctgcaactttaggcccgtttgagaaatgaaatgttatctcaatcgggcctaaactacggcttgtcactgatagttgtcatccgtgatgggcttaagttttatgcccatctaacatgtctgtatgaccatatctcaatcgggcacttttcggcccgattgagatgacttccttgtgacggcccgctatttctaggcatattagagcccgttatagatagaagaatctgtactagtgctagctatatggaagtagaggggattaatgtgtggcatgaaacaagtacttaggaaaattaaatataccgagaaaattccttgagctccctcaagtgaagaagttgcagaaggttaaaatccagccttgcaagttggagcacagagggattgcatgcttgctcttgattgtattctgctatataattaagcgcctctatcctcttcaaggtccgtggtaaaggtattcgaagggcccgtgttacttgttgagataatggtgacgacttgagatttcttgctattattgtttcgagttgatgccttgagagcaaaatagcgtcttccaattccacctcgccatgaattaataggtgagctgcattgtataagctcaacatgcccatgggatcatctattacttcagcgttgaatctcccatctgggcctttaaacttgttgaactcatctgcaaggaatcatgcgggatctttttatcacaagaatacaaaatcatcgatttcaatccaattcttttacatgttgaaaaaaaatgacccattgcatccagcctctccacttcatgagatacaaattaatttagagttaatgccaattatatatgttaggttaatttgcagtttacacacatactatacctggagaaacccatagcccatgctgccgaagcaaacggaatcgaagcgcgacatcatggaggctggagctgttgaattcagcaccatgaatgtcgcttaaagcaacggcaatacgtctctcgaagtgatggtctattcccaaatgttggagcacatccacaagtttcaatttttcctccacatccttgcaagtttcaaatagcaaagttacctcctccttcaattgatcagcctatccctcatccattcctccgacttctgcacacacactgactattattgactaacacacaaggggatcaaatcatatgaatttctagcatatttttttatgagggaaaagaagtccattgtactctcccgaactatttcactaaagtagttaaccccccttaactatttttttatcattttacctcataattaaactattaaaaatggttcacttcatttatctccttttttttactctttatacgagttgtattttaagctaaaactttttagagccatagatgatatcattatcaaagctaaaatattttcaaaatgtttcatgactatttgcttggattttaaatcttgatgtttaaataagtcttaagtgcttcttacctctctattaaactgtaagaaaaatcgaaaaaaaagttgagatgtatgttttaatgcatctgtcatcctaccagaattttagtgaaaaatgtcttatatatgtagagggaaacataaaggagaaatagtgttaaagcgtaaagtgaaatttttcaatagtttggggtgggaaacgagtaaaaaaatagtttagaggattaagtgttccgacgaaatagtttaatggattttttttcttcctacaacatactacttagttaattgtcaatcccgacgtatgtataattaatcatatccttggtaggatacagtaaatgaatataacacgaatggagactgctgcaaattaggaaatatggatgcttagattagttcagccttaatttaaatgtgctatataaattagtctaagttgcttacctataattgtcttacaaagtaatgtatatagcgaaaactaacattgtgcgtcaactgtggattcgtaggcggcgggcggcgggtgaaaaccttgctcagccttggcccggccggcaacgatggcgttttcgagcttctctttccctcttgagggcgttgtcgtgccgtctcatcttctccaatggggctgtcgggtgaaaacccaatctcgtctctctttgagaccttgacggatggcagcgccagtgtttttgtcactcctctccatggagacgtcgtcaaggcaacccccttgccaaaatcctcctagacaactggtgcaagcttactctctagatgcatgtcctcttgtgtcggcgccctagcgtatgctagttggccacgtcggagggcctaggggggagagcggttccattcttctctctcaccctctttccctcaatcccaaagaggtggctagagtgagggtttggtgtcggttgttagtgttaggttttgggagacatcggctgtagttcctttgttggcctagcggtggctggtttgatgctagctttctcccgggtatgtgtgttggtgctgtcgatgcgtgggggtggctattttttcttcgttttcctggttacaacctcctagggttgtaatcgtgtaattttttctgctctatcaatatgaacctcgcactgtctggtgcgtaccattaaaaaaagtaacatttatatgaactaattctttctttagtttatttccaaagtgaatactatgaaaaatgtactatatatatgatggggttatgctgtagcattaataactagataaaaccctgcatactactgtgagagttttgtataataactgtagaaataacataaatactttacataaattttatctttgatcgactattacaaaaagctacaaacaatcaatatgatgtggtttataacaatttcaattatatataaattacttattcaaaagcaaaactaatgtggtatgggtcaatgagagaaggaaaaggagggactttataagagaataaaagatggaagataatttggaccatagataatcattcaagggttagaaataactgaggcgatgtggcttaataagagaagagagactaccactaactacacttagggcttattcggatcacgggaatgtaaaaacgtaggaatagaaaaatcgtaggaatatgataggaatgtatgtgtaaaacggaggattggaaaacacaggaattctgtagataggattggtaaacatgtgtttggataggcagaggaaaaacataggaaatagaaaaaatgaggtaggagtggatggaaattttcctttgtttctctattgtttccacaggaaaggaatttttcctctgattttcctttgggttgatttctatgaaccgaatgacaggaaaggaaatattttctatctacagtattcccttgaaaatcctctaaaaatccctcaatccgaagaggtccttagtaatggatgcttagattagttcagccttaatttatatgtgatatataaattattctgggttgcttagttataatggtcttacaaagcaacgtatgtaactaaaactaacatttatatgaactaagtatttctttaatctatttccaaagtgagtactatgaacgtactatatatgtgttgggggttatgctgtagcattaattaaaaatactgaaattacatatatgtaagaaaacttatgtatattaagagctagagaatgtgtctacataaattttgtgagtagtacacataaacaataatataaacatgcctgtaacggttctggagtatagttcacaaagaagtcgccccacactgaggcatcgaaagcttctaccaacatgggagcagctgcactaatgttagaagccatgtaagattgcaaactctgctgcacacacacattgttaaaaacagttcaaacgccttatatagaaactggacagcggctcatgggccatggctgccacaaagtgaaaggtcagttcgtggacgttaattaagatatgcatgtgtatcattgtaatgtgctgcaatttttgttatttcactattttattttctgaatcaattaattaagcctaaacagaatacaatatctatacttatctttttttttgatcgttctaaatttatgcagaacgtaccaagcttattacttgcattttggactaaaataatagaagtagttgcatggattatcatcgaattctaaatttagaggtgtaatcagtgtaagcttatgcctcatcctggttgggaaggttatagtagctttaggctgtgtttcgatatcaggcgttcccaactccccctctcgttttccgcatgcatgcttttcaaactactaaacggtttattttttttttacaaaagtttataaacgaaagttgcttaaaaaatcatattgatatatatattttttaaaaaattagctaatgcttaattaatcacgtgctaatataatggaccgtcctgttttctatgtgcactgtttcgtgttgggaactagctggaatgaactcagcttagtcattggagttactccatctgtcccaaaataaacgcagccatgagttttagtgtccaattttgattgtcgatcttattgaattttttatgattaatatttttattgctgttagattataaaatatgaatagtacttgatgcgtcacttatgttttttagtttttttaaaaaaataaataatacggacgattaaagttggacacggaaactcatggctgtgcttattttggaacggagggagtactctatttctatatataggccttatcctttttgttattgcgttatggtaggggaaaagagaaaagaaagaagagaattaatataatctacccttagctagtatcagtcagatacacagatccaggggtgatccaacgtggggacggtggggtctcgatcgagcccccagtactggcgcgagtactatgaagcccccataaagtccccgctaaaattttttgatatatgtagttgagaatgagggctgtagcttttagctactttattcagaccctcctgctatctctttctagatccgccactgcatagatcataacgcttgtaatgttcaaaagaaaaaaaacgcttgttagctagatgagacatggcaccacatttttaaaacacatgcgcacttcatgcataaaagacaccacagtggtggttcacctatacccactgtcatatagggctcacatatatagcgaatgacctgataatacaaaacataaagaaatttgtttggactatatgataaaaagatatacattgatctttgtccattctttgttagaagcaacgatcgtacttatacttattaggcacaattttaagaatgaggaatgaaaacaaagaaattaactagccccttccactctccaaaattatttttttaaaaatatattcctgcacgcataaaatctctaatcttattggttgcatgtattatatttatattaggatcattcaaaaacaaagtgataataattattttctggtctttgaaattactaactagctagttgtgccttatatttgggatgaagagagagtataatagtgtgcgagtgttcatagagatgaatgtgcacacgttatgagcatctgcatttgtattgtgtatctaaaaagaaaaaaattactcatatatacattggtttatgtcactagtggaaaaaggatctttgctcccggttcgtaacccccatgtactcctgcttttacaagcaggagtacgaatccgggactaaagatggatatctttagttctgggtaaaataaccgggactaaaagatggatatatagggccacgtcctgattgatttttttcttttatttttttatgcttgtatatatattcccccacccaaatccatgcaaatcgtgcacaataaaattatccaaaaatcatgcacaacaaaatcaatcctccacaatacgtacacatctacaatctacaaatcaatcacaaattcatcctcatcaacaaaaataaaaaaactccaacaaaattaatatagaaatcattcactatcgccagtcgccgtcgactggccacctcctgccggcgcgtggagggggaggagaggggtgagaggagaggaggaggagatggggaagaaggagaagaagatggaatgagggggtgaggaggagaagagagtagagataaggttgggggaggggaggatgaggcgggtcgctgatttttttcccaattgttacaactgggactaaagatagtggaggggtctgacacagcttcccttcttttaaactgggactaaaaatgatcaccaaccaggactaaagataaaaattaaagtgacatcaggtcttttaaccgggactaaagatgggactaaagaatagatattgactaaagatatattctttagtcccatctttagtcccagttcctattcaaatcaggattattgctgaatttggacaaccgattaaagatggtttctccagtaatgtgtgtttccataggcataatacacagaagtaatacaaaacgggcaaaacatgtgggggcctgatcgattcttatctaatgggaagtagacaactagtatacagtaaaccctgactcttaagcaggcccgatcagtttagttcttatccctatgagaaatgatctactataattggacaactccgatttccttgttctagctagcctgatcaagtaatcagtacatgacgcaaccatatgaaggccccttgtcgatccgttcctatctgatgggaactattcgaagcttgatgtgtgtgtgtatgcacggcaatacatgtgggtaatgcaggcccttatccaaatgagaaattatatactccctccgtaactaaatatttaacgccgttgacatttttaaacatgtttagtcgttcgtcttattcaaaaaatttaaataatttttaattcttttcctatcttttgattcattgttaaatatactttttttatatatatagttttacatatttcacagaagttttaaataaaacgaacggtcaaatatatctttaaaaagtcaacggcgttaaatatttagggacggagagagtcggttgtacagctcatatttgttgcagtacctgtcactgcatgacaccaccactgacatcgttatacgtgtgtatattattgatgccgtggatcgattggatcaccgatccagaacagcagaccattgtttggtagctgtcgcaaattccaactcttgcactgatcgcaaaagcaacatatcggacaaatctcacaaataatgtaacataaagtggacattttgtccacaaccaaaactcttgcatgcatgttgattggatcttaataattaatcatagaagaattaagctgtcgatctctcgcgtacgcgctgcttcagctttgtcgtcctgagcccggagaaggatgcaggcgtgttgaggcactggaccgcgcgcccgcataccaccgctggcaaggtgggggcagagagatgaagaccgccggagcacgtgatttcaccttcactgactgtttgggaggagttttagattctgagaagcagctgtttgatagtcagtttctgagaatctggaaaaactcaaacccagcttctccagtttctggcttcttagttcatttttcagaatatgtaactatagattctcagaagctgtgaactgtttgggatagctttttccaaaagctgcagctgggacaagctcccccaaacagggtttccaaaaactgcagttgggacaagctcccccaaataggacccaagtatccagatcgatcgatcgatggatcgcgtgcgcgaacccgcatgcgtgagaagtgcggacgctcccggccgtttgctagcaaagatgctttctcgttacatatggcccgatttgcggagaccaagatcgatttgatctacgtccacgatattactctcgttacggggtcttacggccgaatttgcggagatggatcgatttgatctacggttgagatgttaacctccattgaatcgacgatcagatttttctaattaacatggaagctcataaaaagtaaccgattaatatagatatagatatagatatagataaatagatagattgatatattgcagcccacttctattccacgctagaagcttgagtaggcctcgcgtgaaggagagtgttggaaaataaagtgaattgtccgtcttttctcatcagattaagcttttaggttaaactgctcaataatgtcgccgccaacgccaacttcgattccgccaccaccgttggaatttaatcttgttgccactgccgattcgatcaatttctccgctctgctcgattttgatttcttcgctggccactgcctgattcagcctaccactgcggcactgcctctagcagtctagctacctctggattttggccccaacatagtagtatctccgttcgatttgattttatcgccactgtctgattttgattctgcccgggatgttggagatagagggtagattgaggaatgttagactatatttggcatgtaccttgattggctcccttcaataaacctctcgatactgtttctataaattggttgagtgtgctatggaaggttgaggcctatatgtactgatctccgcatatcaatatgattatcgtgttgattcatattcactctcatggtatcagactactgatcactcgcttccgctctctaacctcccctccccgccggcgaacatcaccggccattcttccttctccggcgacatgtcgtccgcctcctccaccccaccgacaacttggagaagataacatatgatcatgatatcatgcgggatgcttagcctaaagaacagtgcacgtggttggtgagaattccatatggcatacgatagatatattgtgtgcatactggatacgtagtcgaatttggagagagtccaaatttggtacgatttgagtttgtaaagtttgtttcttgtatgggaaggtttcctaggggattatgacttcgtgtacaagattggtttgtggctttaggctacttatcatggatataaatagagagggagggtatgtcctcccagtatcaatttagatagagttgagtttagagaaaagttagggtttcgagtttggtcaagatttttgtaaatgctattgttgcactttatagatacagagaggtaataaagttttaatctactttgagagatctttgatttgtgtttgctcgggttcgacggtctatctgacgggacaccaacggacagatcagtggcatcgcactggtcagaccggctgggacacgacggtcagaccggaggcggcgacaggcgatagcgacgtaatgggcggtcagaccgaaggtcttcaagcggtcagatcggcacatctactccagtcagaccgatccactattagagaactcatcttttatccaataccccaaaccacaaatgtactggatgtattaagaaccgatactaataactttttagtacctgttctaaaagtgcaagtctccaaaatatgtttagtcctggttggtcttaccaaccggtgttaaaaatgtatttttaagtaccggttagtatcactaaagatatttttaataacggttggtgttaccaactggtgctaaagatgtcttcggggttagttcaaaaagaaagcatctctatccaagttagatgtgtggagttggtgggatggttaataggctaaggtgagagatgttgagttcaaatccaacatcccacatatttttttgactttaatatgccacatattttttttgacttaatatgcatatttagtactaaaggtcacaaactttagtctcggtttccttatctcggttgctacaaccaatactaagagggtttattaaccgatagtaaagatcatttctctactagtgatcgtcatcgaattgagtgtaaattttaattccgctaaaagttttggttttggggttttataactattcacctctctggttggcttgattcttactattcgatccaacaatactagtatatttgtgttcgcatcgaaaagcaccaacacacggttcatcataaacaaattaataaaaagatgaccatcacgctcttgcgacgacgagcgactggtcatttgcaaataaaactagactaatatactcctagccataaagaagaaaaagaagaaacaagaacgtagaatgaatttatatcgattgaggtagggaaatccttgccgccgccatgccgtaacttcatagcactcgaacggtgaatcctcatcagccgacgagtctgtttcactttcccttgtgtgcagccaaacctttccatctccttgctcagccttgattcgcatatagcatgctttccatttgtgtcgcatgaagcagcaaagtttttcattcgcatctctgagcctcccaaggtaatgttgccgctaattaatctccattaaacagactgctatcaaagtgcatgtgcatatccattcaatgatccctccaaacgacctgatcatgcatgcaaacaaatacgagcactacatgcaaaactcataggcagctacccccatggctactaattaaagtgcatgcacaatcaaacaggtgccaaatttcactatcaacaatttctttgtgtacaatcccttatctgcttgcaaccagctagcctaaaagccatggtgtgaaatggcaagattctctagatatatagtaataatgtaagacgggcacaaaatctagcttctacacaagccacgctcttttaggctgcattcaatagaacttattggttacactactagataaaaggtatttgtaggcgggccaaatccgtcttcccatacggataggcgttccgcttgcaagcaaagacttgcggcaatcatttttacaggcggcaactatttttgctatttttgcaggtggtagatcctccccctcccctcgatggctctcctcctccgaccgccgccaccggcggccggctcccctcttcctgcggcggccgttgtcgtcctgtggtagtcattgttgcggccggcggcggaggagagtagagctgagggagagaagagggaggggagccgcacctcccctccgacagcgccaccaccaatgcccctcccctctgccggatctgggagggcagggaagggaaggggcagcgatgcggccggcggtagtcatcatcgtcgcgtgcagtaggcgctgtcgtcgttgcgcggctgacgccctccgcttgcgccgctgcccacgaccccctccgcctgcgcagccaccgatgcccctcccctttgccagatctgggaggggaaggaaggaaggggaggggagggagccagaaaagtgagagagaagggtgagggaaatgagtggtgctggacaggataagttgtggaggagaagacaaggatgggataggacttagattttttttctgtaggcattatttttgtaggcggaccacataaggttccgcttgcaaaaatcatatttttctatgcggaccacttaagaggtctgccagcgaaaacaaaggtatttttgcaggcggatctcttaagtggtccgtctggaaaaattgattttcgcaggaggacgacgagcttcaccccggtttatatttttataggcatccatttggctccgaaagtcatacccacctggaaaaaaaaacccttacatctgcgaaagtgctttttctagtagtgttagctaattagtcctatgcaaaatgagataagccataagtatataactaactaaatgatcatcacgactacagaaaccctaatcggtgctggttgggatacccccttaggtgccggttttcccaaccggcaccacggaggtggcacaatgactttggtcatcggtgccggtttcaaaactggcatctatctgtgtaatagatgccggtttgtatgttagaaccggcacctattaggggagaaaggtgccggttccatataggtgttggttttagcaccaaaggaacacgtggcaagcacataaggtggctggttgtaatgaaaaatcggcacctatatgttgggtaaaaaaaaatagcagtacctgtcaatttcacatacagatcacacatacaattccaatatgctttatattcacatccacatcatcacaaaaacatcattcacttacatatttcaattttcacatccacatcatccaaatcacacaattcacatacattcaccaagaaagagccacattcacattcacattcacattcatattcataggcaatatattccccaaacatattcacataggttttccatcacacattcacataagcagcagcagcagcagcaagcagcaacagtagcagcaagctgacgggagcgtgggcgggaaaggcactatgaatgcatgttttacctactttcggcacctatagtgccgacttatattagctattatgtagtagtggatgcactgcgctttgctgtgggatatatgttagaaattgtagaaatgattaaatgacttagattgaaatattatgaaaatagtttgagaatgatgatttagcatgtgtatgtttagttttagaatgaaataaattatagatataattactatatgcttaatgttgagctttgtgtgtttagtgtgttaatatgccatgcttgcatgttgattttaggagtgctaataaatactatgtttgcatgttaagcttcaggtatttagtgaatattagttttatagaaagaaaatattaagtacaactcctttataaacttgaaaagtgaaaatttcatcctttatcccaaatactcgtagatgaatatatatacggtcacaatcctatttggcataatatattgagattacctaaaagtttgaatttatatatgaaggattgtaaatgttcgttgagttttccaacgggacaaaattatggtgagtaaaacaatagtaaaatacaaatggatttctttttttacaatcccttatctgtagggatggcaacgggtcgggtcgggcatgggtagagcaaaaccatgcccgaacccatgcccgtcgtcgcccgtccaaaccctacccactagggttagcgggcaaaactttgtatctgtacccatgcccgacgggcacggatataccggcgggtacccaatggatctcacattaatagtaactcaaaaatacataatttaacaaagagaagtaaaatcaataatttaccaaattatcagttatcaacaataatttgaattacatcacaacttattattagttagtatcacaaatgaaccaagagaaaggggtataagaattaagagataagtcgaaattagctaatacatatgtatcgggtcgggcatgggttacccacgggcaaaaaatgaaacccggttgttgcccacgatgtctacgggtttcgggcgggcgtgcccacggataaaaaatcacacccacgctcgtgcccattgggtcgggtatccgcggatatccagacccatggacaaaattgcctttccctatttatctgcctgcaagattctctctctagacatatgctaacaccacaagacgggcacacaaaatctaatttctacacgagccacgctcttttaggctgcattcagtagctaattagtcctatgcaaaacgagacagagtatgattaattaattaattaagtactaaccattatatacctgaaaagtgatgttttgtggagaaaacttttatatcctttttacgaaacccacaatttaaccgtttagaaagcatgcacaccatacacaagaaaaacagccgagccgataaactgagagctgcacataccaaacttcagaaactttgaacaccgaagcactctcagccactggtccgacataacgacatgggtcccattcgtttctccaacaaaagttacatgaagatgaagatttttatggcacgcttttcagactgctaaacaatgtgtttcgtgcgaaaactttatatataaaagttgttctattaatttatttttcaaatttataataattaaaactcaattaatcacacgttattaccacctcgttttgcgtgaaacactttaacctttatctttatctttaatctcagaagattcaaataccttcctgatcaagaagtttagggtcgattgtcgtcatttgtacaataattaatacagggcctcctgctcaacagtagtattagcaatcatgcattggacgaaaagcgacaggtatccccgtccatctcaaaatgcccagtgcacatcagccactagcaatggagtactctcctcttcagttccatattgttttgagtagacttttaaagctttgattatcaataacttgaaaacaatatagcaatgtatatatagattaaaattagaaagtgctacaacaaaaaataaatatttatttatgtcttgtatatgttataataaaacacatagtcaaaatatgttttgaagatcatgcctctattcaaacagccccaccatatactatctccgtctcaaaatattgctacttagtactgcattagatgcatcatagtaatacaaatctgagcagatgggacgcatcctaatactatgttgacggttcttaagtaccaaattcgaccttcaattcctacataaaagcaaatgaaagaatacaaaatggaatatcaaacttagagataatggttattactaaccatttccgcaagtcttggtgaatatttgtatgcatgtgaattttggatgaaaaccacctgacatgtctggccaatcagatgcgagtacacggattggaaggcccacaaaccaaagtaaaatcaacatatttgaagccaaccaccatgcaccatcatgagaacccaccaggcagtgtcccaggcaaaaggcgacgtgaggggctcgaccagggttcggtagaagcagcttggctccccttgcgctcagcttccacgtggcgacagatatcgttgtcctaaagtcggtggtgcaaggctcaaggtaggaaacctccatccaatgatggttggaggaatgcggaggatagttattaaaatcggaccggacagcgggctgatcggaataaaccgaaaccaaaatgtcggtacgcaattggaccggtaaacactcgatcaaaccggccagttttctgtatcttttgggccggctataagccggtgactgcccatgtaggcctatcaggcggagtggggcttgtgagtaataaaaaattggagtggggcttgtgagccatgctcgtgcgtaatagaacattgaggaaaaaagagtggaggctgagatttgaacctgtgaccccgtgaccaagtgttcaacaccaaaatacccgaccgttgagctatgaaagctattgtgattttaatgcatcatttatctatttaaaccaggttaaaccgatggtctaaccggttagaccagtaaactagtgaaccaagtccctcaacggttcaattatcggtccaatcttaataactatgatgtggaggcttgagaggagttggaggagaatattcccttagcatctctactctctcaagtcatcttcacactataaatatcccttctactcctcattctcaacacataacaagtggagtacaactcacttatacatttgggctactctctagtagagttataatataggaaaagagaggagggaagctttgaaaggagtgcccctaatatcggaattctctccggtgaagttccggagacgtgcaggagatattgacattcttccatgggagttccggaggaatgccggagatgtcagcactttctctgattttgtaccttgacggatgtctcttttatataagtattggtgattacctttggtatttacttttcttatttaagtaagatatattttcattgttatgggttcatcgctctgcttaggtagagtaccttaatcttctagcgtgacatcgagattagcgtagtaatcaatagcatagatgcgatgtctaggctgaaggttacctttgtttgttgtgtgctccatgggttgtagaggtaggcggcaagtggtaacagccatgtccgtcctttgtaatccttcacgtttgggagcatcatagagctataggccggagtctccttggcagaccaggggtaagccaatgcctgaatcaatagatagagttttaccataacttatttaagaattttaacccataagaatcttctctatcccaagcctaccatttagtcgttgtccttggaagaatcatgttcttagattatacacacacgttccctgtggatacaataccctggaatactcttgggtgaaagctacaacggtacctgtgagcttgcagattattctgtgctcgtaataaataccagcgtactacgaatctagacaggatgattcatggtactagaatgtgtcacataaaaaactaggtagcaacaatttaggacggtagtttgcgttgtagagtcatatgatgattaatcttggtgatgaagaaattatcaaaggtaatgtttattgaaatacgatgaatagtattttcggattgcaaatggagttatcagctcagggaggccagttagaccagtagtgttgaagcggtctgactgggtagctcgacagttagaccagcaaactccggaagagagtcggtttcaggttgttttcctggattttctagattgcttcatggttgtgacttctagatggtttctattcgtatatgataatattttgtgctgatgtgacttgtgagtcaagttggtgcaaactttataaaacattaacaaagtaactaagaaacaaattagtgatagatcaatataactataacatctgaggattagtagcactcgaaaagttgatctcttgttccaacttacactaaattaaggaacaaacctggtattctactcattagaagttacaactcacaagaatacaatattttgagaggcaaaataactaacaaactcgccgtttgttataggttagtgattatataaatttgctcatgctatagtggctcgctaagtaaaaatagcggccgctaagttccaacatgctatttccagtctgctacatcgtagcggtagcggtaggaggccgctactgctatagcacccgctatgaacgctatttattaccttgatcacatgtcactgtggtgttcggggtccaagatggcttgaagaaagcatacatagtaatgacctcacctattcctaggaagggatagagaaaaggttggttttacttcttcatcgataccagttcttgccacctcaaattctcaaccaccaagcctgcccgatagaaaacgtggtcctctactcgattggaatccaaatccctttatcgagataactcgagagttaagggagtattctgatagcgcatgaggttatcagcgatttcatgcgtcatcggaaccatcctttataagagcatgatcaccatgtgcacgagtacatagctaacctggatgatcttgcggagtacggttatttttcctcttcaaatatctacattgtattagttgaaatataaaacctaaactgaacttcaatgtgcagatattttcaaggacatggtatgtcagagaagtaggaccggaggttcccactccatcagcaacatggggaactgtggagcccacaatggtcaaagcgagaactaaaacagggacccaagtagtgcccctggccgaagaaggtgacccgaggacaactgcttctcggggccgagctagcgtcaacttagggccaccacggtcactgcacgtgggccagggccccgaggtctgttacgagcgagtttgtctttgggtagatgtgactcagtcctgccggctgcctgaccccgtcattcagcattaattacggtatcatgtgcacaaccttgccccgttattccacattaattaccatgtgatatggttcctggggagagatcacgggcggcgtgggagatgtggcggtgcatgtctctcctcgttgcccatgtcgccccggagaaaaagtaagtgacccagcgtgtgctccatgctcacctggctataagggcccacttttctcctcctctgtggttgatatacaggcccaatgactgctggggtgatggcttgggtgactctgctccacgcatcaaccagtaggtagaccctttgcatccagccggtcctcttagagggacaatgagaagactaagcataccaacttcctgtgggctgggtcccacatatgtatacttgcatgggcactgtagtatccccttggcatgtaaaaggaggaccaattccacagagaaaagggttcaattcagaaatttggtttagttggtctaagttagattctagacacaagaaagtgaagaagggttcatcatctcccacttagaacaacatccacccaataacacattgtaatattgatcgcatatagcaagaacacaatagtagggtattgtgctttcaaacatcatgaacctgtatatatcttttatctacatcctttcatgcgatccaaacacaacctcggtacctgcaccctggccgaacttccaaagggggtcagggtactttgccttcctgctagaggagcttcctactttgacacggtcgaaagactgtaccaagaaggtggtggctgttgacggctattaaatgccaattttatatcgccaatacatgcataaatcaaggaaataaaacatccaacatagtgaaagggttaaattcttacatattccacaaatattggtgaatatttgaatacaggtgacaaaccgccaatgttggatgaactatagacttaagtgaaggagaattcctatccatatcacaagcgggccaagaattacactaaaataccatcaaatgggccttccactcgcagaaatggatagaagaggaggaggagagacaacaggccaaaacctgggcctgttggaccaggcctgggttcggccgaaccactcccgcaaccgtccgatgtagggtttggcagggacagtctggatgagctcatgaatgacggttggatggcaaaatggacttttcgtgttttacaaccgttatacctgcccctatataatgacttcacttcactcacttcaacacacactccaagcttgagctgaattataagaggctctattgtactttattgtatactagattagggagagagtagagtagaagaagttggaggagttccggagttgtcggtaatccacttcttatttcttttgctctgttaattactctgattattatagaaatatcttttgagtaatttagttttgcttagtgagatttacttcttgattagttcctaattagcatacaggatcatcgttcattataatcaattaaaatatagtgattgctttagtgtgtagctaacattaaagtaagttattaactacttagacgcggtgtctaggtagttgatttccagtgtttgctctgcatcccacagtaggtgtgaggtggtgacagccctcaagatcactaaagtcctcccagtccggatgcgtagtagagcgatatttcagagcaacaggctggccagtgcccgaagtatcgcgttaggattaaagttaagctttccgtagacactgtttctcacaggtgaatcctctctatccttagcctatctttagctttgtgtccttggacgaaactggtgaagagctgacacacacattccctgtggaaatcgatacctgagaatactcccgggtgaagtgctacatcgttttattccgtgcgcttgcagattttatctgtgaggttaagaattaccaacagtggccaacaagctgagcattgctgaagatatccccagccccttgtgcaacctagcccaagttgattgggacaagatcatgaatgtaagtattcaacattcctttcttaccaccttattgatgccataggattttaatgcaaatacttctaggaacgatccctcatcaattttgtcgagccccttgtcaatcaccaggaagctcctggcaacagcggcagcgccttgctgctaatcggtggcggtagcattttgctgctcctcgaggtcagcatggtccagttatatggaaatattgaacacacaattgacccactttggaccgctcaaaccggcgggttgttaggtgaaccagtagtaaaccgtcttcagtcaggccaggactaagacatgtcactgctttaaataggctagaaaaaggcccggctaactcgtgggtccacaagcacttgattttgaaaatgggcatggtggggagtcaacccgaggtggttgagctaggggtaaactcccataaccatccgaccactgcgttatttgtgattgtattggaacataaaatttatctctacgttagtgaattgcggttcgattggctagatagtcggataggtgaaccgagaggttgaccaagtcacccaccagtctagtattttcaactatgatgaaggtgagatcaactttagttcatgcgctccccattcttttccgcaaggaataattagtgtgtatcatatatatatgctggaattaatgccaccaaactgcacacaaatacaactcttaacaaggttcaaatagatggaaaccaacggcgaatctcttacgtaccccacttaattttattaaaccatatttgcatgcctgtgatatttgttgggaccaggatttgaaccctggtggtaggtggagtgactcccactgcatcgacttcccaacttaggaatatggttgcggaagtaataagaaaagaaaatcaatcatagtgcacatatgatgaatgatttcgaagcgcatgatataactcgttatatacacaatccaaacgcttacacgctagtacgtacatggacctacatgatgacaatacatagtgctgcatatgtatcaacgcaagttgagaggttcaataatgaatctctcatatgatcaaaacaggcatcttaattatcattattgtcatatttaactaatatcccaatacataataattaaagtagttcacacttctacgtgcggtacctaaaggggaataggtttgacaaaatggctctccatcgtccttttgaaatccttactgtatgtgtatgcatctcttttgtcaagaaacaaaatagccatgctccttgataggttggtgacccgatgtacaaatggcaacagttcacggcgatcaatatgagcttggtttatggttttccatgcatcttcgaccaaagaacctatcttggctagggcaacctcactggtaacattgtactccttgatgtagcactccacggagctggctacatccaatttgttccttccattctatgaagaaaaatgacagatttagcaatgtgcatgtgtatcaatataccatggtaaagttagatttgatatttacaagagagatcctgatctctagcactgctgttgcaatacgacatattgacacatggatctgacatgctctaggatctatatgtcagtgactcctactataaaagcaatacagtagaggagtaagttctatttacaaagcttaaactcataccttaaatgcagccatgtcatccatgaaacgtgccacctcaccgccagccctaacggcatcattgttgccaatggcccactcaagtgtctcctcggttactatatttcccatgccgacaagtatacatacacttagtgcttgaatacctgcagacatcaccgacacttctatttgctctttgaaacttggtacgtagttatgatggaaccattctgcctcctggagataatacccagataacaattgaaactgcataggagaaaacagaacaatgctaagatctatgaggtaggggtgtgtgtgtatcacatagtaagtgcatgctgatactacctctgttctttacttgtccaaacattgatatatatggctgtgttctttttagatgtttgaaacagtaattagccgcacgtaaaacgagaaatgatattagcatatgattaattaagtattaatatataaaaatttgatgaataaatttattagatttttttaaacaacttacacacacacatatatatatatatatatatacacatatacatatacatatacatatacatatacacatatatgtatgtatacatatatataagttttcacgtaaaatacaccgtttaacagtttgaaaagcgtgccaacgaaaatagaggaatagctaagccgccatagtctccaatgtagttgtctcatcattaatattttttaatatttctaaaatatatttaaaaaaaaccatataaaatattttttttctcatcacagatctatcaatgctatcttcacatattaaatcttaatatttttatccagtaatgatttaagaaatcaaggtattataggacgatgtccttaacggaggtagcgtttcattttttgttttatgtgcgtttagtcccattacaaggatcggcaaactttttttttaataggatacgatgactctatgggggacggggtagagaggagaaagagcaaagggggagaccaagatgattgacatgtaagaccatattgtttttattttttttctcactgacaagtaggtcatatgagcattacataggatgagactgctatccaaacggtcgagggaactgattggctctagtttttaaagattggggagacgttatactcggtatgagggaggatcaagacttgaaggatccacaatagactaattccttttctggatgacgaggagttgctgccttgctgggccatggcccaagaggcccatgggctactgccactccgatccagccctacttagcggagtaaattatctgaaacggaaaaaaaaagaaagaaaaaaaaggggcgcacgaggccgaggcggcaccggcgtacggtggcaagcggcaggagccaggaaggatggggaggctggcccgggaagcgcggctcggtcgacgccgcctcgacggcggagaccgccgacgaccagactggaaaagcgagcgagccaacttcttctctgatttctcagctcatctgacattctgactgcgatcgatttgacttgagaagatggagagaagctgtataaaggaaaaggcaacggcatctctctcgaagaggtgtagatattgggaattcgaggacattgcaaatgtgtgtgttgtgcgcggacttaaggacagatttgagcggccggcacatatataattaattggttaagattgattgctcgtttgtttgtttgtttaatcataatcttgggggtctagtgagaaatgttgcggcagaggtggaagagctaggcgaatggaagatgtggaggtgccattgggttatgttatattgtcatttatctcaaatatcgttctactaattttttttccttggttccttttttgtttggcagattgtacctatttgtatgctctacaaatcaatatattcaataagttagtcatcttttgtggtggatattcagtttttgaggtatttttcagtgccctactttttcaagcaactttatatgtggcgggtctatttaatctcacattgtggttaggcaaacattgtttttgctttattgtctttactatccattccaacagtccgcaacacctctctttttctttttaaagtccttcaccaatccatccacctatttgttaaatattgtcttaattttcagttacaaatagtaatttcatttcaaacacctagtcaattaattcaaagtttgaagtatccgtggatttttaaatatttacattttgactcatgaaagtttgatcacatactttagtagtttccttgaaaattactccataatattataacttaaattgttacaaataatataaattagtgattgattaaaaaaatagcatttggaacaccatgtcaatatccaaaattatatatacttgtaactggatcaaaggagtaatatgtaagcaccatgaagcatgtagggtttcaaaaattacaactgtccaaataccaaaaggagactggttccaacttttatcaccgatttgctttagggaaactaaaattttgtttataaattagttcacgaaatataagcaataggaaggtgagccaaaaatggtggggtccttgccagttttttggaaccagcataccattccaagttaaaaacttgggccagaagatgttacttaatttatctttggtttcagttacatcagtggtccttgcctgtttttgggggacctttcttttaacttaattccaaaattgggttcctgttacatgtaataaaatatggttgatgtttttaaggaaaaatatcgtagcaccatgaaagatgatggcatgtttacttgatcaattagctatagtgcgaattttacatgaatattagggaaatgaacatacttgctatttaatttgtaaaatcaataatacaaacggaggtaaacgtaaaaaggtgtcataccactttcctattgtaagcattgcggtgcctaatatgtggttccaattcattctcgaactccacgaaattgctcatcaccttgagaaagaatttcttcagataatctggtagaacagaaatatcactctcatcccagctgcatggtcattttttgcacgaattagttagtcaaatttcacctcattgattatacccatgttttgttctctagatgaaagttaatcaaaaataatagtataacctttgtatggccacattgagatttcgacattcctccaaagtagcatgcgtatcataagtgtcatctaacaatgatgttaacatgaaaaacttggcaaggatcatccgggcacgtgtgtactcctcctcaaagtacatagaatatgaccaaaagtagcattcaacaatgcgatcccttatgtagtctagtcctatgtcatttgaaagatcctcccaccacctgaaattaagaaaggatatgtgtatgttgttgtaagtgatagtaaaaaagttctagtcattgtcaaattccatttatattagggctcatagatattgagtttgatatatttagagcatgctccgaaaaattactgagtaattgtcttgagctccctttggtgaatatgttgaagaaggttaaagtctagcttggcaagctccagtattgaggggttgtatgtttgctcgtgtacattgtactctaatatataagatagggcctcaaccctcttcaagtttctggacaatggtatctgaagagcacgtgaaacttgctcagctaatggggacttcaggttacttttcattaactccaaatgatgccttgaaaataagatagcttcctggagggcttcctcgttgtgggtgagaaggttggcagcattgtataagcttaagagaccttttgggtcatttgttatgtcaatgataaagcttccatctctgtgtttgaatttgttgaaaacatctgcaaagtacacacatgcatgttaaaatcataatatttgttatataatattctttttgttaccagctcttttcagttattactaagcctgggaattttgttaacattaactttcaaaaagtagagttgcctagttgaacctaacttccggggtggaaggcaatcgaatttggcctagagcttcttaagaaaggcattatctagaggattgataatggccagtcagtttgcatttggcgagatccatggatcccgagagacctctctcggaggccgattaccacgaagggacactatcgtttgaaatgggtttctgatcttttgagcccaaatggttcttgggatgctcttaaggtgtctcagaccttcctgccgattgacactgaagagatccttagaatccgtacttcagtgcgtctggaggaggattttcctgcgtggcacccggataagttaggtcgattctcggtgaggagtgcttacaagttggtgctctccttagcaactactgatgaaagctcaagttcttcaggacaaaactctaaggcggcttgggatatgatttggaaatgtgaagtgccacaaaaggtgaagatatttgattggcgggctgcaactaatagcctggcaactcaagccaacaagaaaaagagaaacatggagcgagttgatgtttgctgcatctgtgggaatgaaaaagaagatgttgaacatgccctttgtcgctgtcctcatgctgttcatctttgggcagctctggagaattcagggtatttgtccatgggcgtagtcggaaatggtacaggaagttactggtttctcaaccaagttgaaaaaacaccaaaggaggagagaatgatgctgctaatgcttctatggcggatctagttcgtccgtaatgagttatatcatggtaaaattcctccgcctattgatgtgtcaaaaagattcctggaaagttactgcagttctctgcttgaagttagacagtttccccttgtcgatgtggttaaagggaaacatgtggttcagtctggtttacagaattgtgtagcggcaagaccagagaaaagatcagttccatgccgttgggagcgtccgcagccaggctggatgaagttaaatgttgatggttcctttgattcgagctctagtacaggaggcataggggcggtgcttagggacaggttaggaactgttattttttcagcctgtggctttatagagagatgttgcaaccctcttgaagctgaacttctagcttgcaaagagggaattaatctggctttgcaatggaccttgctgccgatcattgttgagtcagattgtttggttgcagtcgatatgatccaatctaagaagaaggagtggtctcagcttgcctaccttgttagagacataggagagatgctgtctgaaggaagggaagttagaattcggaaaattcagcgtagtcagaacaatatcagacattacttagctaatagaggccggactaatgctcgttcggagttttggccggatggaagttgtaatttaatctcacaagctgtttgtaaggaggctttagctgagtaatatatctgtcttttccccaccaaaaaaaaaagtatttgcaagcggatagcatatatttccttcgtattttaatgtttgacgttgttgacttttttaaccaaaatttgaccattcgttctattcaaaatttttgtgcaaatataaaaatatttatgtcatgcttaaagaacatttgatgatgaatcaagtcacagtaaaataaatgataattgtatatattattttaataagacaaatgatcaaacgttgattaaaaagttaacggcatcatacattaaaatacaaagggagtattagcatataaatatttcacttttacagcatacctgatgaaacccataacccttgctgcctcagcaagcgaaaccggagggcaacgtcatgaaggctagggctgtcaaattcagcaccatgaatggtattcaaggtggtggctatctcttcctcaaagagatgatctatccccaggcgttggagcgtgtcaactagattcattttttctgccacaccatcgaaagcgtcgaacagctgacttacgtcctttcttaactgatcggatctctctctcatccatttctctggccgctgctaacacgaattaatacatatgttaggtaaaaatatgtggaaaggagaagcaatttgatgacaatttatttatctctcatggtacatgagaaaaggtattatactgcaagcatcatgcatatcgatccatgaaaaatttatggtttcagcagatcactttttaagcaaatcatgcatgcatggtaacctgtacgaatcgctaaagaatgctatatatgtgtggaaagagcttgttgacatgtagaaatactggaacaggagaacatgttcatgaattcgaatataaatgagatgaagtgctagtttaagtactttaaggaagaagttatgccacctttattgaaaaaaaaagggaaagggtttaaaattgatcatgcatatggatcttatttgttttatcatttttatatttaataaatattataagttgtcccttgtcatggtgaaatgtctaacatgctcgatttttatgcattataatccacttggatttgtagattgcgaattcagaaatttgaagtaaagtacttgaggcatttccaaaaattttgacgaagtacttgatttagttaatcttggttaattagcatatccaatactcaactggttaagaacatgaagcccctagctaaacaaaaaagatgaaaagcagcccagtgtgtttgtgtaatggcgagactacgtgtgtattctcttgtaattataaaacagaaaaatattagaaagggaagatttagatacaaaaccatttggcttcaatttgagataagtgtactctgcactaggtaagggaatagagtgtacgagcatgcatgcctgcaagggttgtggttcatagttgataaagaagtcaccccaaactgtggggtgaaactcaggtgctgccttgggagctgtacaacttgaagaggccatgaatttgtgtgtgtggtttgtctgcagctaactggtttctgttttagttgtgactgacctgcaactacagaaactgtgtgtgcactgcagatggacaccatggagaggtttatataggcaccagagaagctaagttaaatgagaatcacgatggacacaggttatgtctgggattttcccaaaaaaaaaaaggttatgtcttgttatgagacatgcatctttcgttctcttcttttcttttctttttttttgttttttgttttcggcgaggattctctttttgtttttccaaactcaaaggtttccatcttttacaaataaatatatattaccaactactaattaatctccgaaagtgattgataggtcaatgtatggtgtatagcatggttcagttatgccttgcaacggtaaaagacacaagctatcttttcatctcgcttttggcacgtgtcactacattggtttgtgaagaccgatgagaagtagaatctggcttttgtgaagaaaaaataccacattgtagagctgaaatcaatttatttactcaccatttgccacaatcgtaagcatgtatagttctcaacccctcaccatgttgtctcgtccttccctccgatttgttctctgtactatgccaacgcctctgcttggagggatcatccatgtcgatcgtctctttctctcacatggatcttttgtgattcataatggaactcaattttgaggttttgggagacatttcttttgataagttatttacctcgttgaataatcttgctagcaagaaaaatgtcgtgttggccaatgtgttcacaaacgtactacttgatgtctcctttagaaaagccctaattggagataatcgggtgactttatatgatagggcaattgcgttttttaccctactttgaagactaaccactgatttggtcatttgactctcttttttagaaacgaaaatggggcttgaccctattctgtgaaggcaacatgacggtgttaactcaagacaaaaatttcatttatacccttgtgaatttaacctagtttctcaaagttttttattcagttttgtgcaattagtatatattaaactgaatcaaacaaaatttcatggcacaaatttatgtccaccaaaaacaaaaagaaaaagaaaaagaaaaaaaacatgtcaagcagcaggacaccacgtcgccgacggcaaactcccgagcccatccgtgcggagcagcagccaccaccactccctccgccctccggctccactgctcccaccctccacgagccattgtcgcctcactgtgcgctgatgctccctttctctgtgagccgccgccgccggtgctccctccctccccgcagcaccaccgcctccccactaaggcccgccaccgctgcgtgcgtgcctcggcgccactagatccgtagccgagcctccgccaaatccaccctaacactgttgcccctcctcctcctcatcgtcaagccatcgccactgctcctcttcgtcaagccaccactcctcgtcaagccaccgttgtccctcctcctcctcgtcgagctgccgccaccactcctcctcctcgtctagccatcatcgcccctcctcctccttgtcgagccgccgctgccgctcctccatctcatcaagccgctgccagccttcctcctcgtaaagccgccgccatctgtggacctctccatttgcccccatctgtggacctctcctaattcttgttgacagtcaatgtcaagaaagtggggtaataactaggtgtgtaggtaagaaggtgcttcatgtgggtaaaatttccgtttaactttatatattcatttcattcttaaaatatagcaatttagaatccagattagaatattctagtactacgaatttagacagacgattgtttactagtggtatgaaattgcatgctgcaaatagaagaatatatgccaatactatcatatttgatagactaatttctctctaggcttacatattttctggttcctgccataattaatcctttttaataccacaattaacttgtaaaggaacttttaacaaaaggcattaattaattgtgtgtgtatataaacctaaagaaaatatcaaaacggtgatactacccctatgtcttagaattattatttttaagagaaatactattagacctgcctagtagttatatttaatttactcatttgcctcagacatttatttgctttgcatgcaaccaacttggcaccctaaattccgttaaaatgtgctgccaaacagcaagattattcgctagacatctgctcggaaagataaattaactaataatgcttctacacaagccatatgatctagttgaatatctattatattattaaaggaatagaaaaaggagcctccacattcgctcacatggcctagaaattttcacattaatcgggaaaaaagaaaaaacagagtccatatagaaatacaatttagaaatagcagaaattcgaaattaaaaaataaggaatattagaaaaggagactagagtccatatagaaatacaatttagaaatagttgaaattcggaattaaaaaataaggaacattagaagcaaggttgtcagtatcccgattcgtatcctagtatcttacgatactacgatcctaccaagccgaaacgatactgatcccacatagtatcctaattttcatagtatctcgatcctactattcattactacacgatcctacgaaatcttaggtgtatcccgattctacgatcccaacaatactacaaaatatgatttaaaataacatgatttgaaaataatgtaaataaatatgctcaaatttaaaatcagttaaatatatcaaaaccaacatggattctcttgataagtctccatttgcacggcatatatcattactatattttttaatatagaatggctatatataattaatataaatataaattaaacttaaaaaaagaaaatctcacagtatcccgatactacgatacgatcctatgatacgatattactttgagcaaaacgatactacctagtatcctgatcctgacaaccttgattagaagaggtgactagagtctatatagaaatacaattaggaaatatctgaaattcggaattaaaaataaggaatattagaagtagagtatagagtccatatagaaatacaattaggagataatataaattcggaattaaaaatacggaatattagaagtagagtatagagttcatacagaaatacaattaagaaaaaaaatagaaattcggaattaaaatataaggaatattagaagtagagtatagaatccatataggaatttaaaactaactaaaattcagaataaacataataaaattaaaagtagagttttgagtccgtataaaaatacaatttacaaataactaaaattcgaaattaagaaaaacatgggaataagagtttaaagtcaatataggaatacaat

SEQ ID NO: 9884 - DNA, 12540 bp, Oryza sativa
ccgctcgtcactgcgcccatctcggcttggtaatgccaccctccgttctcccttcttgctcgtccactccctccctagctcgtgtggtagctcggctagcccccccgaacacgcatggacactgccccaggtctcgccgccaaaccgccgctcgtcgcccttgcaccgcacgctagctcgccggtcgccatgctctgtcccggaggccgtctctcgtcgccagccaacctcggtgccgctccgtccaatccgacgccgggaacggattccttgaaccccggagatgctcccatccctttgaatcgaaccctcgtcgtctcgtcgtgttttcccctttttgctctccggtgattgccgccgccgcaatccgccatcgtcggcttctctcgcgtcgattcctctcgccgccacgcccccggggatccccttgacctccccctggctgccccaaggccgtcggccttctcctttgtctccgcgccgtgtcgccgcttccgccgccgcataacgccgccgtgcgtgcgccgccggtgaccatcgggtcccgcgtcaccgcgtgcgcgacgcaacaccataccggttcggctaaacccgagcccgcgcacccttcgctctcctcgcgcgcggccacgtcggcatgccggcgagattggccgccgccgccggccgtcgtcgcgcgtcctcttcctgatccgagccgtggaatgagttccccttctcctcctcctgccgccagtgctagccgccccttccggctcgccgccgttcgccggatcccgccgcatgccgtgagccgtcggatcagcctgcccggcctcctctgcctccccatctgacgtgacttccacgtggacgccacctcagtcccgggcccgcttgactgggtcaagtcgcgcccagtcagcctcctctctccgtcttccctcccgtgcgcgctgtccacggcaagccgtgcggctgcacgtgggcccgccgccatccgtccacccggcgcgccacgcctgaaccgcgtgcatccgaaaccctagcgcccacctccgcgtgcaccctccccaccgtgaacccaaccactgccatgtgggtcccgcgcggtggaccgcgcccaccccgacgggccaccttctctccccgcgcgccccttgggccgccctcctcgcggccgtgccggcccattaggctcgcccgagctgcgcaagtccctcgggccgcgccaatgccacccgagacaagtctgattgacatccctccatccttttctttttccagggatttaataaatcctttttcctttgtcccataaatcaattccttattccaaaattccacaaatcatttcctttggtcccgcgcgtcagtgactgtcaataatattcttgagaatattatttctataaaattccataaaccatttctcctattccagaaactccaattaaacttccaaaattcatatcttctcaaccgctcatccgattgactccgttccacttccagtaattccgtaaaattgagatctatttaatggcactactaattagtctaaataggatctttcttttggtcttttgtttaggttttcgattgtttgcgtatagttgcggttatcggattttcgtcgatcgcgggttttctcgaagattcgtgaagcttcgtgaagaccttgagcaaggcaagtcaccctttgatcaattgctcctataattgaaaagtcattattattttgtttgcaacttgcattattagaatcacacacttaacttgcttggcctcggtttgcatgccaaatcgacggacctacccagtagtcgcactaatttccgtaggtcgtactaccctgattccttgtcgctccacccttgtggtacctcggtattcgtgctctctgagcgcgtataccaaatatcccacatacaccgttgtttgtcgaaaacttgggaaatgggtttgtgaagccttcaaaacccgacatgtggtgtcggtgtgtttgaaaataaaatgaattgtgaaaactcgcgatgcgggggttgtgcctatgtggcactgtcccgtattcgcatataaggaccgattcctgtgggaaactcatcgaacataaccaaagtgcaaccacaaggtggaatgggacaccctggctaagtaactagacggttcagggaaacctcgcatgccaatagttgggaacgccggggcggggtcggacaaaccgggttcctggtaaggcaaggacgagaagcttgctcacttaccgatcaaggtggttggagtttgatttgtgcacgcctaaaatggcctatgtttatgtgaggatttgatccttctatgtggcatgaggtaaccctgggtcggctggggaaaggctttgttgcgaacctccgataccgacgggtgttcggaataagttcgtatcttgtgggtaaagtgtacccctctgcagaggttaactaactgttcgaacagccgtgcccacggtcatgggcggatgtgaggtggttcccgttgcgtagatttgtttgcctgtgctttgtgaaaagttgttgtggtgtgggaatcgtaaccagaatcagcctatgtggcagatggatgacctgagtggtcagaaacaaatctgtgtgattcgggatgtctgcgggcatcatagactaggcttcccgagtggaagcggattgttgtgctgctgggcagctggactctgggagtccgagaaaatgaaaaaggctctgggagccgattaatcaagtggaatggctctgggagccgagaagtaatgatctgacccgggaggtcggtacattactaaatgagctgttgaaaagcatctcctaaagtcgaatcgagacgcaagtctcttttcggcccaaacttagaaagaaataaatcacttagtgatttcaaaatgtcttcaaataaaagatttgcaaaacaaccttgcctctcttccaagcttgcattaaacacctaagttcccgtgacttgttgagtacgaaagtactcacccttgctctatataaatatatatatatagttcctccgccctgaagagaagataaagtaaagtgaagattagggtttcgtcctggttcccagccgtcgcctgtggtgttgggtgttagaccgttggttccgctgctgctgctgctgttggtgtttcctcgtccgcgtcgtcggttgtattctcgggctgtctgagcttgtcacgcccggaatttctatccaaaattccaaacgcttacatgtgtgtgaaccctcgtccaggagtcagccgaggcacacaacaacaaattgataatagagtacaattattactctaattaataagcgaataaaatgtcattacagaggtagatagttcctctcaatcaaaaaagatctaagcagcggaaaataaaataaacggcgcagacgactccactccacaggcagcttgaccaaggctacacctactcctccacaccatcagcctcattgaagaactcttcctctgatgaatgattgcaaggtgagtatatgacatactcagcaagccacgcagcaaatatgcaagtgcacaggataacaaaggatggcataatagggttccatttgcaaaagcagcatttagcaaacatttcagaatttaataaaacagttaagtaataattaaacaatattaaaccaacactatacaacataccctgttgtataggcccaaccattctgaacaaccatcccggctgcacagttctatctccaaaccaggaatgtaccattccattccaaaccaggagctaatcaaattgttaccaattatagcatcatttactatggtgagaagtgtgaaactaatcacgaaagacattgttcgacccgcccataaccgcgggcacggctattcgaatagttttactctgatcagaggtgtaccactgtacccacaagacacaaccccacatcatgtcaccatgtgcctcaataccaccacgatatctcggaaaggagttgtgacaatacccctcgcataacacaatccattgcagcgcaccttcctggatcataatcacccccttataaacaaggcatggactcccagcgacccccgtgggcttatctccgccacttctcagtctggtgccccgcaatgaaccacgctatacaaaagataaagccgttgcccatgctggcttgtggttggcacgataaatgtttcacaaccgaaactcgtgaaccggtccttaattgtcatgagcacgaccatcaaaaccatgtgctcacaacccaccattatcaggttttagttggcacattaattaattaaccaatcacgattgaccatcgtgaactatcattaagccatcattaaataatagtgaatcataagttatcccaatagtgagctaatgtttctaagcagggctaagcaattatacctaatatctagttgaaccaatatataaagctcaactagtcaaattataataacccaaggtatcaaggaataaggtaaacaagaacaaaagggctataacaaacaataggttaattccacccaatgacattcgaaaataaatgcaatagttgaatagaaataatagctttaaataggatcaatatgctcaaagggttgtttgggatctgtgtgacttgccttgctggccttggaactcttcaaactcttctccggcgaaaacgaactctccggaaacgacggaatctaagcagaaaagagcaaaatcaccaaaacagcacataaacaagcatgaacagtacatgtggatatttttaatatgtagatctcaattttagaaaaatttagagacttgaaccaactaaatcggagctaagatgaattagttatgaatttttaaagattaaatcggattaaaacacttaaatcggtttaatttgaattatgacgcaataatgaattatttttgaaaaggaaaaagggatttattgcgtcagcgggctagggttttggtggaccgggcgcacgggcggcggttcacgcgaacggacggccgagatcgatccaatccaaaacggacggccgagatcgaacggtccacgaccggctcacggcggacgaccccgatgacgtcagcggtgacgtcaccgacagcggcggcggctcggcggagcggacggctcgggcggcgcacgctcgccggtgaacggcggcactaggacgcaaacggagggcaccagcacgtagaggacgacgcggcgaacacaccggtgaccaaaacggcggcggacgaacaacggacgacgacggcgacgagaaggaagcggcggaaaccttcgggttgtcgacggcgacgctgctccggtgatctccggcgacggcgaaggggcgaacgaggacggcgacgcgacggcgaccacgatgacgtccttcccgagcgacggcgacgtctggaacggcggcggcgcacggctggagcggcggcgacgacggcaaagctagggcacacggcgctagagctcttccggcgacgagaggcaaaggcgaaggtggcgacgggtagaggagactccgggggtccttttaaaggggctcggaggcggcgacgaaggcccacggcgaccggcgacggcgaaggaaacctcgggcttggagagaaagaaaccgatccgaatcgaactcgattccacgagcttccaaaacgttttagccgatgattccaaaggagaaaaggtagaggagatcccggagattgtttcccctcttttgattcggccggagaaggaaagggacggccggatttggaagggaaacggcggcggcgcgaactagggttttcggcggtggcggccgaaggaggacgaagaacctgacaggtgggacccacctgtcagcgaccgacgcgcgcgcgcagctgcggactgggccggctgggccgaggagagagaaaagagattttgggccgactttcggcccaaagccaaaagaagactttttaaaactttttcaatttaaattatttcttaaatgcaattcgatttattaaaaacactttcttagctcaaataaatcctagaaaaatctaggaattatagaattaagcaaagtatttaatgaaattttatctggccccattttatattggaatttattaattaaacttagattttcttttcaagacttttaaaataaattctagaaattccatttaaacaacaatttatatattttgaattttcagggtgtgacaaacctaccccccttaaacagaatctcgtcctcgagattcggaagaactggcgaacaaaagcggatgagctgacttcaattcatcttctcgttcccaagttgattcttcttccgagtgattactccattgaactttgcaaaaacggataactcgattcctggttcttctctcatttgtttccaagatacggattggtttctccacataggtcagatcctcttggacttctatctgttcaatattagcttcttcggtaggtacccttaaacactttttcaattgcgaaacatggaacacattatggactcctgccaaagattgaggtaactccaactgataagcaacctctcctcttctactgacaatcttataaggtcccacaaaacgcggtgccaattttcctttggtgtgaaaacgatgaacccctcgaagaggcgtgacacgaagatacacatactctccttcttcaaaactcaaatctctacggcgattgtcggcataactcttatgacgagactgagccactcgcaatctttcttgaatgacctttaccttttcttctgcttcccttaggatatccgtcccgaaaacctgacgttctcccgtttgatcccacaaaagcggagtgcggcacttccgaccatacagtgcttcgtacggagccatctgaagactagcttgataactgttgttgtatgaaaattctgcataaggtagattcttatcccaacttccaccgaaatctaaagcacaagctctcaacatgtcttccaaaatctgattcaccctttcggtttgtccgtctgtctgcggatgataagcaatgctaaagttcaacttagaacccatctcttcctgaagtttcttccaaaaatttgaagtaaactgactgcctcgatcagacactattttcttagggacgccatgcaaacacacaatccttgccatatacaattctgctaagcgacttccggaataggttgtttttaccggaatgaaatgagccactttggtaagtctgtcgactattacccaaatagagtcatggcctgatgacgttctgggtaaaccagtgataaaatccataccgatttcttcccacttccattcaggaatcttcaaaggctgcaacaaaccggcaggtttctgatgttctgccttgactcgctgacaaacatcacatactgctacgtattctgcgatttcacgcttcatacttgcccaccaaaatctttccttgagatcctggtacatcttagtactaccagggtgaatggagtataaagtatcatgagcttctttcagaattgcatcttttaaatctttgttgtcgggaacacagattctctcgcccagccatacagttccttgctcatcctccaagaaaccgatagcttttcctcttctcatattcttcttgatttcttgaatatcaggatcattaatttgggcttctctaacttgatcaattagagtgggcttcgcttctaaggctgcaacgaaacctctactgacaattcctaaatttaatctttcaaattccttgcataattccagtggcaactgtcgtccttccgtagcattgcaatagccttttctactaagagcgtctgctacaacattagcctttcccgggtgataatgaattcccatgtcataatccttaattaattccaaccatctccgttgtctcatattcagatccggctgagtaaagatatactttaaactcttgtgatcggtgtatacctctgtacgagtaccgaaaagataatgacgccaaattttcaacgcatgaactactgcagctaactcaagatcatgagtagggtagttcttctcatgcggacgtaactgacgagatgcataggcaaccaccttcccatcttgcatcagaacacaacctaacccaagtttggatgcatcgcaatacacctggaaacccttctttggattaggcaaaatcaaaataggagctgatactaagcgacttttcaactcttgaaaactctgctcacattcttctgaccacttgtacttcacatctttctgaagcagtcgtgtcatgggcttagcaatcttggaaaaattctctataaatctccgataatatcctgcaaggcctagaaaactgcggatctctgaaactgtcttcggttgtttccaattggttacggattccacattactaggatcgacggcaactcctcctgcagagatgacgtgaccaaggaacttcacttcagacaaccaaaattcacacttgctaaacttagcatacagttgatgttctcgtagcttctccaatgcaaggcgaagatgttcttcatgctcttctttggttcgagagtagataagaatatcatcaataaagaccaccacaaacttgtctaggtattccataaacaccttattcatcaagttcatgaagaaagcaggggcattggtaagtccaaaagacataacagtacattcgaacaatccatacctagtggtaaaagctgtcttaggtatatcttcctctttgattctcaactggtgatatcctgatcgaagatctatcttggagaaaacagtggcacctttaagctgatcaaacaaatcatcaattctgggtagtggatacttattcttgatagtcacatcatttaatgcacgatagtccacacacatcctctgggtatgatctttcttttccacaaaaataaccggagctccccatggtgatgaactcggtctgatgtatcctttctgaagcaaatcgtctacttgcctcttaacttctgccaactcattggctgccattctataaggtctcttatggatcggagttgttccaggtaccaaatctattctgaactctatatcccttttaggcggcataccaggtaaatcatctgggaacacatcggaatactcccggactataggaatctcttccaaagttatctggttcagtcttgaccttaaagactcagatgacagtgcatgaacagttacaacttgaccatcattgctggtgagagttacttttctgttggcacagtctatcacacctttatgtctggctaaccagtccatccctaggatgacatcaaggtctttggattctaacaagataagattggccagaaatggtactcctttaatttctattctgacagaggggctacgttgcaaagagagtgcttgattacttggggtactaaccatcaaaggacgtctaagatcttctacttccatcccatgatttcccgcaaaactcatagataagaatgaatgtgtagcaccagaatcgaaaagtactgttgcaggaactaagttaacagggaacgtacccaaaatcacatctggagcatcttgagcttctgcagcagcaacatgattgacacgggcctttgatgctggtgcggtagagttgctctgggcagggacaaccttcacgcgtcggggcttcggacacttgtcagcgtaatgtcctgggtctccacagttgaaacacaccacgggcttgctgccttgctccctcttgacaggttgttgctgtgctggagctgcaacaggacgtggagcttgattgcggatgttgttgccagcattgttgttgaagaactgacgctgcggacgaacaacagacgaagaacctccctgtggcatagactgggatcctaaagtaagacgcggcttctgattattcccctgttgtgccttgaagtgagcaatccggcatttcttctgttccatgcgattatacttgtcctcctgacgaatagccttatccactaacttctggaaatcagaataatctccagtcatgagtgggtaagaaagctcatcattaagtccttccaagaacttctcttgacgctcttcatcattgcgcacatcttccggagcataacgagcaagacgattgaactcgtgcagatactccgtaacagagcgagatccctgcgtaagcgacctgaactccttcttcttgagagacaccactcccgatggtatatgcgtcttccggaaagcagcggtgaactcaagccaagtgataggttcagcagtagtcctattaaggcggaaatgatcccaccattcagaggcagggccatgcaactgatgcgatgcaaatgagaccttctcctgatcagtgcactgaagcaaatccaacttcttctctatggcatgcaaccaatcaccagcttcaacaggattagtggtactagagaaaacaggcggccttacatgaagaaattctgctaacttattctgaggaggtacatggttatttccttggttctgctggttctgaagttgctgcatcatcatgttcattagctgtgtctgttgagcaagaacttgagcaagagtgggattctctccattgttattgttattggggttgttgggaccattcccgttgctgcgagtgttcaccatctggcatggacaggataagaagagaaaccgggggaaactacttaggacagagaattactttaacttttattgatcttaactgagttttattataacaaactgaagactctcacaccactaaactcaccaacttcctaacactcaaaagcaagcaaacgcatgcacttacatcccaccactgatgtaaatcacatgcaagacccacacacacaaccaaacttaaagcaagcaaactaacacaacgatctaagacaacgacttaacaagtcactctagttcttccaagcatcggaggtcgattgaaggctcattcggctcgtcttcatcatcttgggttgctacccactcaatcttggaatggttgcgctcggattcttcttcttcatcactacttatgatgatgactggaggatctgctggggcaacttctttctccaccacacgaacctttggcgccaattgatagcgagggacaaatagagctctcttccttgcggtaagacgaatcctggccttctgcggtggtgcttctccctttaatgcggctagttccttctccaaacgatccaccttgtcttctagcttgcaaatcttaccacgattccgatcttcacgatcttgagctgctaacacagtctccgcacgactttcatccatagcccacagcatctcaaccaaatgccttgtggtagcatcattctcaattccttcagtctcaagatagctgccacggtcacttccctggggttggcgaggatggtagcgatactcagtgtctgccaactgatcactgtagcgatcacggagctctcctatggcgatccttgccacctcctgacatgcatggatgtagtttcttcctccagcttcgaacatcactgagggaatatcttcactattactgttcaaggtgactttgactcggcacttctcttcatgacgatcatgacgaatctgggcataaaaaggggcagtcccaaatccaatgacaaaggacatcgtacgcaactcctggacaaaaccctcaacaccaaacagatactcaggcttgtagcgcggcatctaaagacaagtgaaaggagggagttaagacatttatccaattaatagcacaagtttttggattaatttgaataaagtttagaaaatccaagtaaaaggtaagtaaataaaataaaccaagcttgcaagatgagttgaaatagttgaaaacgaggtcacaagttttgtacttttgaataacaggtttcaaaagaaataaaatcaagttataaaatcatcatgctaaatttattatattgcagcaagactaaataaaacaatattgaaaacttttgctgataaatgagccattagtacagtaatagatgtacagtactaataacactggaataaattttgagtgagagccattaaaagggattatgaagtgcatgtgccattagtttggtttaattaaaagagaaagggaggagaacagttctacttttccaatatttttagagggcttctatgggtaaccatttggcataacctagggtcaaggggctctgataccaacttgtcacgcccggaatttctatccaaaattccaaacgcttacatgtgtgtgaaccctcgtccaggaatcagccgaggcacacaacaacaaattggtaatagagtacaattattactctaattaataagcgaataaaatgtcattacagaggtagatagttcctctcaatcaaaaaagatctaagcagcggaaaataaaataaacggcgcagacgactccactccacaggcagcttgaccaaggctacacctactcctccacaccatcagcctcattgaagaactcttcctctgatgaatgattgcaaggtgagtatatgacatactcagcaagccacgcagcaaatatgcaagt

SEQ ID NO: 9885 - DNA, 7587 bp, Oryza sativa
  unsure (1)..(7587): unsure at all n locations
ttctgccatttgccttctatcccttaatcttttgacattaaatggttcgtgaaaccaaaaaggatgcttccactacagtttggagtacaatacactgagtgtcacatttcctccctccctttttatcctgcatgcaacacatagtttggggtacatgttcttttcagtttcaaaaaaagaagaaaaaaattcagtaggagataatctaaagtaatgaaagaaacaacctttcttgaaaggacattgggctacgcaatgtgaaaaacaatgaccataagatgaatgtttcgatgaaagatggacatctgatcattaacatacatgcggtaaaaaaaaaaatgcactagacacttccctcccgatccttcgagtgtctcccctcagacatgtggcaagcaagaaaaagattactccatgaaaaatagataatgggctattggtttgcatggcaattaattggcatactttaatgggctgcactaattaagatcaattttgagatgtcaaataagtaaaataaacatgaacggttgttgtgaagaaaaataggaatacatattacggtagtactgtatgtaacttacgggctacttcagttgtaacaatcaggaaaaaataccactataactacaaggaaaaaaaacaatcttaagatctttcaacaaagatggcatctcatagtcgcgcgaacacgcgactccgagaggctaatctctatgtgaaatctaaaagtaagttataaaacaattatcaactagccaacagaagggcagtctttttatgactgatacaatagacttacaaagaatgacatcagaattctcacttgggaaaaaaatgataaaagtacgctgtttaaaatgtggtagctattagatgatccatctattacattatagggatttgctattcataactcaactgaaatttttttgcaagaaaaatcagattcctaacctttggatccggcagagattcgtgctccggcgagattcttgactctggcggccgtgcaacaacggcaagagcgccggattaggtttcaggtggggttggggttagggaagggggattttggggagagggtggatccccgggtttagcgggaggccagcgaggcggctgaccggaggtgcgtggtggcgccgccggatccgcgggctggaagcaggcggtgggcggagtaggcagcgggggcaacgagaagtcgagtggttagcaggcgacgcccgtatctgnngnnnnctatnntgcgaagacagggaagggtcggcggcgcgaaggcatcttgccggaactgtaggagacgacgaccggcttcgagcgataagaaaaaaattcccaataatgagggggaagggacaccgggaagangaagggttacgcccagtgggcgggcggcccgggcgtctttcgaaggcaagcttgtctgccgggcggcgttgtggcgacttgctactcgcgagcgaacagacgagggtgacgagagtgttgcagttgcctaaatatgtactccgtcgtatttttacattttgcttacatggtttaatcatttatttattttattaaaaatatttagaattattatttatttttttattcacttttttatccaacgtactttaaacacaattttttgttttttgtgttttatatttgagcaaattttttaataagacgagtgtttgttttttaaattttatatttgaacaatttttttctagtaagacgagtggtcaaacggtgtaaataaaatattaaaaaaatctcttatattttggagtagagagagtatgtactacctccctatcagaatataataatatgggatgggatgagactcatctcagaataatttatctggatatgtttagaataggcctcattttatcctacgtggttatattttgggacggagggagtaagctcgtttttcttgctgcttcttttagtgtgctctaactgctctctctttttcgtcgtcgtgacttttttaagtcaattagtttataggaaaatataggccgagtatatttccaatttttttaaaaaaaactttctacttttttatcacatcaaaactttcctacacacgtaaacgtctaacttttccatcacatcgttccaattttaactaaactttcaatttttgcgtaaactaaacacacccatagtagcttttttaacacaaaacaaatatattatcaaaatatattcaatagcatattagatgttagtaaatttatttacaaatttaatcaaacctaacaaagtttaaatagaaaaaaattaaaataacttataatatgaaacataggaagtagcttatagtctatattgtacttgttgtaattatgcctcgttcttttcagcaaattcaacatgcaactttctttttttaagcacgcttctcaaactattaaatatttgagtagaatttttctacatagaagttccttaaaatcaaataaaacaatttttcaaatctttagtaattaatactcacttaatcatgtgttaataacatgtctcatttcgtaagaaaaaaactaacaggatcaaatttataatggaggtgactaatatttatgtagtctatcaataaattaagaggggtctcgtatgtataataggttgtttctaatacataaccgttaactgctctaacactttcatatttttattgaaacttacgtagagattttcctttgtatgaggggtgtttttttctcttctccatcttaccgttcaggccacgttctaaactctaactattcaacttcctcgttttccataagcgcggttctcagaacgttaaacggtgtatttttttgaaaagaatttatataaaagtttctttaaaatatcaaatgaatctaattttcaaatatttaataattaataattaattaatcatgtgttaattgtttgctctggtttccgtgccggttaaaatctcaattcctatgcagaaacgaacgaagcctagtcctaaatgatacttcctccgtcccaaaatataaacatttttaacacagtgacaagtcaaacatttttaactttgactattaatagcaaaaagataaaaaacatcaatcattttatcattaaacaaactatcataatatacaactttttatttaaaacatattactatatatatatatatatatattgtatattgtattgatcaaagtagtatatcggaaactatgtcagggtctaaaactgcttatattttaggatgaaagaagcatcccgtatcttgtgtttacatgtatcactttatccagcatccacctcatgaactgccaggggcggagccaccgcctggctagcccaggcagcctgcctgagctcgctggcaaaaacttcattaaattttaatattgttgaataaattaatgatgtaatttttattaaaaatgatagttatagtgaagtttgctcgggctaaaaaatatttctacttgcgccactgcgacgcggcaaatttactgtcgtcagcgctgtaagtctgtaacacaactaaccatgtgttctagtagttttgaagtttcaactccctcgttttccagaaatttcaaaatttgccatcgaatacgcacgggtttcaggacatgccatctaattcgcactactttcagaatacatcattgggacgcgaatcttcttcattttacgccactccgtccggcgacgtcagtcctcctcgtcgtccgtccgtctgccgccacctgcgccccgtccatccgccggcgccgccgcgttcttgttcgtccgccggcgccacccacgcgccaccgccctcctcatgctcggcgtcctctgccactcgctgtcgctcatgcagtcatgctcaggtacgcgtcacctccggcgagcacgccatcgtctccggtgacgccgccctcgacctgtcgtgtgcctgcagcatcgtcatgctcatcgcctacctcttcttccaactcaagacgcatcgccagctgtttgagccccaacaggttcgtgattgatcgatccgatgcatgtcctgtacgttcgatccatccaaccaaatggtaatcaggttgaggatgatttagtgatcgctcaagatgatgagccagtactgggatgatgacgatgatgcgcgcgggggcatacgaattggatgccggtgtcgttgaggatgctgacaccggcggaggcgaagttggcgcagacaagcaggttctcgcctcggaggtcggggctcaggtaaggcagcgcgggcatgtgagtcaggaagtcgatcccgtacggcggcgccgctcgcatccgtccgccggcgccgcccgcgtccccgtccgcccgccccgccatcgcccactacccctcttcaccgaatctcgcgcgtctcgccgaggagcaccatcgcgcctccacggggaagatggctgtgtcggcctcctcgacctactcgacgacgacctccaccacgagctcctcaactagggcgattttgtccaggcggcgtgtcgggtgttcgctcgcagtggccgcgttgagcaggccgtcgccgcggcggcggatggacggggactgacgcagctgtcgtcagaggtgccgcggacggacggggacgtgggtgccggcgctggcggatggacaggaacgcggcggcaccgccggatggacggggacgcgggcggcggcaaacggacggacgacgacgaggaccgacgtcgacggacggagtggcgtagaatgaagaaaattcgcgtcccaatggcgtattctgaaagtattgcgaattagatggcatatcctaaaaaccgtgcgtattcgatggcaaattctgaaaattctcctcgttttctatcaagcttccaaaactgctaataaaacgttttgttttcaaaaacctttcatataggcctggtttaattccccaaatttttttccccaaaatatcacatcgaatatttggacacatacatatagggcaaaaaaatatagattaaaaaactaattacaacgttaggggagaaatcacgaaacaaatcttttaagtctaattagtccatgattaggctcaaaagattcgtctcgtcgtttccaagcgagttatgaaattggtttttccattcgtgtccgaaatactctttcaacattcggtcaaacatccgatgtgacactcaaaagttttctttttacgaactaaacagggccatagaaatttcttaaaaatcaaataaacatatttttcaaatagcatccctacaaacactcatagatcgtcacatggtgttctaataaatcttagaaattctaagaaaaatttaagacatttagccatcggttatcatttaatttggtggatccattgttttcaactattagacctattaaaaagttgtgaattcaatttatctctaaacaacaagtacggtatgtatgtcgtcgctgatgtgatgcacgcacttggtattggaataattaactatttaccactcttacaagtggtaattaaatatttgccattagactcacatatcataaaactgcgagtagcaaatttttaattaccacattttaaaagtggaaaaaagttaaattaatgaccacttggtatcgtccccgacacgagcgtaagccacccaagtgactcaaaactgcaagcctagtctaatttgcaaatggatggtaaagatacatgttgcaaactgaaaatatatgcttaggttgggaacccttctcttcgacatgcaaaacgaaactcgtattattacatgattaactgttttttaacaatggattaatataattttttaaaacaacttacatatagaaagttttttataaatcacacaatttagtagtttgaaaagcgtgtgcgcggaaaacgaaagaggtgggttgagaaaagggggaagaacacagccttagtcttggggtctgtttggttggggactaatattgccacacattttttactaaggtagctaagcttagtcttgccacacttttgtggcaaataaaatgacaaattaagcttaggcaatgtttggcaagaaaatatagtgtatgatatgtgggccaggtggctaagagttaggcaaaatagacttgtgacaagaaccaaacactatctattaaaactttggcttgcctaaggttaggtgtagtaaatttagttgccaaccaaacaggcccttagtcttagttcaatgtatcactttggtcactttaaatgctcaaaaagtgaatgttactctaaagagtcttaaaaaaaatttgtccccaaaggagggccgtgctggggccaccccgtgtcagagcaggtacaatagcgggctattagccagctataaacatattttaatgagataaaagatgagagagaagagcagcgggctacagatctgtagccaactacagcacagactccaagacgcaatgtgtatatgacaggtgggaccatatgttaatagtatagtaagcaactattgtatgaattggctattagatcggctatagataatttggagctagtagtgggctatactattaaacttgttctcacgggagcatgacctcgccaaaagcaacttgctagacgtgcctccacggcgtaagagcaggtacaatagcaggctattagccagctgtaaacatattttagtgagataaaagatgagagagatgcgcaacggactacaaatctgtagccagctgcagcgcggactccaaaacgcaatatgtgtatgacaggtggggaaccatatattaatagtatagtaagcaactattatatgaattggctattagattaactataaatgaattagagctaatagtgggctatactattaaacttgctctaaggacatggccaacggtggccataccccatcttggaagtgggcccaaccacacgaggccctcaatcccctaagagcaggtacaatagcaggctataagccagctataaatacattttaagaagataaaagataagagagaaggacagcgagctatagatttgtagccagctatagtatggactccaaagtgcatatgtgtatgacagatgttatcagatattaactatgtagtatatgtttataggtaactattgtatgaattggctattaagttgactatagatgatttagagccggtggttggctacactattaaacttcactggtggagaaatgatctttgctgggtcgacccaaaaccacaataatcccagttccaaaaagaaccgggactaaaaatgatctttagtcccggttgaaaaccccagaggcattgtatgatctttagtcccggttagtaacaccaaccgggactaaaaattatctttagtcccggttcatcccctgtcagattgatgtcagggggccgagcatctttagttccggttggtaacaccaaccggaactaaagatcaccactttagttccggtgggaacaccaaccggacaaaagatcaaaccgatctttactcccggttgaaaacaccaaccggaactaaaattcgaagcgtggtatataatccatatcccttatcctctcctcaacagatcgaatctctcccttctttcccttccttct

SEQ ID NO: 9886 - DNA, 5454 bp, Oryza sativa
tatatgagaaaaaaaagttaaataagaagtactctctcattccctaaatatttgacaccgttgacttttttaaacatgtttgaccgttcattttattcaaaaacttttgtgaaatgtgtaaaactatatgtataaaaaaagtatatttaacaataaatcaaatgatatgaaaaaaattaataattattttttcctaatcggccacctctaatatatctgtccttttggtccctcctctttatttaaacaaataattttccttattatccaactacagagaatcctacttatgcaaaaagcttgccaagccccaataattacccagaatttctgctccacttggccaaaagcatactaaaagaaagcactccctccgttctaaaataagtgactaactttatcatgtatagtctaaattacaaggaaagctgagaggtaaatgataccccttattaaatgagggatgtatatgtgtgagagggtagttggaggtaagatatatgagaaaaaaagttaaataagaagtactctctcattccctaaatatttgacaccgttgacttttttaaacatatttgatcgttcattttattcaaaaacttttgtgaatgtgtaaaactatatgtatacataaaaatatatttaacaatgaatcaaatgatatgaaaaaaattaataattacttaaattttttaaataagacgaatggtcaaacacgtactaaaaagtaacggtgtcaaaacattttgaaacggagggagtatatatacttctattcattatcttaaaaaaatatatacttgtgaaaaaggaaagattcagttattacggtatgcaaaattccccaccttgtcatttggcgtgctttctgcttccgccttcgacgtcacatatcacgatgcgcttgcgagactgaacaaattaagctggagtactatattatcatgttgtttgcttgacgagatcagatagatgcaccgcttcatcgatctgtttcgatgaatcgcgcgccgatcgagacgttgcccgatctccctcgtgtgcaaatttcagctcaagcactgcaaatccagtttgcgaattgcctgaaaaatttgcaaattgagctcaaacactccgtgtatagttcttcaaattgatttgcgctggcacgtaagatgtttatattccccagcccgcttcgtcgttcatttgacgtattccttgctcccgcctccgacgccaccgtacatcgcacggttgttgatgtaccggatgcatgaatggcttggtcgctctccctctctccatttcaacccaactgcgtgaactaaacttaatttgagcgcgtcagatatcaagctcctacttgatatcgagccggttagcggcaaggcgttggcgtggtggccgcgcgttgaaggtgtacagttagtggtggccactgttttcagaatgcaacggcaacacgagaaggcagattacaggcacaagtccaaccttgttgggccagcaacggcgatgcctacatacactgctttcccattggggcgtttttacgtgaactttctcaaccatgccacctggatacaagaacttctccgaggaattacttgcatgtttcctcgtcgatcggctggatgactacttcgctagaaagaacaagatacatgacaagcgcgtgaaaccaatcctggagttggtaaaaaaaaccaatcctggagttggtaaaaaaaaccaatcctggagttggtaaaaaaaaccaatcctggaggagcagagaggatttgcaaggagtacaaggaggaaggctatgccgagtactggatcaccgacgacgaggacgaagcagccactcgagctccggcgccgggacggaggaggggtcgacgaggggtcatgaataagaagcataccggaggaactaagaatctttaagtgaataatagaacaaagtttagagatatctgtgcactcgatgcaggtttgagagcttcttatgtagtactcccttgcattttaatgtatgatgtcattgatttttttatcaacatttgaccattcatcttatttaaaaattttatgtaattatcatttattttattgtgatttgatttattatcaaatgttctttaagcatgacataaatatttttatatttgcacaaaattttgaataaaacgaatggtcaaacgttggtaaaaaaatcaatggtgtcatatatcaaaatacggagggagtaacaaacatctggtgatcatctagttaaaaggtagcccgcatctcccaagtgttgttttcgttgtgctatgttggatggttagctagtataactaagtgcagtagttaagtgcttttacggttcttgagagttccgatactttatagtgtaaaatttggtatctaccgagagatactaaatttgcgctcaaaattttggcacttcttaatatctcttaggaactataaatatttcgcagtagttaattcaatttgcgctcaaaattttggcacttcttaatatctcctagtaactataaaatctttcgagtagttaaatctctaatcattgagaaaatttaatttgtgcccttaaaaatttgctcaatcccttatgtgtccatcaaattttgcctcatatcttacacgccatcgagttttcatcttgatcttctctgtactcattttgctggttgaccagcaatttttttttcaaaatgtaacatgatctaagttgaaaaaagtcattgtaaaaagcaaaggggatagaattatttaaccacaaatttgaaaaaaaacacaaaattgttaaataaatttcagatcaaccttgatgaacttcgttgaacattttcaacaaaatttaaacctaaataataaatttaaacttcgctgaaacaatttggtaccgtgaggtacggtatctcgagatactttttgatgtactggggcatatctcttccctacactaactaatgccaacacatcatgattaatcatcatatctttctaacgcttcctcctcctgacaggttcttcttcacggcgactccattgcggaaccttctccggctaggggagcagcaactcgagcaggaactttattgtctttgtcgtcgtcgtcgtcgtcgatgtcgacctcgtactcggcatagcctttggtgaagtactgcctgaggatcccctcccgttcaccccggatttcgttctgcatctttatccaaaaagccttgtcctcttctcggctgtcgtcgatcgccttgagttcatcgatgtagtcttgaggacaattcgcgaggtcgtcgccgaggatctcaatgatactcggcatgttgtcgtagtcgggcatctcctcttccttgtacgtgatgcagttgttgatctgcgcttgggtaaaccgcaccatcttcgtcttcgccttcttcttcttcttcttcttctccatcaccggcgccttgccttcatcggaggtaaccggcgccggcgccggaatttgtccgtcactttttttccccgagggagcttcatcggaaggatccatcgttgtcgatggaatttggctttgatcacatgttcccttggatgtgctcgccattgtatttcacatgttcccttggatataggctcttaatttttatggaagcaccgggtcgatcagaaataggtaggattcgggatcacctcgtagttcaggttcagcaggagtccatgagatgcgcgactcatgttcgactctgactcttcttctttcatggtggatttgccgtacgtagttcgtgcgtacggatccggccctatggcagccagcacgcgcggccgtcgtggttgacgccagcggcgccgggacgctcgagctcgctcctaacggagatgactaacccatctctctcgtttttcgtgcgcacgcttttcaaatttctaaacggcgtgatttatacaaaaagtttatatatgaaagttgttttagaaaaacatattaatccaatttttttaaaaaagttaatgcttaattaatcatacaataatataagcttcgttctgcgtgtcgggaggagtcccgaaggtaatttgacatgctgccatgcatatgcaccaactacaaatttagctagtagatccgggtcctcctgtgcacgcgcgcttgtctaccgcgtcgtgcggtggtgtggcggcggtgcgacgcgcgcagccggaagcgcggcgatgcacgcggcgcgaatgtcgtcggtgccgtggtcggtgccgagcgcgcccgcctgcgccgagggccacttcacccatatcctacgccgataattgctcggctatttatagtgtagtcttaaaactactcaaagtgataaaatatttttaaaaacaacctattaagtagcattttattcttgtcattttaatgggtggcgttttgtcgaaaccacgtgaaaaaagagtgccatattgtcctttttctccaatgtttggtatgccgggcagccgggcacactcacagtcacagacggcatcgaatccggaacctattcggttcggagtcggatacaaaacaaacgggtccgacgattcgcggaagcgattccgaaaccgagttattgttggagttgcgcttgcgctgcctatatatattccggcatctacccgaacccgataactctatcgcaatcgggtcttgggcctcaatcgagaggagactcaggggaacaattcatcaggggcgcagctggccttgccttcgtgggcttaggattagatgccgcaccttttttcattcagatgttgtgatctgatgcgatgttgtatcattattatcatacaaatgacttagctctttcggttcggtttcaatggtgacggaatttcaggcgtcggggtgatggatttctccaagatagaatttagtgaggcgaagcggattttggcggcggcgctactaacctccgacgacgaagatagcaagcctccgacgacgatggagaagaggaagacgaagatggtgcgctttacccaacagcagatcaagaactgcatggcgttcagtgcggacatatccgacgacgacgacgaggaatccctgcccaagctctcggaggtgctcagcaaggatatcctcgatcgggtgccgcccgaggttcttgacagcttgatagagttcgagaacacccggggagagcgcaaggctagatgggagaagctacgggacgatcttcatgaggaacgggatgctatcctcaaacaatactacacgaaaggctacgccgagtacgaggtctatgatgacgaagatgatgatgaagatgaagataataaagttcctgctcgagttgctccccctggccgccgcagaaggttccgcaatggggtagccgtgaagaagaatcggtcaggaggaaacattagaaagatataagctgaatgatcatgttcagtgttggtccatatccatcttagttgtagtgtagggggaattatagtttctccttc

SEQ ID NO: 9887 - DNA, 55465 bp, Oryza sativa
  unsure (1)..(55465): unsure at all n locations
agatttttggtcattagggtaagttcaacacgcagtgaccccttgctgtaattacacaacactcagttcatttgcaattaataaatattaaatgatgttctgttgatttttctttttttacattttacgtacagtttgtattaggtctgacatattcttgtgctgattaaatgtgagaggccacagacttgatgatattaggtaaaaacgttactaaagcccattgttagatgcgaaatataaataatggacaactagtttctgagcttttagtggttccacatgcaagatctctaaactcatttcactagcatcgctacaagttaaatgtgcttttagtatacataatctgcattctgcaatgctttacttgtgctctgactctgaaacaacccaatttgttaacgattacctcatttcttttattgttcaccactcaacttcataagaacagaatgcctattggctgctcaactcatcgttctgttgcttccttctagattttctcctctgccaatatctgccattactggcactggaactggagagctccttgatatggtgtgttcagagctaagtaattttgaggtactgaacttgcttagtttgcccagaggccagggaatgtttaattgtgtatgtctatatgcatgcttgatacccttttctgtttatggttggtaatggaatcattattataattttttgttgcaacactaaaatgttactcttggctgcggaaacaactcaagtattgcttctgacaaatggatatgctaacttagtggaatatttcactctctttcctccagtcctacaaacctagatgaatactgctagaaacacgtggtgtggtgacaccttgttatatccagcctacccattgagcttctagatccagaaccttgaatcataagttgtggtgtttgtcttttcagtagttctttaaaatagccttctcctttccaattttgattcatatatggaaatattttgtccattacctcacaaaatgttttacaggaactggatggagttgaagaagatggaaactatattcctgctattgccattgtcggaagacctaatgtcgggaaaagtagtattctcaatgctttagttggagaagatagaactattgtgagccctgttagtgggacaacccgtgatgccatagataccgagttcaccacagaagatgggcaggtttgttcagaatgcttatgaaagtttaagtgaccaagagcagcatcattatttcattattgaccctagctatgtccacttttcatgcatctttcatctttgtagcaaaacacaatttgaattggaagaaagaaatttacatctcataggaaagtaattctaatttgctgatattgcaatatgctgcagaagtacaaactcattgacaccgctggcatccgacgaagggcagcagttgcttctgctggcagcacaacggaaacactttcagtaaaacgtgcatttcgtgcaatccgccggtctgatgtggttgcccttgttgttgaagcaatggcctgcattacggagcaggtatctctaccccatcacatgcacatgtgcacccccaaacaattcaaagagatgttgtcttaccaatcttttctaacatggtgaatttctgtggtaccaaggactataaaatagcagaaagaattgagaaagaaggaaaagcatgtgtaattgttgtgaacaaatgggacacaatcccaaacaagaaccatcagagtacaacatattatgagcaagatgtaagagagaagcttcgcatactcgactgggctcctattgtttattgttctgcaacacatggcagcagcgttgacaagttaatcccttaactttattttttactccgcaataagcatttggtacttcactactatagcatttgatggtttaagctaggctatttgtagcttgtcggtgttattgtctattttcctgcataccagacctgaaatttaagctgatgtcattaaggcattaactaatgtttcatgctgaatcttcatgttcctctgttatctcccaatttcttgtaatccaactaattgcattgcatgtaggagattgttaacttcactagatatgtttttctgtattggcattgtaattattctttatacacaaatattcctcaggataatttctgctgctgcactagttgaaaaggaaaggtctagaagacttggtacgtctattcttaatcaagttgttagagaagctatagcattcaaaccaccaccacgaacaagaggtggtaaaagaggtcgtgtttattacacaacacaggtagcttctaacttcttattgaaccattctgtttattcctcttaagccaacaagtttatggtctcacctttcaagtaagtcgtaaaggtcactagcgttctcttgatctctactacaactaaattttcacttccttgtatgtcaagtgaagtccttaaatcaaatacagctccttaattcatttttaagtatctgaagatatatgattgattgaaactggatcccttaaagaagtatttcaaagtcagcaaaggatccactggttacccacttcaaagtatatttgatacactcactgtcctaagatagagtagtaatatgcattctgcaatattatcagggccctttgaaatccgtactgcttttagatttgtaaagttcaccttggggaaatgttttcatgctttccttttattttcgcaccaaaggaagcttattcttaacctgcaggctgccattcgtccgccaacgtttgttttctttgttaacgatgcaaaacttttccccgagacattccgtcgttacatggaaaagaagcttcgctctgatgctggattcccaggaacccctattcgtttattgtggcgtagcaggaagagaccagataaaaaaggtgagtcgatatcaaagtgcccacttgcataatctcaatgattttaactgaataatttttctactatcatacctgcatgcatagaattagaaaagattattttgtgattgaatcattgaaacagacagaacgacaatgctagataagtgaaaaaacacagaaggaacaaatattgtgctatcagcaagagagatttttgcagtcccattatatttgatttcaccaatttctatgatatatgtaggtgtaccgtgcacatgataggttaaggaccttggtccttgtattagaacaaatataatgctaatatctgctgaggcttgtagcatcaaggtagttgaccaaagtaataagaatacaaaatatcatgtgatgatagaacatatagaaaaactatttaattgatctgggtatatccaacaccgctatgaatttcatattaggagtaatgttttgtgctctaccatacctgctgttataagtcatatgatgatgaggttaaatagaattgtcatactaattactccatctgttcttggcaggtaaatctgcagacaacagcttgcagagctcagtaatcccaagcagaatggcgttagccacatgagttacacatgcttttcctttcttgagagcggaaaaagggagagaatacagaatgctttgcctgcattttttcccaagaggtcaagactgccggtaaaaaaagagtacaaattgtatatgtagtggacgagtactaggactggaggtcatctactaggtgttgtgactacatggtgctagtataagttctgtatccttggatgtctaggatgaccagcaatttgccacgtttggtgctctgacatttgcttgtgccttggacgaatactgaatagtactctctccgtttcaatttcaggttataagaagttttgactttgatcaaaatcaaactacttgactaaatttatatacaaatatagtaatatttataataccaaattagttttattaaataataattgaatatattttcataataaatttttcttgggttgaaaatgttattatcttttactacaaaattagtcaaacgtaaagcagtttaactttgaccaaagtcaaaatgttttgtaacctaaaatggagatagtagtatattgcgtaccggaatttgccacatcggtgcctccacatttttttaacgtctcgcaacaatgcaaagttcatattcatattgatagagtaagaaaaaaagaaaaataacccacacccatgcaccgacagctccaacccaacaaacctaggagaaaaggctagcaccgaactggttgtcgctatgcatgaccagtcgctgctaggccaacaaaggaactatatccgagaatgtccaaaatctaaccctaacaactgacaccaagcccactctagccacctcttgagattgagggagagagggggtgagagagaatgttggaatgctttcccccctagcccttcgtcatgtccaccttgcataagctagagcgccgacacaaggggacatgcatctagagcaagcttacaccagttgtctggaaggattcggcaaggggctgcctagataatgtctccaaggagaggagcaaaggatacaccgctgtcgtcgtccattaaagtctcaaagagagccgagactgggttttcactcggcagccccactggaggtgaaggggcggcacgataacgccctcaaaaggtagagacgttagggtttagaaattcatttcaattgatttaatttacctttttatttggaaatatttaaatattcacctcgaatactccagtgaccgcttcgtgcaccataccgaccgcctcgacatctcgaacgatccagctcagctcaatctcccgaggtaacgcatggcgcctcgttctccccgaaattacgcctactcgtattagagcaaggtcaatagtgcagcccactactagctccaaatcgtctatagccaatgtaatagccaattcatataatagttgcttactgtactattaatatctggtcccacatgtcatacacacattacgtcttggagtccgtgctgcagctggctacaaatctgtagcccgctcctcttctctctcttcctttatctctttaaaatatgtttatagctggcttatagcctgctattgtacctgctcttactactcctacgattcttttgaccaaatattttccaccgtccgttggaattgcagtcactgacaccctgaccccacacgcacccttacccctcctgtatatataccccctctcgatttcaccatacgttcccctccccctccctttcactttccccatctcctaacaccacggcgaagatgcaccgtctccgccgccggccgaccggagagcacggcaccttctccgccgcgcttgcccgccggtggctgccgcggaagacctgttcctttctccggcggacggcgggcgggccttccgcgccgtcgacccgtccatagctccgcctccgtgatggcttgtcgtgtcgccggcggcggcggcggcggcgggggtggggtttcctccgccgcttcgtctcggtggcgaggccgacggcccattggggcccaatggggaaggcccatcccccgtggcggcttcccggccacgccaacgccttcttcttctgatgaactctccctggcaactggggcccgcaccgactcgcccaacggtctcccccaattttcgcctcttccgcctctcctctcttccaactccgacgagcggggccaacgccgatcgccgcgccggagcagggctagggttccggccaccgccaccgccagaacggtgcgtcgcgtcccgtccccatccttcttctgcttgctttccccccgttgtgttgcgctgtgtttttgattccgttgttcttgttgattttcttgcaggaatggggggttcgttcggatggttggagtttctcttatcgacctcgcacccgtgcgaggatgatgcggcggaggagcttcccgtcgagccgccggtggcggcgatggatgccgcccatgacggccgcgatgaggtgcggggagaagtcccctccgagccgtcggaagtactcgctggagaggaggaggcggcgatggatgccgcccatgacggccgaggcgaggtccggggagaggtcaccttcgagcgggcgatcggtgcctcctcccgtgcgggttacgaaggcatcaagctgggggaggagccctccctcaaaccggcgatggtgggcgcgcccgagattaagatgatcgagatagcagaggcctcctctgttgcccagtgggacttgttggcggggacggaggattgcagccctgagattaacccgaagattgtcgacctccagcagcagcagcaggaggcctctctccttcctgatgaggtcatctctgaggcagacgcgtcaatcttggcgcagtattcatcggtgacaaagaaagacgatgatgctgagttcttgatttgtcggccaaactttggttttgttacacgaccacagcaacacactcccaagaaacggcaccccaagaacaagcgggctatggggattaacttggtaagatgtttaaagccaacactatttgtatctgtctgccttctttttggacatggaatttatactgatttcattattgatgtttcaggctaagtcttcttgttcttactgttttcacttatatcttgtattccagataatttttcttgatggagattgttgtatttagtagatatatgttattctgtcttgatggagattgtcaactttcatagacatgttattctgttttgatggagattgtcaacattaatagacatgttattatgtctagatggttattattaactttaatatacatgttatttagtgtaggcattttttttaatatttatttttgttttctctgttttcttaggttactctacaatctacatgtctaacagccattgataatttatattgtcattgtgttttaattaaattgatattttgtggtattgtgttttgtagtggttaatctttaattgttaattcatttctttcttcatctctgatctagtatgaattatcaatggtgtaagcaagatttgtgctgtaagcctaattgattttttccttaacaccagacttaactaagatattagctttatatttttcaatgcgattcgtgtttttgctctatatcttaactaatatagatggtggctctgaaataaaactaacacaagacaatcttgtaacaaatatagttcgtgcatgctttgccatattattgtagggattaaattccatcagagcttttactggttgattaatactgtcaatagtattgtatataaacagtgaagattaaggcaagtaggcaactgattttgttgatttaaattcactgagctttgcttttctgatgtttatatgtgctgccttgtgcccatgtctttttgctagtcctggacactgcttgctttggcacaatgcattcatacggcccaatggtgcagtcatacctttcccttgttgttaggcttagttcttaatccctcaacgtttgttgtacaggtttcgagccaaataaatgtttgcttgttgaatatgccttgaataattttgtactattattaaataatgagtcatcttttggttaatctgcgtttgtttgtattagatgtgtttgtacatattattgatattcagttattgcgtccaaaaacatgatattcagttaatctgaatttatttggttcatctgttttactatgggattgattaccattcatcgtgaaactaatgtttgatcttttgtttttcagttggatcgagagggaaatatctgcagtgatgataagcttccaagtcagggttgcttggttggtgaatacaataatcttttgctgcagttgtatcagctgctgttcgatttaaaagagctaatggagctttgtggccaagctgataagatccagagtgaggtgttccttaaaaaggcaatgaaaaaagcttgcagagattctgatgatgctgttgcagacatagtgtttcaggccctaaaggtagatggtttcattctgaggctattaaggtatctgaagagccaattcaatttttgccggacccaggcatggaagataaggaatgagatattgagaattggtggtacacccatcaatgatccactttccaaagattctccttgaactttttgcttctgggcccttgaaccacctccaatatgggacgttgttctagaatcattgagacatatgctcctgattaccacatattttgcactttggcttgtggtggtcgtaattgttttgtgctaaatgtaatcctctaacaggctgaatgtgaaacggtcagctgtggtactgtatatagacatgtatccaatctgaaatgctttgtatggttgtatacctggatggacatatgcatcctatggatagctggtgcccagctgtggcaatatgctcgttgtatatgaattagcacagagagtggtgaatatgaaacttcctgttcttgttgatatttcactttatgttttaaattctcggcatcactgcttgtgaaattgttgaaattgtcctggttattcttggattataaatatctgatgacttttttgtttctgtttctatttttctataattttgaaatgtaataagccttcggatatttttttaagggccctcttaatttgtaaagtcttctgtattttgtgatcataacaaatttcttgttcgcggatcggacaagttgtccaatctttttcaactcgatgcattgatgtcagtatgtttggttgtggacagacaccgtttcggattggatatcatccgacaaccttggtcttcagtgcccgtgtctcgtttgctttatttgtttcggacgtccctgtcgcttcgactccgattctgttaacttcaagcgtgaaggccctatataatgaatgcacttgttcgcttctctctctccctctctgtcaaaccaagatcgacgctctggttgctttgttaagtctgcacagggaagagaaaattgtacgagttaactgatttgggcaatggaaacctcaggctctgacgagatgcagcagggcgtaaaggttgatacgactcgggtcatagagaacactgctagcaccgtcgacagcgagacgcccgtagagcaaaagaggagaaagaaggtggaaacggagtatgtcctcggtgggaaggatctagagtttatcttgtcatacgaggacgatgaacttgagacatttgatgaggatatgctcaaggaccaggcaatggtccggcaacagattgagaattttggctatggtttcctccatagctggagggaagttatctgcactgatagtgaagaagaagatgaccccgtgtccgatgatgatgatgatgatgaacaagatgacttcttcaccaatgatgatgatgatgaccagcaaaatgtcgaccaaatggataagaacatgtatgctgaggcctgaggggctaaaaagctaaaaacgatcacaatttgtacttttcttacaatatatattgcatgtcttaacttagttattcaattgattcatacctaaaaaaaataaattgatttattgtcgtatatataactagatctgatttatttctagatatattttgttcttcatattattaaaacttggtgattctttactttttctcctaatttataacaatattggatatttatctgttggataaattctcctgccatcttcccctgaaaaaaaatatatgttggataaattagtttatagcatctactaatcctaatttgctatagatagcatcgaaaggtttggctcactttaatagtaccaaaagttggaggcgcctataaatcgggcgcccgatttttttatcaaaagtttcgaaaccctagctccccgatagcgacggcggcgccgggcatgcctcctcgtcggttgcggctccacccacttcaggaggagaggagagagaagagagggggtgaaaataatattaggagagtagaggaggtgaaaaaaaattgaagtgctaagagggaaaagagagaggaaggaagaaaaaaatgtggataattggggtattttcgtaagtgaaaatatgctcatttttacatgtggcctcttaagaggtccgtttgcgaaaataaattttaaatacgggtctcttaaggagtcgtttatgaaaatagagatcattatttagacccgatcaattacggttcgcttgcaacttattagggtttatgtacggaaaaatcgtttctacaatagtgaatttttaattttaaaaataaagcatacttattttaaatctaaacggtaacagtacggtttgaaaattccagctcacgtcgactgtatatctgcgtttactcggtctcacatccgacggaattgattccgatcacaaatcaattgtttaatcctgttctattgagctaatcagattctggtttggttaggtatcctgattctgttaagttaagccaacctgattctgttttgtttagatctaaagatggtctaatatatactacctgcataatcagttcctgctaatctcaaaagcaagaaccgtgactactccagactccagcctagcgagaagagagaaagagagagacagactcagaacagtgacaatttcagatttgcaagaagagacagcaggagtaagccaaccgattaatcgatggaaacattcagctgctccgaaaaattgcagcttgatgcagacgttgatactttggttgtcgaaatcacagccaccgtcgtacacaacgggctagccacgaaggtgatcgagaaagaagaggagaacttgaaaaagaaaagaaaatgtgtgaagaagatgcatggtggagtttgtcattgatggtgatgacttggagtttaccttatcatatgaggaagatgaacttagcttccttttcgagaaaagcaatgagctcatgctaaaggatcaagaaatgttccagcggcagatcgagaattttggctatgcctttatccatggtgtgaaggaagtcatcctcaccgatgatcgatgaggacgaggaaggatgcgatatcttaagtgacgacgacgaagatatctccatcgccagacaccctaactaggacgatttaaacaccatggatgtgacaactgacaaatactcattgatgaatacaagttagttctgcatgagaatgcagctagtgatctgtttctaatatactactccgtttagttccactgatttggtattttgcatcggttcttcgtttaatgtgcttcctgctcccacctcatcgcctcaggatgcagctagtttaggctgtgcttagttcctcggtcaaaaattttttaagtacacaaacacacatttgaaatattaaacgtagactaataacaaaacaaattatagattccgtatgtaaactgcgagatgaatttattaagtctaattaatttatcattagcgaatgtttactatagcatcatattgtcaaatcatgacgtaattaggctcaaaagattaatctcgcaatttatatgcaaactgtgcaattggttttttttatccacatttaatgctctatccatgtatcaaacatttgatgtgacggagtttttggaagttttgaaataaactaaacactgccttagtatattttcttaatttgtaccactaaacctattagtattatttaatttggagataattaattaagacggacaaaaacaattcggggaacaattgttggtatataaaaatagtaaagcaaaaggtgttattaagccctactgattggtggggccgtaaaaaatgtgggggggggtccaaaaataacaattttttatacagatgcttatatcatccacacgtaaaaataaaaaaaaaattccctggaacagaagagccttatctggaaaaatagtgctatacggatattctgctcttttctgtttatggttgctgatgaaattgtttcaataaataggtattataaggatatcatgataatttaatttttttttgagaattacacagtataacgcagacactcacaacgcgcgcacttagatcacccctatgaacacacgcacgcaaaccctacccctatgagcatcttcgaagactgggccgggaaatcctggagagattaacgaagtcaccgcaggcgcctcgctgtcgacgggtacgtcgcctaccactgaaagcacaacgcctctttgaagactgggccggcaaatcctggagagattaacaaagtcaccacagacgcctcgctgtcgacgggtacgtcgcctaccactgaaagcacaacgccgatatatatatcctagaaaattcactcccatggtgagtcgaaaccaggacctcaggtgctactaagactcttgtaaccactaggctatttttttaggttaactggacacatgccattacaaattgcctatttagaaaaacaccattactatccatcgaatcagtcggatgccactctgctcttctacaattggaaccgtaccactccgtcatgggttgacagaaaccgtgacggaatgacttggttccaattttagaatagtagagtagcatctaaccgattagtaatagtaatgatttgattttgcttttctccaatcctacaaaactgggaagcattgttctgcttagataatctacactgatgtgacaatttaacgccgtttgtgtaagttattaaaactggtcttttttttttcagttgggaaaagatggaaaggactgtagtcctgtgaaattcaaaaacaggatgactttgttaccgagttaaacaatcatttgataactgtttaccagacagcactcaagattagagaaatgattgaattgtgtgagttttacgcaaatatgtcaaactccaagaggaatgccattcctgcaaagatgctgaagaatgctcactgtcaggaagattttggtgtccttgatttaattgaccaggcgcagaaaaatgacaagtttttttttgctaacattgctgtgaaattgaagtgtttgctgggacgtctttgtactgcaggttacaaactccggctgataataatcaaaaacaatggcaggcctatcaatgatccaatgtcattagattctgctagctaggtagctccttatgattggaagtagtcctgggaatgctcttcagctttgatttggaatagaaaacaatgatagatgctcagtctccttccttaaagacctgtgagatcttcatattttctatttccctcttgtgtgtacaatcttctctttgtgttggtacttctgtttttaggtgcaacagatgtttgatgaccagtgcaatttgtattcgattttgtgtaaagctgcttttaggtgtagtgccattgtctattgttgcttgcctggtaccttgtgaattcttggtacagtatgatgatgagaaaataccagtataatcatttctggccttgaagatatatttgtttctgagtacttgtagtagtagaactctatgttgtgctgggatgtttggtgttcctaacttcgttgtgtagagctcgtgttaaattggtgtattctcctggtcatgtgttcagatcagtttgtggattcatattcaatcggtgaattgatataggcttcagactatatattcaaatcggattatgcttcggacttcgttttttctgttccactgttcctccgaattatgtcgtactggtgagaaagatcgattaaattagttagtagtggattaatttaattccgattctgttcaacccagtctcaagttctttatactactactacttattgctttctggtcgctgccccctgaaagcaagatcgacgcgagcgtacgtcacaaacgacttgcgagaagataaactgcaggagcttagctgctcgatcgatcaatgggagcatcgttctcctacggacaaacgcaacgggtcaccgagaataataatgccgctgcctccaccgtcgtcgccgtcgtcgatgcgccgggtaggggcggatccgatgtgagttccccctcccaatcaattctagatccgccccagacaccaggtctggagcggggcaggggcggatccaacgtgagttctccctcccaatcaattctagatccgccccaggcaccagatctggagcggaacaagaggaagaaggtgaagaagatggtggagcgtgttatcgatggtggggatctagacttggtcttatcgtacgagaacgacgaagaatgtttgttaaatgagagcatgctcgaggatcaggaaacattccgtcaccaaatcgagaatttgggctatgcgttcatccatgtcatgagggaagtcatcctaaccgatgatgaggatcaagaggaaggcgaaattgtcacctatgctgaggaggaagatgatattgttaccgatgatgatgatgaggatgattagtaattaagcaacgaggaaggggctaacaacatgattgaaaagggttcagaaggctaaaaaataacaagtgatcgagtaaagcatctatgcattttagttacacacttacactacccgtttcatattataagtcgttttgatttttttttctcgttaaatttatttaagtttgatcaagtttataatttttttaacaatatctataatgttaaattagtttcattagatgtaacattgaatataatttgctaatatatttattttgtgttaaaaatattactatttttttacaaacttatttaaactttagtttaaatagggaaaaaattcaaaatgatttataatataaaaaaatggattagtatattttcagttagttcttcaattgatttgctatatggtggtgtcgagtgtgatagtgaaatcatgggtgcaagattacttcattcatttatcagcgttcaaatcccgatattcatccccaggtaaaccccatatataagattactgtaggcattcttgattggtccataggttaaagttatgtactccctctgtttcaaaatatttgacaccgttgactttttagcacgtgtttgactgttcgtcttattaaaaaaaatcatgaaatatgtaaaactatatgtgtacatgaaagtatatttaacaatgaatcaaatgatatgaaaagaataaataattacttaatttttttaaataagacgaatggtcaaacacgtactaaaaagtcaacggtgtcaaaacattttgaaacggagggagtatatatacttctattcattatcttaaaaaaatatatacttgtgaaaaaggaaagattcagttattacggtatgcaaaattccccaccttgtcatttggcgtgctttctgctcccgccttcgacgtcacatatcacgatgcgcttgcgagactgaacaaattaagctggagtactatattatcatgttgtttgctgcacgagatcagatagatgcaccgcttcatcgatctgtttcgatgaatcgcgcgccgatcgagacgttgcccgatctccctcgtgtgcaaatttcagctcaagcactgcaaatccagtttgcgaattgcctgaaaaatttgcaaattgagctcaaacactccgtgtatagttcttcaaattgatttgcgctggcacgtaagatgtttatattccccagcccgcttccgtcgttcatttgacgtattccttgctcccgcctccgacgccaccgtacatcgcacggttgttgatgtaccggatgcatgaatggcttggtcgctctccctctctccatttcaacccaactgcgtgaactaaacttaatttgagcgcgtcagatatcaagctcctacttgatatcgagccggttagcggcaaggcgttggcgtggtggccgcgcgttgaaggtgtacagttagtggtggccactgttttcagaatgcaacggcaacacgagaaggcagattacaggcacaagtccaaccttgttgggccagcaacggcgatgcctacatacactgctttcccattggggcgtttttacgtgaactttctcaaccatgccacctggatacaagaacttctccgaggaattacttgcatgtttcctcgtcgatcggctggatgactacttcgctagaaagaacaagatacatgacaagcgcgtgaaaccaatcctggagttggtaaaaaaaaccaatcctggagttggtaaaaaaaaccaatcctggagttggtaaaaaaaaccaatcctggaggagcagagaggatttgcaaggagtacaaggaggaaggctatgccgagtactggatcaccgacgacgaggacgaagcagccactcgagctccggcgccgggacggaggaggggtcgacgaggggtcatgaataagaagcataccggaggaactaagaatctttaagtgaataatagaacaaagtttagagatatctgtgcactcgatgcaggtttgagagcttcttatgtagtactcccttgcattttaatgtatgatgtcattgatttttttatcaacatttgaccattcatcttatttaaaaattttatgtaattatcatttattttattgtgatttgatttattatcaaatgttctttaagcatgacataaatatttttatatttgcacaaaattttgaataaaacgaatggtcaaacgttggtaaaaaaatcaatggtgtcatatatcaaaatacggagggagtaacaaacatctggtgatcatctagttaaaaggtagcccgcatctcccaagtgttgttttcgttgtgctatgttggatggttagctagtataactaagtgcagtagttaagtgcttttacggttcttgagagttccgatactttatagtgtaaaatttggtatctaccgagagatactaaatttgcgctcaaaattttggcacttcttaatatctcttaggaactataaatatttcgcagtagttaattcaatttgcgctcaaaattttggcacttcttaatatctcctagtaactataaaatctttcgagtagttaaatctctaatcattgagaaaatttaatttgtgcccttaaaaatttgctcaatcccttatgtgtccatcaaattttgcctcatatcttacacgccatcgagttttcatcttgatcttctctgtactcattttgctggttgaccagcaatttttttttcaaaatgtaacatgatctaagttgaaaaaagtcattgtaaaaagcaaaggggatagaattatttaaccacaaatttgaaaaaaaacacaaaattgttaaataaatttcagatcaaccttgatgaacttcgttgaacattttcaacaaaatttaaacctaaataataaatttaaacttcgctgaaacaatttggtaccgtgaggtacggtatctcgagatactttttgatgtactggggcatatctcttccctacactaactaatgccaacacatcatgattaatcatcatatctttctaacgcttcctcctcctgacaggttcttcttcacggcgactccattgcggaaccttctccggctaggggagcagcaactcgagcaggaactttattgtctttgtcgtcgtcgtcgtcgtcgatgtcgacctcgtactcggcatagcctttggtgaagtactgcctgaggatcccctcccgttcaccccggatttcgttctgcatctttatccagaaagccttgtcctcttctcggctgtcgtcgatcgccttgagttcatcgatgtagtcttgaggacaattcgcgaggtcgtcgccgaggatctcaatgatactcggcatgttgtcgtagtcgggcatctcctcttccttgtacgtgatgcagttgttgatctgcgcttgggtaaaccgcaccatcttcgtcttcgccttcttcttcttcttcttcttctccatcaccggcgccttgccttcatcggaggtaaccggcgccggcgccggaatttgtccgtcactttttttccccgagggagcttcatcggaaggatccatcgttgtcgatggaatttggctttgatcacatgttcccttggatgtgctcgccattgtatttcacatgttcccttggatataggctcttaatttttatggaagcaccgggtcgatcagaaataggtaggattcgggatcacctcgtagttcaggttcagcaggagtccatgagatgcgcgactcatgttcgactctgactcttcttctttcatggtggatttgccgtacgtagttcgtgcgtacggatccggccctatggcagccagcacgcgcggccgtcgtggttgacgccagcggcgccgggacgctcgagctcgctcctaacggagatgactaacccatctctctcgtttttcgtgcgcacgcttttcaaatttctaaacggcgtgatttatacaaaaagtttatatatgaaagttgttttagaaaaacatattaatccaatttttttaaaaaagttaatgcttaattaatcatacaataatataagcttcgttctgcgtgtcgggaggagtcccgaaggtaatttgacatgctgccatgcatatgcaccaactacaaatttagctagtagatccgggtcctcctgtgcacgcgcgcttgtctaccgcgtcgtgcggtggtgtggcggcggtgcgacgcgcgcagccggaagcgcggcgatgcacgcggcgcgaatgtcgtcggtgccgtggtcggtgccgagcgcgcccgcctgcgccgagggccacttcacccatatcctacgccgataattgctcggctatttatagtgtagtcttaaaactactcaaagtgataaaatatttttaaaaacaacctattaagtagcattttattcttgtcattttaatgggtggcgttttgtcgaaaccacgtgaaaaaagagtgccatattgtcctttttctccaatgtttggtatgccgggcagccgggcacactcacagtcacagacggcatcgaatccggaacctattcggttcggagtcggatacaaaacaaacgggtccgacgattcgcggaagcgattccgaaaccgagttattgttggagttgcgcttgcgctgcctatatatattccggcatctacccgaacccgataactctatcgcaatcgggtcttgggcctcaatcgagaggagactcaggggaacaattcatcaggggcgcagctggccttgccttcgtgggcttaggattagatgccgcaccttttttcattcagatgttgtgatctgatgcgatgttgtatcattattatcatacaaatgacttagctctttcggttcggtttcaatggtgacggaatttcaggcgtcggggtgatggatttctccaagatagaatttagtgaggcgaagcggattttggcggcggcgctactaacctccgacgacgaagatagcaagcctccgacgacgatggagaagaggaagacgaagatggtgcgctttacccaacagcagatcaagaactgcatggcgttcagtgcggacatatccgacgacgacgacgaggaatccctgcccaagctctcggaggtgctcagcaaggatatcctcgatcgggtgccgcccgaggttcttgacagcttgatagagttcgagaacacccggggagagcgcaaggctagatgggagaagctacgggacgatcttcatgaggaacgggatgctatcctcaaacaatactacacgaaaggctacgccgagtacgaggtctatgatgacgaagatgatgatgaagatgaagataataaagttcctgctcgagttgctccccctggccgccgcagaaggttccgcaatggggtagccgtgaagaagaatcggtcaggaggaaacattagaaagatataaactgaatgatcatgttcagtgttggtccatatccatcttagttgtagtgtagggggaattatagtttctccttcatttatcagtataataataacagctgtgctactctgtggtttgactatagttctcttttagattcctgctatggtttgattctagtcgtgctatgtttttatcttggtcagcattgatctatcatcatggttcagggaacctgaaagtgacctagactgaagtcacagatcagtagttttgttgactgctctccctgagataatttcagtagtagttctgttgactgcttttttttggacacctgaaaaatgttaggttataatttggaaccccttgcaaaaagctcgcctgaaatatgttaggcctaatttaaagaagctaagctgatctctgttgacatgttttctcctacattattcagagttgcatgataaggattccaatggactaaactttttgacattgtcatatgagaatggcaccctgttaccatctgtttctccaaatgccaatgcaactaggatcaacaccggaaatgaatgagtcaggcaggcagtgtgcttgagacaatcagacataatattttcagtttagcttcgcatacattgagttggttcccccataattaatataccaggtcttagttggtccccatagagtagttatcacttactggtatggtgcccgtgcgttgcgatgggacaataaaaatatatgcacacggggtaaaattatgttaaatagtttgagagtacgtatattgtacacgatccctatcacatatctcccctataaatacattgccattgtcataaatcatcaccaattcacgacaaacaggatcgcgattgccctttttctttcctgttcacttccttttgaaagcaaaacacaaggaaccatgatcagctccaagaagcaagctcagtttcctaataagtggcactgaatgggtgccatcaactccattgctgactacttatgttcacttgtaacaatcttctggacaccataaaaaatcatgacatagtcaacaatcttctgttcaccaattcacgacaaacaggactttatcttatcatacgaggacgatgaacttgagacatttgacgaggatatgctcatgtaccaggcaatgatccggcaacagattgagaattttggctatggtttcctccatagctggagggaagttatccacactgatagtgaagatcgaagaagatgaccccgtgtccgatgatgatgaggaggaggaagatgacttcttcaccaatgatgatgatgaccagcaaaatgacgaccaaatggctaagagtatatatcattggttacttctatactataagtaaacaggtgggtgctttcatttgaatacgaataattagacatagctacattatctgcttctatcgttcgtgtcctccaaagaactgatcagaatagtagtagcacacgctgagttgcaggtaatttcaggaaggaaaaaaaaaaaccttgggtcagaccaccgttgtcactgtggggtaaactccagaagacagagaaagctaaagatatgtcctaggtatgttttctctaggaaactagtactttaaacatgaggtagacgtaggagataataacatcaaaaccaatagcacttattatattatttagttgtatctggtagaagaatacaaactaatgctagagttgacaacttttttcttccttaggaacggatttaaccgatttgcatcctattaaatctttaggcttatagaaatgatatagccaagctatatcatgacaaacggtgataatctacggcttgaggcgcctgataaaacgtgtattttatattgaaaaggatgttttcgttcagatattgtgttagtattttaacagtgttgctgctaatgctgatctgttatgctaaacaagaaatattaaaccaaaaactgataattgagattgagttccataatccaacacaggaagatactacgacaactagtaggtaaatcttaaaaaaaaaaaaaaagaacgactcgactgctaatcagcgaagtgtatcagcacatcgcttagtagctaattcagcttgttaacttttcctccattgatggaaacacccggtcgaaaccttctttgaccaggatgaggagcagggaaatcttcagcgcctgcaggagaggattcttggtcgccagcaggtaaggtttcttctccatcagcttcaccagaaggtaaggttttttctccatctttacctgcagatcgattcttcatcttcacctgcagcttcgtagcctttctgataagcgtctttctccacatagcctttctcatagtactgtttcagaacattgtctctcgctctcatatgccttgattcaatccggtttatatcacggatgatcttagcaaagtattcatccatatgatccccaaccttaaccatcctcctcacgaaactccacggtttggtaccggatgtggctatcaatctcggcttgagacatcaactccttcttcgtcgccgtcgtcttcttctttttcccttccgacgaactgcctgccatggtcgtcggctttttcccttccttctctgctgctgatgccgccgttgctttcttcttgccttgatcggaagagcttgacatgatcgctggctcgcaaatccagatgacaggaagcgcaccctgcgatcgattgtcgtgtgatttggttatgaaaaaacctgacctcgatacatctgctgcatatttattggttggtagctccagttcacaatcggagtcggaacctgcccctgccgatattcccaaccggaatcggcagagcttcagctgcccaaatctagtttagtttagggtctggattaggcatgactaatttttaggaccaagtttgggtatcggttggagacttgttttaaacttaaaattccaaaattagatttttaggaacatgtttggatatctcttggagatctctaggtgacatcatttattattgtaaattaattttctagaccctaaaagtactcaaaattgtgtctcatccagcctagattcgaagaataaatgtctcatctaatcctaagttggtatatactcctattttggaacggagggaatatatatttaatttttgggtgtaatttatgttatcctcctggtcctagttttgaaataatgttttgatcaccttaatctttcaatgttctatactgtattattgctcaattgattggagcatttgtaatagtacaatctcaggcagcacggaaacatcctaatatgcgtgcctttgaacaaggtctaagcacgtcatgagcaagaaaaaaaattgtgagctagcaccttatattactcagaagcatgccatagaatcaagctgcaaaaatattacacaactagaagatgagaagatgtcagtgagggctttttactgattatcatcgtccacagatgtgattgcaatctccatcttctctttcctcaagctgtctgcaagcttcaatggccgaagttcaatggtggctgctctcacgaaaccatcctctgcattgtccaagctgcgttcaatcaccatgcttgaggtactcatagctaaaacaagggacagacatttgcacaaactcatagctaaatagatttgaggccaccgagtgcttctgtgctaaagaaatacgagtaactttatatggtatgtttgctaatatcaagtgtttgttaataggaaaaagtaagctacattctgtctctagcacaactaggatccattttattggaaaacatcagaccaggctagataaagctacgaactgagcaacatagtactcatgcatgctaatgtgacagaagcagtatgcatggaatgaggtgatcatgactaatgacactgattgacaagtatgtacttaaattgaaaaggtagtaccttgcaatccaagcagaggtcgtttatcaggccttttacttgtgaaattaccccagcaatttgaagtctgacaactcccgaacagaaaaggcctcaaattttggaccaatcaagttcagagcacacataaggttgcaactcacaattgttaatccttgctctgcagaaagttaaccacaaaagatggtttgacacgatctgctcgatgaggtacaagaacattcatcacagccttcttgtttaattcaccaccaactgcaacatttgtaagcacaaacataccctgaagagaggaaacagaaaggccaatgactaactatgatttttgcattctttttttcagataataaatagtatcacagttaagaagcatgcatccgtatgaaaacaaaaaaaaaaatacactgttttattggaaatatttccctttttgccctccatagtttaaaaacacatatgaaaaaaaaaagtatagataaggtaagtcagtatactgtagtttaaggaatactgacctgtatgcacactcctaaggcatatgtgcattactcagctgtcttgaaatagcatttaaaatcatgccatcttcaccaataacataattaatggtgtccacatatccttcaacaaaattttgctgctgctgctgcacctcttcaccctactatttcaccattcgctcaaacgctcatgtgaatctatctgaaagtgccaagacaacatccttgacctcatgtattttgcgacaagggcagtgacggtaacaagctcaccgccactgctgagctgcttgacatgagaatctgtgctgcattgttccccacagcagcacagcatctgtgcccacacctggcagatcatctctagcgtgccagtgccatcagcaggcgagtcttgccggtcgatgaggaatgcaccaagcgagcatcctcccctcaacatcttgtccccaagtctattagtatttgtacaagttaatttaaacttcggtttagagctattcgtcctcaatgcatctgcgttaagttgtagcaagtggagcacatcctcagctgtgctgtacctcaggtgacgagtgatagcatagcacagcacaagataatcattgcggctggcatcgggaggcagcatgtggggacgtgatgcaagcaggaaaagcatgtgattggacagcgcctgagccgtttccataaggtcagcagctgaacctgaaccatcgactacctctggttgctcctctccagcagctgaacttgagccattggcaacctctccttgctccccttcagcagctgaaactgaaccaccgacggcctttgcttgatcctcttcagcagttgaacttgaaccactggcagcctctgcttgcccttcttcagcagctgaacctgaaccaccggtggccgctgcttgctcctcttcagcagctgaacctgaaccactggtggcctctgcttgcttcttctcctgatccttgtaccagcacaggtagatctcagtggcgatgtgccagatgaggatcctctgctccatcttggactcagcaacccaggctgggtccctgtacaatcctctgctttcaaattcctcctgaccccattgcttcgccttcatggtctccagcagcagctgcttggtacacgccgagatggggatgggcaggcccgagtaagccaacctgttccaccagtcctcgactcccatccacctcgcaatcttgctgcatcggctggccctgctgtgcacgcacaactgaatcaggttgagctgccccatggagcgtgaccagctgcgcctcctcctccaatatgccgcacggaccagccggcggagacaggcgggtatgtgagcaagaaaattacacacattacttccttccgatcccttctttaccaggagtgcacatgtccagctcgagaacatggccctcaaaagtgacatagtctccaggatgacggctccaacaaagaggacatatgtaacaatgacatctgctctgctgtaaccattcagcttatgctgatgatgatttccccagactagtagtatattaaacagaaagaatgcaacggtggtggccagagacgaaagcactcggatgcaaaggccataccaagtgtgtgtaatctcagacttggtgtagaagacgtcgtggaggagggagagttgcatctcagccaccttgtacaactcgtcctccccttgcaatcgtgatccttcattcatggggccacacaaaaacagacgaggtaatggccccttaaacctatccttggcaaaatccaacaataggtgagcatttaatagcaaggtttctgctggatccaagcgacgtatgaatgactcaggcaccatttgagaaaatcttcttctcgctatatcactctcgtactttccagttgggctactaccggcacatctgagcgcccagacacgctccccatacttggcaacacctaccattaacatgaggatggtggctgacaggagaagcaaggtccggctgtcgccaacaatgactatggaggacccatagatgacataggcagctggggccacctgcacaacaagcgtctgcaggtggcgcagccacagccggttgtcctcgatggcgtaggcagtgattttgtcctgcccaccaaggtgcagcagcaggaacggtgcccagagtgccaacagctcatgctctggtgacctgctggtaacagagaggtggccaagcacgtagatcgctgtcccgtcggccagcatgtatgcggaccatataaaggcccttagcacgccagagtcaatgtaccggcggaattctgccaagatgaggagtgtgacttggaccatgaggctgagaagcaccagtgcttggagagcccattctttccatgcagcgctcacagcctctgctcctgccatcgatttctccaccttaacatctgaaatgtatacaccaatcgattgacataagtcaaaactacataatatttctttttagtttatcaacactatcaaacctaattctgatggcaatctcaagttctaaactcagcatccaagcccaagcagaataatgacagctgagggggtgtgcttccattctgttggactttcccttgttccgtatcacatgttccgggttgttgtttctttaattgtggttgtgtacatctttattatgcagagaggttgtgagtaaacttttgtgtggttgtacttgtattagctagctgtaataatgagagtaataaagctcccttttccacaaaaaaaaaaaactactatcattataattgttgtaaaagcagactcataccctatttcagcctaagcattcacattgccatgagaacttctattagaatcattgtaattaaggctattgtgtacatccaaagaagccactgagaatgcatcagactctttaggggttgtgtgcttaaagaatttgtgattgacttcccaaacacttttctcttatacgtcagttgtttcattgctattatttcagttttcatttgcttcattcttaccatcacctgaggccctgagctggctcatggcatatatggcaagccaaatacatactgtattcaggatatataaacataataagtgatattagagccaaggcaatgtcaatctgatttacaaaagaattagcaatgcatcaggtgccacaaattcaggaacagccttaaacaatgtggccaagcagaaaaacttgatagcaatgaagtcgtattaagtgagagctacaaaaatctcccagtttttttggctactgatgtgataaatgaatcttgtgttgcatgtacttatgtgaagttgtatgttgatctagttgggaagcgcatgcggaaatctccgtcttttaacagcatgattattatctatgcaccacaattaaaatttatcggacatgcatttttctaacaagggtaatttggatgaaatacctcctgcagtaaacacatattacacagaagctagctatgtgaatagagaaacttacacacgataactgaatgggtggagaagtgatcgatgataatcttcagtttgacagacaagttatatatggtcagggattagccagtttgatatgtttgaggggatgaatgcaattcatgcatagttaagtgccacacacaaatatatcaacatgcatgcaaaatctgatgcaatgcctcccagagggttaaggaatcaagaaaagatgtcattcatctgatacctgcccagcagcaagtaaaggataaaagtaaactattctcctttttttccccaaaaagaaagtggagtataagagtcaaatcactaacgctgtatcactttataacgatgcctcattttccttttcatctacaataatatatggttaacatcacatcacaacccctctaaaagaggacctagaactgaactcgtataatctcattattttcccatctaattctccctaacctccattgctccacttacacatgggcccacaagtttttttctcaccaaacaacaaagaaaatagttgcatagattccaggaaacttggtcctgacatctcccgcggtcctgcggcatatgctaggttcaaaactccaggaaaaaaaaaacagacctccagtacatgttttgaagttgccatgggtagccataagcattaagatcccatagactgtgatgttaattgaatcatcaatctacagatatttaagacctcgctggaacccatgattctcaaggcatatgaatagaaaaggattagagtgctccaactcctacggagcgttgaaaacatagaagaactgcacaacaaatagctgtttgaatagagcacatgaaaaacacaagaatcatataagagaggccatcaacttacttctttggtcagatgaatcgggctatcgagctttgtttcgttggtagaatgaataccgatgggatgatctagtcttttttgtttggttggtagtatgaatatcggattgtaccaccccttcccacagttgttgagcttatgattaattatccatccatttgacagtgacacaagcaaattgcggtcatatcagaaacgaaattatgcaccgaggttggtgatcttatgacttattatccatccatttgacagtgacacaagcttcacattccagtcaatgaacatattagaaacatgttaaataagaaatcatccatttaacacaaggttcacagtcacagacaccctttttttttttttaccaaccatcgattcgtctacaagactacagcaacaaatgcaaccaatccttcttccatctatccattataccatccatccacgaaccaagtcagggccgcaaagggataatcgattaccttgggcggtcgtggggagaattttcagaatataacacccaatacgcactgcttataggatttgtcacctaattcatactactttcagaatacaccactagagtacgaattttcttcgttccgtaacactccgtccatccaaagacgcccgtcgtcagttcatccatctctcgccgtttgcccgcacgaatctggccgccggcgagctcgtcctcccccacgccggcgagctcgtcctccccacactagcgagctcctcctcccgcacgcatctggcgagctagctcgtgtcgtccccgagctcagccgccgccgcaccgggctgccgccaccgcgccccgagccggcgccggtccaacctccgccgccggagctcgaagccctctgccctccaccgctgctcccctctcctccggccctccaccgcgtgcgccgatggcggcgacggacgagcgacggcggggccgacgcgggtgacgacggacgagcaacggcggggctgacgcgggcagcgacggaccggcgacgccggagctgacacgggcacgagcggcggtggactgacaacggtggcgccgggaggacggaggactgacgctaggggacggagtgtcacggaacgaagaaaattcgcactctagtggtgtattctgaaagtagtgtgaattgggtgacaaatcctggaagcagtgtgtattgggtgttatattctgaaaattctcggtcgtgggagagcgaaggagggttcgccggcggccggagatgcgtcctccgatgccggcgcgcggaggtgcggcgtcgggcaggcggtgagtgaggacgatggccgggcgcgcctattggatctatcatctacgccgccgttttttccgaccttctccggcgagccgacgagataatgacagctctgctccattggtcaacgagtcaacggatttcggttgtgacttgtgagtactactatggtccatccataaaaaaaaatttggtatattttgactttccaatttaagctttgactaataattaaccgcaagtataatggcatactagtataaattaactataagcacacatagatgagataagaaaagaataaaaaagaaagtgggctgcagatttctatccagctacaatttcaaaatgttgtgtgtataagaggtgagaccatatattaataatatagtatatatttatatgcaactattgtatgaatgcgctattaaattagctatagatgattctcttagttaacgctatcgaaatttaaaataatgttaggatcgttcgttttatttaaaaaatttatgtaattaaaatatattttattggtagttgtttaatcataaaaatagtttaagcatgatttatatttcatatatttaaaaaataattgaataaaatgaataggcaaacgtgtatttaaaagtcaacagcgttaattattaaaataaaaaacggagggagtatttaggttttatcattattattggattcatgttagaaattacgttcttgtgactgattttgtaaatgtaggcaaaattaaaatacatcaaagcttttttacggtcaaatctttttacatcagaatacaaactatattaatgataagctttgttttctaaaagtcaaaatatgccctatatctttgaacagaaggagtacctccctttacaatatttgcacaagtactgcctatttatgaaatttgaccactcatcttctttataaaatattttataatcaactaaaagcgcagcattagagaagtgtgtttatatcgtaagtattataggttgcaataccctacccgcaccacaaccaacaccccaaagccatcgtccacgacatcgtcgtcctcgccgccgccaccatcatcgacatgcaccacctcgtcgtcctcctcttcctctctgcactcgtttttgtcgtcgatgtcgaccacctccccatcgtcttcgtcgtcatcatatacctcaacctcttctctgtcgtcgttgtgcacatggttaaggcggccaacatcatcggggtcaaggagaagggattgtccctcctcgtcttcttcggcgatgacactattcctttgttcacctgcgtcatcatgtcactggaatcctgtactctgacaggtggccacatgtatagctttgtcgggagttttacttttacctgttggactcaataatagtaggtacaatagtaggctataagccagctataaacacatttcgaggagataaaagaggagggagaaagccagcaggctacagatttatagtcttatagctagctgcagcacggactccaaggtgcatgtgtgtatgacaggtgagaccagatattaattatgaagtactgcctccgtttcaggttataagactttctagcattgcccacattcatatatatgttaatgaatctagacacacattcatatatatgtctagattcattaacatatatatgaatgtgtgcaatgctagaaagtcttataatatgaaacggaggaactatatgtttataggtaactgttatatgagttggctattaagttgactatagatgatttggagcccgcagttggctatactattaaacttgctctaaccaatggcaatcggaacgtacaggatcatataactagcatacgcaaaaaaaaaaaagaaacccctggtatttactaaattattttttgtgtaagaaaattaaattttgacaatgccataaattaaatctttgggtaatgccactagatctctgaccaaatttgacttgacaaaatttggcttgacatggcacgttgtggctttagaatctttgggtcaagcatgcatgtcgtgagcaataagattttttttcgtcgacgtgcataaaataatttaccaaaaaagcgcgcgcgcatacgcatacatacatacatacatacatatatatatatatatatacatacatatatatatatacatatatatatatatatatatatatatatatatatatatatatatatatatatgtatatatatatatatacacatacatacttcttcgtgttatattataagtctttttaattattttcctaatcaaacttctttacatttaactaagtttataaaaaatatagtagtatttttaacacaaaacaaacatatcatcgaaatatattcaatgctgattgctagaataataaaatatattcttaaaatgttacttatttttcattaaacttagtcaaacttaacaaagtttaatctctttgttaatcagaaaaagtcaaagcgacttataacatactcccttcatccacaaaaattacacatattacttttgacaccaagaccaaggagaaattaaattaccttggatgctacaaaatcaagaagtaaataaaagcatgcaaccaatgagtatttagatgacttcttgagttctaataaaacatttaatttatctcttcatttaagtcttaaatgcataaaaactataaataggaacaacttatttggaaaaactcaaatgtgaaataggtgaaacttttgtggatggagggagtaaaataggagtatgtataattaggctaaggctgaaaaatataggtactactatcaactttcagaaactaaattttggttacttataaggccacacgacgagagcaagattgtgatcaggaatacccagaagcatgtcaagagtagtatctttattgagaagcaaaagcaagcggcaaaaccattacacactgcttgctgggcaccgtcccatggccgaacgtgaaaaacatagcccaagagagtagtacaatttacagcagcagtagcatatctccctcaattatacactcaccactcatcgtcacagcacaagcactaggtttttggtcatgctaaggaatgaaatttctccagagctagcacctaaaacctttttccgtttcggaggaaatcagctcaggttttctgacgtggcatggttacaacaaggtttcttgcttgtttctgcaagagaaaccagtcatggtcctcatggagttcaccaaatttacaatgacaggcttggaggcgacgagaagatgtcggtgaaggcttttttttactggatgatcattgttcacagttcatggcgcggattgctgatgcgaagagatcaatcttccatcttctctttgctcaagcagtgtttgattctgcaagcttcaatggcccgaggtgcaatggcggctgctcacatgaaaccatcgtcggcattgtccaagcagtgttcaagcaccatgcgtactctaagctgcacaagggacaccttgggatgttagtttaagcacaaaccaaggtttgtaaggttcaagaacatatgccgacaaatgctaaccaactaccagacatgtttgtcatcttgcattatttttgttttattggttttaatcaacatccttatatataaacccatttgaggccatcgagtgcttgtgtgcttagaattttgcaggagtagattttaactatttgttttcctatagagtatttcaatatgtgtaaatttgctaatgtcaaatgcttgttcatagcaaaggtaaaatgacattttctttgcccaatcaagaatatacaatttagtgggcaacatcaggctaggctagataaagctacgaaccgagcaacaaaagtactcatgcatgctaatgtgacaggagcagcaaggatgggtggaccataaatatctaacagcagcaatgaagtaatcatgacgctgattgacaatcgtgtgttttttcaagctcaataaataaaagaacaaagaggtaccttgcaatccaagcagggatcatttatcatgccttttacttgtgaaattaccccagcattttggagtctgacaactcgaacagaagaggcctcacattttggataaatcaagttcagaacacaccacaaggttgcaactctcaattgtttgtccttgctcagcagaaagttaactataaaagattgtttgacacgatctgctcgacgaggtacaagaatattcatcacagcctccttgtttaattcgcccccagctgcaacatttgcaagcacaaacataccctgaagagaggtaacagaaatgccaatgattaactatgataataaatagtatcccgataaagaatgtgaaactaaaattacacggttttgtcagacaagatgttccttttgcccaattttaaataaggtaactcagtataatgtagtttaggaaatactgacctgtatgcatactcctggggcaggtgcattattcagttgtcttgaaatagcatttaaaatcatgccatcttcaccaatgacataattaaaagagttcacatatccatcaacaagattgtgcaccagtgccaaagtttgttcctggacaaaatgttcagaatctgcaagaaatgttgcattagcagtgtggctgattcagcaatgacctaatatcatagctgcacatttagacttaccacatatgaggcttgaaagagtagataaagttagttccttgagaataaagtctttatcctttggattcaaaaggaacataatattcctaagagcccacacagcttttaatctcaatgttggatccatagacttggacaaatgaacaagctgggagacagccccagattgaagaagaatcgatttcctgggtgttaaattcacagcaatattgcaaatagcaccaagggcagcaacctgtaataccattttgtgaacacagacatttagtagatattctacaaagtcccaagggattaaagacctaaaataatgacgtttcacaatcataatatagctaatgtagtgtcccttaagtggaaaggttgctcaaataaaatgagtccatggtaggtatgaacgaccaaaagagtttctcctaagttaacatcttactttttaagtcactaatacagttgattacttagtgatatgtaggtttacaatctaacacgaaaacagttagtacaacatgatgctttagaagaattacagtagagcccatgatgggcagaaagaaggtaaaattgcagagaaatcaggaaaggaggaagctgccatgcttccaagattttcctttcaaaaacccattgaccaaccctctacaaagaaggaaggcaattccaagcagtgtttcaaaatttgttttttgaaaatttcttggacatggacagatagtcgcttactggtcaaatctgaccaagttagaactataactcgacttgattgaattgctcaagacctttttattccaaacaacatataccaccaagtacttgccagatcatgtaaaaaaagaagccctaatctattagaatcatgcgctgtccagcaggagctggccagttccttgtggtttctgaaaccatgctttcaattacagattcattgccccttaaaaatgatactgaaggttgcttcacaattttacattacctgaactgacatagacgagtcatacaaaagctggactagtggggcaataaatgtatcacaggataatttcccagcactaagtacctgaaattaaacatatcaactcaaatcatgtaagatgaacacataacgctgaatatacataaggagtatgtgtcttaccttggatgacctagagatattcttaagacatgaacatgctgcaacacggatatcaacagaagcatgcttcagtgcatcaaggattaaggtagatgcctgttacataattaatttgttagtcacaaatgtttgatcaactgacaatcataaaatccacctttttcatgctactacacgccaggagcccatggagtcagtatattttcttgtcacaagttgcttaacaataacagtagatgaactctacaaaattttactcaaagggcaaagagcagcaatgatcaatataccattcaaagtcctgcacgtacctgaactgacataagttgagatcttgattcttccaattttgagcaaagttcagctaaagcaagcaatatggtcactgcacgccttgactccaacgaatttgctataagatggttgcttaacttctgaactgcgtttgttgagagtgcttgcttctgcagttccacactgtctttgatcaaggttgtcaatgccaatggagcatcatctcctacatgaccaggttcctcgatgagctcaagtaagaccaggatcaacttggttttaatttgtctgtcttgaaagtgacagggagaagcatggctaagcgcaatcaagcacaaacaagcaagtagtcttgtgcgtgggctccgatcatgtattaatgcaactattgagcgcaaagcttttccatggtccagcagtgcaaatcttgaagcaacttcccagttatttcttatgattgcagtcaaagaatctaagcaagcatcccgtagattcatggagcctccaaaatggttaacaagtctctgcggaactccagcagcacatagtgctaattgttctgtagtgctatcacaagagtgagatataatattggcagcaagctctgtgacattttcattctcgctgttcaaaagggtaagaagaaattccatgtttttctcattattgttgacatcaaactttggagctagtttcgattgataaatcattctcagagcacgtgcactagcatcaacaacctgtaatcagaatataacctcgggtcagatcatattattattattattattcatagtatgcattaatggttataaacaattcaatataacatgaaaataatcagaatatcagatagcaccaaaacaccatgtttcaatgaagagggtgcttggatatgaactcttatgcattcatgtattgttacaagttcaactgtacaaactagatgcttaagatagcatttagttattataaatgtttccaaaacagaatgttaaagcgaagcccagaagctagctggttaatccaaagcagcgagtatccctgctttgaataactgtatattgtggcctttcctggttatttatgtccttaatatgaatgtgcaatcttttttcaaatatcaatactagacaagataaggagcaaaataacaactggcaaatcattttttcagataaattggcatcccactatcactgttctaaaaggccccaggcatcaccatactggttagcacctaatatttgtttagcctgactagtcagtgtaggaactagacaccaccctgctgcatgtatatgcctaacgccttttagaacagtgctatagcaaatcttgaaagaattaatgcctgacaactcgacaagagtggttagggaaggatgttagagatgggacaatagagagctaccaaagtagcttgacttgtttcatctctttttcttgtttcaacccatctaccatgttttgccccctttctaattgtcacttctgtaacacaaacagctgccctatgcctcatcatcacttcctccaccttgaagatgcaacaaagggagagactgaagggaggcgacaagcaacatggggaaggaggcagtgggatgtgggatgtggtggtaatagtggctaccttgtttggtcagtaagaattgaatagggagggatggaagaggtagagctataactagtaattggggcataaaggcacaatgagcatatggtttgaggtatgcatggctgtatcttcaaaatactggagctgatctgggagtagctgacaacaatgtaagtatacctccccgaagttgtacattgacttgtcaccatatccttatgcaatatgtacttctataccatgtacttctataccagtaaagttgctaggagatatacctgggtaaccaaattttgagctacaacctatgcaagttacgagttaagtccatgtggattgtgttaggatgatacaactatcttttctagctcatacaaagaaggctttagtgattcaggatattcggtgttatggaagaatcacaagtttgaattgcctcatgactttgtttagtgttaagatttcttccttaaagtttccttcaactgtcaatttcaaatctcaaataaaaagggcacccacatcctacctggcaatcaagaacttccagttacacagcaaaccaataaggatttcagcacaaaatttccctaccaagaaaccattgcacaaaacatcacactactgccaaactcttagttcaagcatatagtatgagctacagttttaccatgacccagaggaagctatttaaacatcttatttcatgcttacatctgtaaagccaattcagttatcagttcagacaaattcatcatgaaactaacacgaaacagacaactttccagcacattcatccccaccactacacctaaccattgacccactaccaaactctgcacatttcaagcataaattgaacaataccttcagtactttaatcaaaaaaattaaaataaaatagagagaaaaggacattaaaaaagaaaaggaaaaagaaatgacaaccaccagtacctctcatcttagctaaaccgacagattagcctatagttcagatcaaataattcccctcattccaagcaaaacccaaaccaccaatcatgatccccctagtacaaatttctttccaaccaattcacaaagcaactatcgaattaccacatttattttcatattcttactcacctctaaaccttatttaccaaacacattgatgacacagtaaaaaaaaatgcattcatggcaaattggactagtaagcaaatactcttcacatcgcaccagtaaatttttctcaccctaaattacaatatcagcagtaaagaaaaatcgttaaccaatctaatcactaattcttcatagtatcaattcagttgccatccaacttttcctgttcccaaattgcaaacataacccaaattctacaccatatgattcccaagaaatcaagcaagaaccagttgcttgctgtctgcttagttccgagcaagtctcctctacgcaacagatcttctcccagacgaataattaatccacaaaaaaggaaaacaaatttctgctaggcgagaacaaaagatttcacgcccgatacaaatcggaaatccatagaagtgagcaagcaagcgaagcaagagaccggctaccttctcgtcggggtgggcgaggagccgcgtcaggtgggccacggccccggcggcgagcacggcccgcacgccgtcgtcgacgccgcacgcgaagctcccaacggcggcggcggcctgcacgagcgcggcgggggaggccccgggccccgcgagcgccgccacgacggcgggcacggcgccgaggcggaggtactggagcttcttggtccggttcccgatgatctggttcttgatctcccgcagcgtgcgcacccggtcgtgcttccccttcttcttcccttctccgccgcctccgccggggccgcgccgcccgcaccgacgggtcggcccccggggggggcggccagcctcgccgtcagcttcttcggcctcgtgcccatgcagtaggacgcggtcggcgacggcggcgaggcctaggccgccgtcttctccggtcgngcaccgtcgttcgccgtggccggcatctggtgggggagggtgggcgaaaggtgtttgatttatttctcctcttttttttttgtattttccgagcgattttttcctctttggttggtatttttatagagggagagattgagaaagaaattggcttgggttggaagccctaagccaatgggataacgccacgtggagtaaatatttcattattttgtactccctccattttacggtttacgacgttttgactttggacaaaatcaaattactctaaatgtaatagtatttttaacctaagataaatatattataaaaatttattcaattatatatttaatgaaactctgctagtgttgtaaatattactatttttttctacaaaattaatcaaacttagagtagtttgaatttgaccaaagtcagaacgtcgtataacctgaaacggagggagtatctctttacaaggaataattaacgttttaaaaactttggctggtaatgattaacaaattagcattagtgtgagctagtgtgtatgtgaagttgttacaggtggttaaataatttgggcagatttagggccaaatattttcctcttatagattataaattattgtgggcacgctttcgaaacttgtaaacgggatgttttttttatgaaaaagatttaaaagtgattagagtatttttaaaacagctttttaagtttgaagtagttcattcatcgttttgtagccctcagatgtcatcagaaaattagaaaatcaaactagaccttattgcagagttttctttttaaagtgttttgtttgttagaatttttctccaaaggcggctgcaatttgtactccttttttgagaaacaaattgagaggtgttgacgtatgcgaatttttatgtatttttctacagtatttttctcagtattgacagctatatgcatgattggatgatgagtctcacatgtggttttaaactcttaatcttcatgctcccattgtctgtatctgcagtcactgtcatcctgacccaagcaaaaacaaactaacctagaaaaattatagcacaacccattttatttgtgaataaataatcctacatgacagattgcacttgatagtgactgcagagaagggaatacttcaaatacacatgggtttttttaagctacatgtaaattttctttacaaaatttctacaaacaacgatatcagtcgtttgatttatttagatggaagttataccaaatctagatgaactcacacatgcctcgtcagagttagtaagaattcagtaaaaaaaaaaacttgtattcatgtaaggctatgtttagttcaaactaaaattggaacgatgtgataaaaaagttagaagtttgtgtgtatacgaaagttttgatgtgatggaaaagataaaagtttaaaaaattattttggaactaaacacggcgtaagtaatccaaattcttgatttcaaggtacagcttcaggtttgatgacaaccatgagcctcctatctatccattttgccaaaagcaagatgtcggcagagaaagggtcccacatggagatgcactgacgctgaaagcctattctactatgtgcctttttctatattagccttgcaatatcaacattttttttcatggaaagatcttgcaagaaatccaggcaaccatgtgtgtgacatgctggactgtttctagtaaacaatgatcatttgatcctgattactggtctgaagaaaatgacagttgaaaaaaaaggccaaaatatcttactgccctgatttatagcgaagggaatcacagacggataaaaggttagtacggtcaattaactattaactaggtatcagtaaaccttggtcataaggcaaaagaaactactgctattaaatagggatcgaaaactattcccattatctgaaaagatggctttagaaaaccgatccgttttcatggaaaccgttagttggttttcataatgtgttgatagaaagtcgtcgtttttttactagttttattggttttcggtaaaccagtaagaacggtttttattttcaaaacaaaaaaaataaatcctagtgagaactgaacaagcaacttataaaagttacttccccttgaactatgcctgaagctgacagctcgatcaactcaaatccttttatcttttttaaaggaaaatggcaggagctctgcctatctcaaatccaaaattcaggtgcaagtctgcaagtacagcggtaatatcattcataatggcttcttgggtcacactaactccaattcatcacatttttgttaactgagttcacattaaggcccagtgtcctcggaaaaaagacggacaaattatttttgcgtgcaggttgcaattgaacaaacaacaaagaacatatttctgaaaaggctgaacttatgcgggcaacaaagttaggtctggtttagttcccaactttttattcaaacttccaactctttcatcacatcgaaacttttctacacacataaacttctaacttttccatcacatcgttccaatttcaattaaacttccaattttaacgagaactaaacacatccttaatgtaagaagcaagtttaacaagaatcatctgtcaccaattcaccatctccatagtcgagactcgacaaagtaatctctgcaggatgcagaaaatcattggaagaacaataacaacagagggaaatatatgacagtgtttcataacagaacaagcaatgcgtatttactttagcttagctcaccttttacctttcaacctttaaattatgtgtttggctttctataaaagccaggcctgaaggcctctgatctaaaaagtacctttaaattatacagaaatatatcatatctcaatgtacgcaatcattcaccaaaagatggtcacgaagaaactagtccaggtgcattggattgatcaacatttgccatatcattcttcagcttcttttggattttctccccaatttcagttgctcttaaaatgtgcaatttttctcagggcgtgtactttttaaatgaatgaaaaagaatgaatttctactcttgaattttcgcaaaaactttctacatatgaatttcttaaaaaatgttttaaatccatttttcaactttataatagttaaaattcatttatttctactcttgaataataatcataaaattattaatttattgagcccttcagctatatgactgtacatatgaccaaacatatggatcaaaattcacacattccatggtacatcaatcatagtatgagcttatactaaaaaagctctacaaaaaatgcctctttatggaagcaatcaagagcctcaccagcctttgcttgagagacaggatgcccaaaaatccagaataatatggattcaatgtaaagctgtctggtagataaccattaaatcatgggattcaatgttgttgtagacatgtgcataatacagcttctggttctaatcgttctttcgctttcatggggaaaaggctgatgaacacatcacacgaattgtagctacctaaaccacacgatgtcaaactgccaatgatgcaaaagaatgaaggatatgtcccaattaatttagtggctgagtgctccatgtagcatactaattgtatactccctctgtactcataaatgaagtcgttttggacagcgacacggtctccaaaacacaattttgacttcttgtttctataaatatatttattgaaaagtgatatatatatacttttatgaaagtatttttcaagacaaatctattcatataatttttacattttcaaactcaataactcgagagttattcatgatttatattttcaaggtttgacttaaacattgtcataaacgattttctttacgagtacggagagaggacatgatttatgattaaagtctgttgaaatcaatcatttggaacatgctattatatgttttttttaacttactcagacttctctgtaatttttttctggttccatcactgacaatgatttatttgctagccagtagggtccggacacgtgtcatattaactggatatgcttatctcggagcatgttgagctgctgaccaggacaaattctttctagtaagctttgtcatcttctttttctcccatctgaatgaaagcgttgtcgcttttggggctttctgcatcatataatgttcacctgcaggtttgctgatctgtaggatttctcattttgtttgtgtctgcttgacaaatgacagccaaaatttattagtgattactccttttgcctcaaaagaaattagtgattgctcttttttttcctacaatgaagtacataatgtctaaaatttcagcatccatgttgtttttgataggtcagcattcatgtgttacctaacgtgaaaaggaaatcatggactgatagtccttgcatgaaagatggcagcattcgtctggaaaacatattcggttcagaaaattcatatgccatatgttagcttatgtccaattgtgaaattttatgcaatcattgggacaccattaaatttcattacgacaaaactttgaccaacaattattctattataacatattttttgtgaagcaaaattgatgtgattggattaattttcaaaagtacttttatatgattatacttttgtgtccataatatattagagaaatgtagggactaacatgggataaacaaaaatattcgaaggattttatacctctgaatgtatggacggagaaaaaaaaaactctgtttttagccccttctcgctgcttggagtctgtttttagccgccgtagtttctctatgcttaagtttttttttcttattttgctttttcttccttcccctagcataagccagtctggttgattgcgtggtgtaactaaaactctttttcttctaatatattaacgtgcaatttttttgcgcgttcgcgaaaaaaaaaccctactatctcagtagattcattactcgaaccagattgtaaactgtgaaattcggttcgatatgaatgaattctgcaaaattacatgaaaacccattcatctatgggccttctgttgctctcttcaacaactgtatgggcccaagcccaaaactgcccatgggctacaaacgaaggcccaatttggcctatacgatccacacctgaagcaacaagaaccagaggagacgacggtggcggcggctggggagagagaggagaggagaggagagagaggggaggagaggtagaggaggcgagagctcgatggcgtcgtcgctggggaggctcaaatcctccatctttgacaaggaggagaggaagatgtatttgcttttctgcccaatccccgtcccatctcattctgttcctgcaccaaagtttccccctttctttcggatttgtgtgtggcacgaatcgattagaaacctttgttttttctagcttcacatttcttgacgctgatgctgtcaaagtgtgattttgaaggggtatttctgtgctccgttatgtgttgggggtcagtgcgaataggggaagtgatgatgtcgatgaaccctaactttgttggttgcaatctttgcttcgagataggagttaagttaggctgatttgccactcaagggcaatggaatattagatagatgcactgctttttgttagttcgctcgctttatttttcatctgatggatatggattggttgtggatgcaggcaataccaatcgcacattcgggggcttaatgcgtatgatcgacacaagaagttcatgaaggattatggtatgattctttgctggcttcttttccacctcttaagcatttcttgattgttttaaaattttattgggagatctagggctactttcagttcagatttcattggaacaaaatataatgatagtggaatggtaatgtcatgataatatattacagttaatagcactgttttaggaaaatggcacattttaaagttttgcttctgcctttcttcacaatagtcagacaaatggtggttagcttgcactccgatattctggcacaactcccgttatcccagttcaatttgatttttgattcctgatgccaatgcatggaacggatggatcagaaagttgtcctttcacagtgtaaaggaaattgagacgctggcatataacgagttaattatttgctctgtctcagtttccaaaagcaactggatgacgaacagtcccctctactgtagaaagaattgggggctaccttcatccatacatgggctatgcttattgatatataacttcccacctagctttggatgaaacttattctgggtatgcatcttttccatatgggagttgatggtctgatatgccataccagtgacccaatctgttgaacaatgctgtcattgactagcagttcatcttccaactatactatgaatattatagatcagtttaaaatcattataaaagtcaagtgacttggattctattgcttgtgttagtaaagtacaaggaagcttttgttttagatatgtaagtggaaactactatgataaatgaagaaccagaatgtagcctcaccacagcatcctttatcgtggatgtataaataattgtggattggagatcatgttcatgtttacaaaattattgtttcattgattggctctggcattttattggtatctccctcttttcttgatattataagttcccactgaaaaaacaatgtgctgtgaacagttcagttttatggccatgacaagaatgtggataatcgtgcacccatcaagactgataaagatacactgcgagaaggatataggtaagaaacaagtccaataccctttgttatttatttatggtggaatgtgtgtccatgctttatgaaatactcctaaatccttttctttaattatttatccatataaaggttcatactttctgaggaagacgatgtggattctacttgggagaagaggctggtcaaacgttactatgacaagctttttaaagagtatcctttttggtggtgtgttccttacattcttttcattaagggtacagtgtatatttcttcagaaattttctgtaacatgttctgatttgtggagctgaggtgatttggcaagttcatcccattttattctgagcaatactgcaaatgtattgaagactgaagagcttgatataatagactaattgggtatgaactgtagatattatctcacaaactcattagcgtgtctgaaaagataagagttgcagtataaattgtaagatactatgagtgaaattttctcatcaaagaggtagacataacgcatatgtatatggttattctcataggcataactcgtatttactgttgtccgctgcatcagtatatgtctttgagagaatattgcaagttcgttccaaacaaatatagtgcttaacgggttatttcctaagagaaactatttacatgatatgcataaagtttcttgtatttatgccttaaatagttgggccaatattatctgtcagtcagtctcctatagaaacagcatgttttgaagttctgtagtacctattttagaagatgggaacatgaaggatgagagagaaccaggattgctatgtttgatttgaagcacttaagttctgctcctatctttataatctatctatattaaccaagagatgtagtccttgcaccttgaacttgttttgctggctgttttactgttcttgtaatgttcttgaaacttaaatttattgtgcctaggatccttaatttgatacagatactgcattgctgatatgtcccagtacaaaagaggcaaggtatggtgatacaattctatagcaataagccaatagttgttacagtatttatttgtgtcatttactggatacaatgatctcttgaatgatattcttgctgttttttctcctcattgctattaatgcaatagaaaagacgaaaaatgctcctagtatgatttatatctgtaacattgaggatttcaattaaaagaaagaaaagaataatacgaattgttgatttcgtatccgtaatattaagtttgcgtgagcagcatcgacaaagtgatcattcttgtttttggtcatggagttgcattatagtatcaattattgttgcacagagcagcaaaatcactagcacaaccatacttttatatatgttaatgtctgacaggcacacacttgatagtggggacgctaagaaatcctatttacttggttcgttactgaataatatctaagtatcctttagaatttagaacagcactaacaaggatatgctgctcatagatattagaggttttttttaattgataaaaccatcggttttattcttggaagttgagtgcacattctaaggatctcatttatttcagattggattgagatggagaactgaaaaggaggtgatatctggaaaaggtatttccctttataattccatgtgttttcaggtgcactaaactgtcgcaaaatgctaaatgtagtctatacattttttttttcaaatgtgtgctctgttttactaattttcttattggtagatgtgatattcattacatgttgtcttttgcagggcagtttctctgtggcaacaggatttgtgatgagaaaaatggacttggtagttatgaggtatgctcttggtcctttctatcttgtcactgatgctacaatgcatagatccttttgttcattaaagaactccttttctgctatagataactctcccccttgttttcaggtgaacttttcttatattgaagcaggggagcagaaacaagcactagtgaaactggtagcttgccagaggttagttaatccactacttcattttgggattatgtaacccagttgatccactatttcttttcttgtatttatcttgctgatcttggtattcatacattttgcatcccaactattttgctctggcccatcctctctctagtcttctcttgccatttttgttcaaccaaatattcaattgattattgattgttgtacattatgaaagatgtgcagaaaagcttgcttataagaggcaaaaggagaaggaaagagagaaggaaaaagagatttctcgtgaaaaggaaatggagttaaaagaaagggacaagaggaaaaggtacctcttttccccaatagttctttttcctaactttcttggacatttctgttcaaaccttttaccccaggatttttgttacctgactttcttttacatttctgttgaaactgtagagaacgtgagggaagtgaagaaactgaagatacatcggaggatgaatcaactgagaaatatagtagaagaaaaaaaggtaaaaatgattgcattattacctggaacagtggatcttttttcgtgtttatgaagtcaaacactaccagtatgtagtagtttactttattttcgtcggaatttaaactgtcaaaacttttgtatattattaacaagaaaaattattctatgcaaaatcctgcagatcgcaaacgatcatcaagaaaatcgagcaacaatgatgaaggcttcgaggagttccttgaaggcatgttcccttgatctggcctttatgtcaaaatcatcatcagaaggggaagcggcacctgtttaatcttccatgacatgttaatactgaacgtgattaattgtaactttgtatatgatggtgtattactgctagttgttccatttctagcctctaggtctcttgtgagttctgagatgtgagaactgccaggtgttgtctaactaatgaatttgtcaccacctgctcttaatctgtgatagcttgaagcaccttgaatgttatttatatgtggatattgtgtgttataaatatgcaaatatcagagtattaactagtttttttttcttatgcatggtaccgcccctttgtaagataatcctggcttaaccaaataatgtcagaggcattttgttacacaggtgaccaacctattgtgttcaggttaataatgttgctgatgcctcacaatatagctgggaatttcagaggagcaaattgatagtttctaaattgctacctaaatcattcttattctcatgcatttctgaagatacagtagcttgagaatttcacaagttacacttcacaagcattaaattcatgagttcccatttactattcctctcttctaaccacatccacaatgagaaatctagttcaattttaaaaataatctccagttgcagaaacagatcaacaggttgatcatgaaatctctgcttctgatcaccagttcaccactgtttttgtcttgaccaatgttttaagatcagcggtggaaaattggccttcccttaaatcgctgaactaatgtaaaactaatcttccatgacgactattcgtttgccctcgtgcagctgtttttcacacaataataagtcacaagtgttgaaagaaacaacttcatatcgtgccaattcaactcaagaggatatgtattaataactgaacatgagttcattcacttgaacatcaaaaagaaatagcaaggataactaattgtttatttaatctatcaaagctagttcaattgctttaagaatagctcaatgaaaatcagaaacatggctttccatgaacagagcactgatgacatacctgatggttctttaaaattggggcaatattcaacaataatgtcgctacatgttaggccttcaggaatggagtgcagaattggacagccagacaaacacattatctgtagaaaaggtaggttctccaaccattctggcaaaatctccaatttgttgcagttatcaattttcaagctggcgagagaggaaagatgctgcaaaccctgtgggaggcatgacaattcatgacaaccacatatctccaacttcttgaggcgatcaagagcctgtagaccctcacagcctgaagaagcatgcaactcttcacagaaagaaattgaaagattttcgaggctcttctctacacctctcagaccttccttcgagctgtacaacatcttattattcatccacaaaatcaatttttcaatcgatggaaactccatatgcagtgctctcaattttgggcactgaatgatgacaagttctgcaagacgaggaaacagattcatcctagatgactgttcccagacttcaaggctagtcatgaatgagagaatcagcttctccaatgaaggaaatgtaccgttctgaccatagaaattatcgtcaatacaactgatattctcaactcggcttatctccacttcctcgcaaaaaaaaaaaaactcggcttatctccacaatcttcagacatggcagtagcccaagtggaggtaaagcattttcacatgatctcagattaaccaaccttatctcaaccagagatgtgagatatggctcagtgcttgttatccaagatggaaatgcatgtccttcatacgcaacaatctccaaagttttcaggcactggttaggttggagggtttcaagtacttcatgatctattctactggcatttccagcatccatattccacctcaacatcaatgtctcgagcttttctttctcttgaagttttgccattcttgcatcttcagtgtctgaaaccttttcaaggttcactagtgataggctgtgtttagttcagcgcaaagtttgaaaaatgactaaaattagagatgatgtgactgaaaagttgtgtgtgtatgacacgttgatgtgatggaaaaggacggaagtttagatccaaactttggatctaaatacagccatagtctattgaggtctagcagtgattgaagctctgacattgcactactaccaatgttggggacaaagtaaccaagcaatgtgtgaagatgtgtaagttggcccatagcatgaggcattgctgtgagtgagtagcaattgagaacatttaggtactgaagctccttcattttactcttctttgtaggcaacgtgacaagatagtgacatccttcaaggtctagcttatgtaattgcacaagcttacatatgttctcatgcagtttccgtatcttttaacctaggtggggatttggcatttgttgttctaggtatatctaatcttgattaggttggtttttatgggacggtgggagtagaagatgaggcctggagtgtggtacttaatgtaagtggcggttgggaactcattgtctacgcacggaaaatagaacggtccattatcacgtgattaagtaagttttagctatttttttttcaaaaatggatcactatgatttttttaagaaactttcgtatagaaactttttacaaaaaatacactgtttagcagtttgaaaagcgtgcgcacggaaaacgagagaggagagttgtgaactccctcttacgaacagagccttaatgtagactagtagagatggaaaagacagtaagggtgtgtttagttcacgctaaaattgaaagtttgattgaaattggaacgatatgatggaaaagttggaagtttgtgtgtgtaggaaagttttgatgtgatggaaaagttagaagttcgaagaaaaagtttagaaccaaactcggcctaaggtgtcaaataaaaaagaacggagccttaatgtgaactagtagagatggaaaagatagtatggcgtcaaataacaaacagagagagcatttaatgtagactagtggtactcgtaccctagagatctaggttccattctttagagatctaggttccatttttttctaagggtgtgtttagttcacgtcaaaattgaaagttttgttgaaattagaacgatataacggaaaagttggaagtttgtgtgtgtaggaaagttttgatgtgatggaaaagttggaagtttgaagaaaaatttgtaactaaactcggcctaattaagatacaaaatttgcttcagttttcattagcacacatttcaaactgctaaatagttttttttttcaaaaactttctatgcaggagttgctttagaatattaaataaatccatcttttatgtttcaaataattaaaactgaattaactatgtgctattacctttcttgttttgtgtgtctgctcttaatcttaatcttgagtagactcaaacgctggtctcttatgagttctaagaagttgagaatcggcaatgctatttgcgttgcaccatggaatactccttccattctttaataaacaaatatataatggttttctagatttgttatactaatttaaataacatataatcctaaatttgtttttttaaacgcatagatcgtacgtttcacggatataattctaattttttttaaacgcatagatcgtacatttcacgggatgtcgctatagtatatctgcaggactgcgaggaccacgtcctattttaggagagaaacgcacaccaacccagatctacgacatactatagtcgtgcggccagccgcactactggagcccggcaatgagacaacgattagctggcaaagcaagttggccagtggcaatgagacaacgattagctggcaaagcaagttggccagtggtttctttttttaaaaaaaaaataattaaaggttagtcgacagaacttgctccgtcctaagataaataaacatacaccgtgtttagttcaaaagtttttccttcaaatttctaacttttccattacatcaaaactttcctacacatacaaactttcaacttttccatcacatcgttcaaatttcaactaaacttcaaattttggtgtgcactaaatacagccatagtactgaatttagcatattctatcattatgaatctagatggatttatttatttagagcaaatttaatagtagagctcactataagttataaatttattgtagagctaacatatatgatatgctacctataagattaactctattttttctctgctctctctttccctcactatgcattttcgtaaagaatgtgtacagctagttcctccatttcattgatcattatataaccaaaaattggatattctaaattgatcatcatatgaccatggtctactcatttgacgtgcaacattattgtatctatgcatgcaaatttagtatgcgcgcatgtatgcatatagacatttagaagtagttaaacccttgtttcttgtgcaaatggggagttaaaagtatgcatgtttcttaattcttccccaccacatactcatgtattaaataaaatacatggcagtttaagttttttttctgccttggtaagaaagcttactgtgtgtttggttcccggtcaaggttggatggaatatggcggtccatactttattggatatggcaatccggtttttttgtttggtggagtgaatatggcgatccaattggttgtaaggatgaatgtggatttggtgatccattttttttagttgggggagtaggatggatgagtggttgcaatcaccctttcattagtagtggtaagtatacccccttgaaattcaatgaacccaaaataataccaatctactaaaaaaatctaaatagaaactaaaaattagaatgaaataaaaggaggaaaggagaaaaacggaaaaaaaaataaaaaaaaatgtcctcttcgtcggccgcccctcgcctcctctctcaccgccgccgccctgcctcctctctcgccggctgctgtcctgtctcctctagatttggtcatcctcgtcgtcatcatcattgtctcctacccaaccggtcgtcggcacaccccatctcctccagatccagttgtcatcgtcctggtcatcgtcgtcatcggcagcggcaacgacgcaccctcttctagctgccgccgcctctggctctcgggctcgctgccgcctcttgcctttgggctcgccgcagcttccttctttccacgctgaccgccgagctcgcatggtgagaggggtgacacgacctacgatactcactcgccccgctcgcctgggtacttgggtggctgcatctgggcaaatcggccggatccctccatctggcatctgggaggaaaattcccctccgtgccgtcctatcccactcccgcccaccaactaaacaaccacaaaaaatgggccgccatgtcctatccacccaaatacctccatccgaacacacccttatatatgatgatcaatatggaacggaggtagtacatgagaaccaacacttctcaatttttgttatctcttttccatataaatatatatatattgtctgtaacttatactcctcctattccagtttgatcatcagctaagatttttgagatctttccaaaatgatcatcatttaacaaatatatctttatttatttatataaagagtaaattagcatcattgaatgcgctgcatacaactaaccaagattaattactattggtggtacaactacatgcaatattaaaaatttaatgcaatccatgggatacattactagtgtagtatcttaaccgatgtgaattaattacataatgatttagttgtttttgatctctgtgttttttcttagggcaggtacaatagcaggctataaaccagctgcaaacatattttaagaagataaatgaggagagagaagggtagcgggctacagatttgtagccagctgtagcacggactccaagacgcagtgtgtatgataggtgggactaggtattaatagtgtagtatataactattgtatgaatgaactattagattgggtatagatgaattggaggccggagtgggctacactattaa

SEQ ID NO: 9888 - DNA, 3492 bp, Oryza sativa
agggaagcggtcgggcatgacgccactcataaagcatggtgacaggtgggaccggtctccgtgattgggcagaaacccaacggtctcaaaccacgcatattggtaacggtgtcttagccgtcagttatgggcggtctcttcaagactgccacattacttgagcgacgtacgaatctgggtgagccgatttgcttcgcctggagatatggtgatggtgcttttctcggagccatcagaatagcgtatagcatcttctgggcctgagggtatcgggttttggcgtcccggagggcctgagggtatcgggttttggcgtcccggagggcctcgctaacaaagtagacgggccgctgcgcctttcggcggggccgatcttcttcgctaggggccgcatctccagggcgctcttcatccgagaggcagcgcggggcgcactcggcttctgtgccgacgacctcggggttagagggcgacaggcgcggccttcccgcagtggcctcggggccatcctgggggtcgggggcgcctggcaccgtcggacaagcaagcggagggccagctccggccgtcgggggccttgggccgccgttcggctcgggggcctttcctccctgctctctctctctcttcgggcagaatcctcggctcgcgttcgccctcaactccgacgaggagggcgatgccagcggagtgggcgatagtggcgacgaggccggcgacccgggtgcatcggagtgagcccccaggcctccgccaatcttaatagcttttccttcttcttccgaggccttcgggccccttttttgtatagatcaacttaatctgcaatcaaaaatgatgaaaaaattctttgtgtcaattttattttactatgcgtatgagacgaggatggtctgtgccatggtccttctgtgtcttggcttgaacaagggctcgtgcccaggtcccagcctcaaacggcgcgggtcaaggctagtgcctggggagatccacatgtcgagactggccaggccgggagcgtggtgaccgagggttatgggtgacccgattgtgggtttttgccgattcccccccggagttcaccacgccccggggcacggctcggttctgggccccgtttggcgattttagccgacccgagcccccgagggcaggattgaacacgagtgacctatttcaagtcaagattcttcaaaaggaaacaaaagcacagacacagcctttaggaaatcgaaaatgcttttattgaaatacggaagagaaaaaagataagcccccggccaaccctgcacgccccgggggggggcgcggggttggcccgagcccgaaacctgacacccgacccccactaggggtagaagcgacgaaggtgttcgatgttccacaggttaggcagctctgtgccgtcgcccgtggccagccgaacggagcccggccgggggacgccgatcactcgatacggaccctcccacactggtgagagtttgctcagtccagcacgcgtttggacgcggcgtaggacgaggtcgtcgacgcagagtgatcgggcccggacgtggcgctgatggtagcgccgcaggctctgctggtagcgcgcggctcgaagggccgcgcgccgccttcgctcttccaagtagccgaggtcagggagcgtcggcctctttctttttgtcgctcgcaggcctcccctttcgggtggcccgcggagcgccctcgacggcgaggacatgaccctcgtcgccggaatggaccgacctcttcttcctcctcctgtcacgccgccctgtctgggcggcggatccgggggcggccgaagctgccactccggaaccggaggagttccatgtccacgcttcctccttacgagccactcggtccgcgagctgaaaaagctccgcggtagtctggggctctttggaagcgatcttttcgagcatgcggttgtgccgcacgccccccctgaacgcgtagatcaccgcgtgtgcagggatgcatggtatagtattgcggacttggcaaaaccgctgaatgtacgagcgaagcgactcatcatcgcctcgctgtactgcatgcaagtccgcttcttcgcctgggcgcggatatgtgccttggaagttcatggtgaactgttggcacaaatcttcccaggagtggaccgacgcgggtggcaggttcattagccaaccccgtgcctgtccttttagggccatgggaaagaagttcgccatgaccctgtcgtcacccccagcggcctcgatcccggtcgtatagacctggagaaactcggtggggttgacgctcccatcgtacttctcggtgatggtgggccggaaccttgggggccaacggacattccgaagactcgccacaaaggctctacagccaacaccaccggccgggggcacggagggctgatcctcacgtccatgtcgaggtgacactctggacgaagaggcgccctccgttgcgcggggagtacgccggttattacgccggcgctcgatgtcgatgcaggcatccggctctccatgctgatcctcccgagttggaggtgtcgacgagggagtggcggccgaatggcgtgcaacagccgccgctcgccgcgccctccgccttgacgacacggagccggtggtagcggcgccggaggtcttggtggtggcggaccgtccaccagcacccaggcgctgctgtgccgtcatgaccaagttggccacgtcttccagccatcgttgggctggagactccgggtcatggacgacaggcgggtgtcgtaggagcgcgccagcagcctgaagcgcaccctgaggcgtgctgccgtcgccgtagacgaggaggcgacgctccccatctcgccgttctcctgcatcacctgcgactggtgatgccacagatttgtcgaccctctcaagcgcctccccctgcttagggctttggcgcggaggaggtgggggagtacgagctcgacgacgtggattcggctccccgtcgtcgccgctcacactcggagagaggtcgtgcgcttttccttgctcggccattaggctgaacaagaaatacttggcgcacacggaagagtctgagagctcagaaaacacacactgagccccctacctggcgcgccagatgacggagcccgtggctcctcaccgggagaccgcgcaggcccccctttgccagttcggccgggggcttagggtgagatctcaagctctcgctgtgtgtggaaagatcgctcgcccggaagaaacacgagacacggcgatgtatacaggttcgggccgccgcgaagcgtaataccctactcctgtgtttttgtggatttgtgtatgaatgagctacaaagtgtctgcccacttctcccccgctctaggctctaaatctggcaagaatcaaccaatcccttctctatgggcaaggtcctccttttatatttcaaggggataccacatgcccccttccctttccaaactggacttttcttcttttcat

SEQ ID NO: 9889 - DNA, 743 bp, Oryza sativa
tccttatatgcgaatacgggacagtgccacataggcacaacccccgcatcgcaagttttcacaattcattttattttcaaacacaccgacaccacatgtcgggttttgaaggcttcacaaacccatttcccaagttttcgacaaacaacggtgtatgtgggatatttggtatacgcgctcagagagcacgaataccgaggtaccacaagggtggagcgacaaggaatcagggtagtacgacctacggaaattagtgcgactactaggtaggtccgtcgatttggcacgcaaaccgaggccaagcaagttaagtgtgtgattataataatgcaagttgcaaacaaaataataatgacttttcaattataggggcaattgatcaaagggtgacttgccttgctcaaggtcttcacgaagcttcacgaatcttcgagaaaacccgcgatcgacgaaaatccgataactgcaactatacgcaaacaatcgaaaacctaaacaaaagacaaaaagaaagatcctatttagactaattagtagtgccattaaatagatctcaatttacggaattattggaagttgaacggagtcaatcggaagagcggttgggaagatatgaattttggaagtttaattggaatttctggaagacgagaaatggtttatggaatttatagaaataatattctcaagaatattattgacagtcactgacgtgcgggaccaaaggaaaatgattcatggaa

SEQ ID NO: 9890 - DNA, 2363 bp, Oryza sativa
tagtacaaaatccaaatatgacataacacaatacattataattattctataatcaactcttagtttcaggttaaacagagctaagtgttggaaaaaattcaacccgcggtgtttaattcttctctcacggcatcacacctttaattttctttacatgttattaataaaattaatcaactccatatatgacttgatatgtggcaaagtggtagcgtagcggcggtcgtaatcaccttagatgccttagacacgacgctttgtcacgcgtgcaaaaggcaaaaagtgcagacgtgcattgtgtagcgggccaaaaaagagaacttcgaacgctttatttataagaaaacaatagatccgatgatttaaataatgggtccactggttctagtgtaagtgtaaattagttaatatagattttaaatttttaatttaatgggtatataatataatagtgtagactttattttgaaactatgcattattggagaataatagtccaatgtaataaaaaataaatccagtgatttaaataatgagtccatcagcttaaatgcacgtataaattagttaatatagatcttaaattgtttatttgataggtacacaatataattgtgtaaactttatttttaaatagtgcattattggaaaataatagcacaaagtaatgagtacaccggtttaaatcaaaattatcttacattattattaatttaatgggtaacatataatggtctaaattttattttcaaaaattgtagagctaatttagttacatgcaagttgcatgatggtagattctttgtttgtaaaatataattatttaaaaaatatatatctattatataaatggaaaaagaaaaaaaggaaaaaaagaattgaaagaagaagcgtacgcatgaattatgattatttaaaaaaatatatatatctattatataaatggaaaaaagaagaaaaaatgaaaaaaaaaaagagaaaggaaagaagaagcgtacgttcatggtcgtatatatctagggaggaggagaggtggggcccatagtatttggtttggtttatgttaagatcaatttcatctaacggggtataatattggacccaccaatttaagtgaaaattaaggggtagatgttttgcttttttcttagaatttctaggattttctctaatttattagagcgccacgtggcgacttgagagcgtttgtaggaagtttaatggacttttagtatataatagatagatagatagatagatagttacatactacactattaatatctggtcgcacatgtcatacacacaatgtgtcttgcagttcgtgctacagttggctgcaaatctgtaacccgctgctctcctctctttttatttatcttcttaaaatatatttggagctgacttataacctgctggtatacatgctctaagagaaactatagattatccccgatgatggacagaatcacaggaggttcactagcagcttagcttgggagattgaagcccacaaggtggatagaggatttttttggaggcggagatgaacctgaggcggctatgggaggtgtggggggagtgggagatccgcgtgctcgtcctgtccagcctgtccctggaggtcttactcctcttaaccggcggcctgcgcaagcgcaaagccgcttggtggctgcgcatgccgctctggctcacctacctcctcgccgactacatcgccatctacgcgctgggcaacctttccaagaagcagaagctctgcgacggctcattcgatggcgagatgcacctcctcgtcttctgggcccctttcctcatccttcatctcggggggcaggacaccatcaccgccttcgccgtggaggacaacgagctctggctgcgtcacttcctgagcctgctgtcgcaagtcgcgttagccgggtacgtctactggaagtcgcggcccaacatgcggctcatgtccccggcgataatcatgttcgtcgccggcgtcaccaagtacggcgagcggacgctggcgctcaggcggcgagcatggactgccttcgcagctccatggtcacgcagccggatccgggcccgaactacgccaaattcgtggaggagtgccagtcgaggacggagtccggactggtcgccaagatcgtcatcgtgcaggagcggcctccagatgacgaggaccatgtcgaagtcaagcgagaggagtacggcgacctggtgtacagtgcgcacaggttctttcacaccttccgccgcctcttcgtcgacctcatcctcagcttccaggaccgcatcgacagcctcgccttcttccggaggttggagatggagcaggcgtacaaggtggtggagatcga

SEQ ID NO: 9891 - DNA, 17300 bp, Oryza sativa
atatatattcttttttaacttcacagggttcatataagcataattgggccctgggttgcaaacgtgagtagcgtgtagagctaacacgagaacaaactcaatcctgaagaaaccacccaggaatagccagtaacatgcatcgcaaactgcaagcaaacattaacatccacaagaagaccacatgttacctggatccagcggccaaaacttaatccaaccaaaagcattatcgtgatataacaggtatacatagaccacggtttacttatggtcaggttaaagaatccagaagaaaaaaaaaagagtaattatgcaagataccggtacagtttcctgtctgtcttgtccctctccaagaactcgcgctcaatcagagactcgactctcttcttgatcaccacagggttcggcatgaaacgaggctgcagctgcttcgtcacctctgtcactatgctgttgtgatccagcactctcctcgacttcatgatcctcacgatggccgcctcgatctgaggcttcctgtcctcctcgactctctgccgggtctccatcttctctggctcagactccttctgtgtcgccaccgtgccgatcttcaccttgaacagcttgctggtgaacttatcgttgacgtagaagttgtcatcgtcggagatgtccctgctcataggttccttgcgcagaacgttcttgcccttcacaagcgcgagagactgaaggcagcgcttcaggtccgcggatggtatcgctgtagtctgctcgatatcacggtaagacaaacagtccgccgagttgaacaacatgagaacacacatctggtaggtcgacacgtttagctcgtgcttgctgccatttccaaacactgctttgatgtctgcagtacccatgtttgtttgccatgtcagtctcctgccattgtgggtaccaaggtagaaaccccgaaacatctcggacacgccaagaatctcaagaggaaggttgcaggtgttacatggttgtgtgggccaagacccagtggtgagtatctggacagatatagtaggggcatcccccaaatcaggagtaccagcgtaaaatcgctgggtggtatcatgagaggtcttcaaatcattgaacatgccctccaattttgaagtgaactgatatccacattctgtcttgagcttcacaagcatacttctctcagaatcatcagaagcagccttcccagaaagaaggcgcttcgccaagtgttgcttgtagtatttctcaaacaaatctttttcttgcaagtacctaaacagcatcatcactttgtccaggacagtctcaacatcctcctcattggcctctttcattcctttacgcagtttgtcgtcaacatacagcgagatgaactcagggcatctattgtttaagttaatgaagtgctcaaaggaggaattcagagcattttggaaactcttgtcattgctaaaggaagtggtaacaatactgtcatacttatccttctcatttagaagcctctggacaaaatcaacagggtccttcagcctctcaggatccattaccatatccttcccggtttctttaacatgtgaattcatcacagatttaattgtcgagtgaccatcgggaacacgttgaaacaagctgtacatcatggtcaggtcttcatacttgtcctccacaagcatattaacaagacctgagttctccataagaatcaacctctgcatgtgattcgcaagcatttccttcaccacaacagcagttattttctcgtctgttttggcatccatgtactgtgaaacacgttccgcttcttcatcaagccgctgctgagccttcttaagatattcaccacaggaacaacactctatgaatttttgtgactcaccactataaaaactagcagacacctcaaggaatggcctttcaaaatcatcctgataaacagaagaacctagatccatcaacattttagttgtactcctcatcaaggatctgtttatcacctcacctgttctctctctatgtatgagatcaagaagagtgtcaagcaaccttccatggatcttgggtgaccgaacaatagtatctctccaaagatccaatccaagatcaaatacaggtgtctttttattggtgggaataaaaaccctgtccatgtacatcaggatatctctgatcatttgcaaagccttgttatggtcatcccatttcctctgtagttctaccaagaacaaaccaccttgagcagcctcaatcgatacgcgcatttcttgcaggtgatcttccatgttttctgtcagtttgtcatagagctttggcccatgtttgtgaagtaccagattataagcagtcctgccagaatataaggacaatattatgttctggtacgtaagaaggcttattggttccaaacaaataataatagtatactgtgccatgaaaggctggtagctcagacatgataccatgaaaagccaataataatatcgaaggtatttccagaaccaaaaagaaaaagaaaaatcagatatcacaataacacatcgcttaagggcaagcaaacagggcagttggcctttgtttctctcttaaaattctatttattgcacttttttaagagtatacaatgatgcaagggacataacaacaactacaaagttccattgaacaagttatgggtactgcagtaatccagtttcagtatgatagaagcactacctacagactacatgaatagtaaaagaccatgctttgtgattgtagaaatagagttcttatgtaaggaaaataacaattttccactgaaaaaacaatgatgtaaagaagaaagactttcataagtattttgagacactgttcagctaatcttgtttcaaggggataagagtttttttttatgcgcaaacaaatgcatagcatagagcacgcaaactctcaagtgatgagaattgatctgagatgaatttccctagaggtaataggcacgcaaactctcaagtgatgaatttcttcacaaattaaattttgtagaatcaatggtattttccttctaataaaacggagtattttccactttctcaaacacctcttacatgtggtttgcaacatccaaattgcttgatagcatggccaccaaaaaaggagccagaaaatgcaacagcactacaacatgacttaagaatccattgcacttaaatttatggagcaaaagcataacgaaccaagagacccatcaatgaaccgacatacgcaatctcccaaacttctaaaccaagttaaaagtatttaatgctctacaaattaagcagttaactgcatacgatttccatctggctgacaaagctccctaccaatcataatggggcgttacgtctacagcgataaccgacaagcgagcatcaattattatagtgaggttcaaatcccacataacagatcatgaatctaggagctgtcctaaactccatctgcaatatacaaccctaacaaacaaaatttctaattccttttttaatgaactatgtccaaatactcgcatcacatatcgccatctccgcattgttgtaaccgcaaaactaaatcaaatcaaatcaaatcaggcctcttatctttctttctgcccctgtacagcactgacagggagaagcgcgatgggatgggggatggggggatgggaaacctgtagagctcctcgaaggagaggccgctggcgttgtggttgtagatctcgcggatggcgtcgtcgagcttcctccacgccttctcgaagaacctcgggtccgtctccaccttgtgcctgaacggctcgatcctcgacggcttcttcctggaactcatctcccgccgccgcccgccgcccgccgcccggcggtgatccggcgaggccccccgcctgctgctgcggattcaggccgcgagcgctagggtttcgtatctcgcgggagatgtggggggaggaggaagagagagagaagggggaggaggagatgtttctcgaggatttttgtgaaattcgttttgtttgtgtttttaagcgaagatgagaagatgagggagagcttgaggtggattccagcttgggcagttggggatggagatggagtccggtttggtttgggggaacatctgattattttgaggattccggttcgaatttgttttttttaataaccacggtttgcgagcattactgatccagtaattttttgaaattgataaagacaccacggacgactcgttatcgacggttatatcgtctaccaccgaaaaaataaatagttatcaatgcgatcatccgtatcaaataatttgaaccggggtgagctggttccaccacaagaaacctaatcagttgagctatgcttatatttcgtaggttgaaattctaattgagttccatcactaattggaatttgcatccagtacatatttacgattgcgtttacgtcgacacatatctacgtattaaaatatgtatattaatccgaaatacctattaaaaaattgtgtaatgtttacattgatagaggtctattatttgaatttaaatattgttaaaattatgtttatattatttctttgtatttgaagggagagcatgtatcaatctgaactacctatctctcgtgcaattaactataacaaaaatcaagagattggtagaaaaaggcgtagtaccaccagatctacaagtatgcttgaggttttataaactcgaaatgaactcatattatttttatatgttgtttatatattaaagtattgtagtctgaatataagaaattagaacgatgatatatttcgacgcactagctaaaatggttggatatgtgtgtgcatattttaagtacgacggcttaaatttgaacatgttcataggataaattggtgagtttggtgccaagtcaaagaagtcgtcatacatgatttcttttatatatcgtattccgacagagctcgtggctcctcaccgggagaccgcgcaggcccccctttgccagttcggccgggggcttagggtgagatctcaagctctctctgtatgtagaaagatcgcgtgccaggaagaaacgcgagacacggacgatctatacaggttcgggccgctgggaagcgtaataccctactcctgtgtttttggtggatttgtgtaagagcaagttacaaaatatcaaccagccctctcctctcccgggaaaatccaaaatcccatccccctctccttgtgggcatggtcctccttttatatcttaaggggataccacatgcactcttcccttttcaaactggacttttcttctttacataaatggacggagatctgcacggttgccctccgaacgtccttctgatgggacggcacatacctacctccacttccgccgggggcaggcgcgtcgtgggaacgtggctgtgcgctgacgacatgagcagtgtcagaccggtcacaaatcggtcatccttgtccaccgcgtgtcagcttagcaacgtgcatgtttgcccttcttcacacaacatcttgcctgtaatggttaggatgaagcctggtattcatctaaccagggctaacgtgtcatctctaagaggtaacacgctagctccggctggagacgcgtgcctagaggctctcgtcttgacgggacggggcgtggcgtgcgtcagaccgccagtcgccacctaaccgttgatctgaccggtctgtgactggtcacagaccggataaaagagcgcgctgcattgcgctgcatgcagcgtgacacgcttgaccaaaccgcaataaatgcggttaggtgagccctaccgtgttcacccaacctatgtacatagtgcaaaccccacaaggggtcggggcacctcggccctcggggccggggcaggagcaacccgaccccccctcggggaaatcaggaggagggcggacacctcaccctcgggcccgacgtccccgaaggtgccaggccacgtgggcgattccatctgcctcaagcctccgggcgcaatactcccggtcccatatcaccgacagtagcccccggcgtgatgtcagggcgatcatccttctcaagggaagcggtcgggcatgacgccactcataaagcctggtgacaggtgggaccggtctccgtgattgggcagaaacccaacggtctcaaaccacgcatatcggtaacggtgtcttggccgtcagccatgggcggtctcttcaagactgccacatcacttgagcagcgctcgaatctggacgtgcagattcgtttcgtctggagatatggtaacgtcgcttcggtcggcgatcgtaattaacgcgcacacgatacgatctatctcgactgccacaaccgcatatccacctcatgcgccgcaagcgggcgaatggaattagtggaagcgtgggcgcgagaaacgagggagcgagatagcgagtaacgagggagcgagatagtgggcacgagaaacgaggagccgggctcagcgatgggaagggtataaagccatcgaggaaaagacttgctcccttcctttcgccactattcccctttccttcgccgtttgcgccctaaactctctctttgctgcgcctcaccttcgccacacacgctcgttctcaaccctctctttctccgacgacatggcacggggctccgctctgctcgacggtagcgtactaccgccttcccgcattgtgggcgagaggcaggctgggctgccgcgccgcttcatgccggaatccgctaccggccgggagatagtgatgctgggcgaggcgcgcccagcaccagattacccggggcggtccatcttcttcctccccttcgcaatggccgggttggttcctcctttttcttctttctttatggatgttctggagttctacgatctccagatggcgcacctcacccccaacgcagtgatgactttggccatcttcgcgcacctgtgcgagatgttcattggggtgcgcccatctcttcggctgttccggtggttcttcaccgtgcagtcggtgtcgccgccgtcggtggtcggtggttgctacttccagccgcgggggccagtgttgaaccgctacatcccctgcgccctccgcaagaagtgggacgattggaagagcgactggttctacaccccccttgccaacgaagcgcgcctccgactcccaagccagcccccggtgccggtctccagctggcgggcgccagtagatctgggggatgactatgacgccgtcctcgaccgcctggcgggcctgcgatctcaggggctcacaggggccatggtgtacggcgactacctccgacgccggattgcgccgcttcagcggcgcgcccggagcgcatgggagtacaccgggtccgaggactacatgaggacccaccggggagtcagatgggattgggctcccgatgacttcaagatcgtggtccaaagggtgctgaatctcagctccatggaggcgtctcttattcctcaaggactcctccccctctgctgcgatccagaccgcgcctccattctgaccatcatgatgggggtcggggcctcagaggaggtggctcctaagggccacgacggcgccggcgggagccgccaggaagaatcaaccccaggagggggccgtgcttctgggccccgcgacgggggctcggggagcaaccgccctgccgacgcccgggggaagaggaaacagggaggaacacctcccccatctcctccccgagggggcggggcggtgcgtgccagcagcaggcgcccggagggggccgcgccgacatcacagcccgagacggagcgcaagaagaagcggctccgcaagacgggggagacggaaccatcccggggaaacctgatttcccctccaaggtggtcgttcaaccgaccccctcgcaggttcgtttcacgcctttcacaaccatcttccctttatcccaatcagcaagttttctcttatccaccttgtttgtcttccggttttttcttctgcttcagcgatgtcccgtcgcgttcctcccgccatcccaagtccggccaatccgaggccgaagatccggcggccgcagaggaacggaggcgagaatctgaccggcgagaggccgcagatcgccttcgggaagctgaagaggccgcccgggaggccgctcgggttcggcaggcggaggataccgctcgggaggaggccgcccgagctcgccaagccgaagaagctgctcgggaggaggccgcccgagctcgtcaggctgaagaagccactcgggaggaaaccgcccgggctcgccaggctgaggcgatggcgtcttccgaggcggttcacgacaagaccgccagcgcgtcgctcgggcccactccctcgggtgacgctcaggcgacaacctccggggcggctcgcgacaaggccgcgggcgcatcgcctgggcccgctccctcgggcgacgcccaggaccaaacgggtccgggggacatccccgagctcagtgcgtcttctggcgggccgagccgcgtcgcattttctccaaggcggctcttcccctcgtcttctgccgccccgctgagtgccgagccccttctgcaagccttggccgccgcaaacaccgcggtgctagatggattcagcgcccaggtggaggccttgcgagcggaacgagcggagctcgaggccgcatgggcgcgcgtcgaggaggggcggcgctcggtggacgccatggtggaggtgggccgtaaggctcaccgccgccacatctcggagcttgaagcccgcaaggcggcgctggcggagatcgcccgagaggtggaggaggagcgagaggccgccctcatcgccaccaccgcgatgattgaggcgcaggactccctccgccttcaacacgggagctgggaggcggagctaaagaaaaagctcgacgccgcccagggggtccttgacgccgccgctgcccgagagcagcgagcaacggaggctgaagcggcatcccgacggcgcgaagaggccctcgaagcccgtgccatggcgctggaagatcatgccggcgccgtggagatcagcttggcggaccgcgaggccgccgccgctatccgggaggcgacgctggcggcgcacgaggccgcctgcgccgaagaggagtccgcgctccggctccgcgaggacgcgcttgctgagcgggagcgagctcttgaggaatccgaggccgcgacacaacggctggcggacagcctgtccctccgcaaggcagcgcaggaggagcaggcgcgccgcaatctggaatgcatccgcgccgagagagccgcgctggagcagcgggctgctaacctcgaggcgcgaggaaaggagctggacgcgagggagcgcagcggcggggcggctacgggcgaaagcgacttagtcgcccgcctcgcagctgccgaacacaccgtcgcggatatgcagcgcgccctggactcatccaccggggaagccgaggccctccgcttgtcgggtgagatagggcccggcatgctttgggatgcagtctcccggctggatcgcgccggtcgggaagcgggcctctggaaaggccagacaattccgcgttctaccaatctggaaggcctcgccccgcaccttaggaggatggcctgggctgtccaacaactccccgaggagctcgagaagaccatcaagtcatcctcgagggacctcgcccaaggagcggtggaactcgtgttagcgagttaccaggccagggaccccggcttctccccatggatggcgctggaggagttccctcccgggaccgagggcgatgcgcgcgcgcggatccgggatgccgccaaccatatcgtccaaagcttcgaggggtcggcccctcggctcgcgttcgcccccagccccgacgaggagggcgacgccagcggtgaggacgacggtggcgacgaggccggcgacccgggcgcattggaatgagcccccaggcccccgccaatctccaactttttctttcttctttttgtatagatcaacttaatctgcaatcaaaaatgatgaaaaatttctatgttaactttattttgctatgcatatgagttgaggatgatttgtgccgtggtccttttgcatcttagcttgatttaagggctcgtgctcaagtcccgatcctcaaatggctcgggtcggggctagtgcctggggagatccacatgtcgagactggccaggccggaaacatggtgaccgagggttatgggtgacccgattgtgggtttttgccgattcccccccggagttcaccacgccccggggcacggctcggttctgggccccgcttggcgattttagctgaccgaaccgagcccccgagggcaaggttgagcacgagtgaccttatttcaagttaagattcttcagaaggaaaaacggcacagacacaacctttaggaaattgaaactgcttttattgaaatgctgaaataagaaaagtaaggctgtgcatgtgtggtagcccccggctaaccctgcacacccgaggggggtgcggggttagcccgagcccgaaacctgacacccgatcccccccgtcaggggtagaagcgacgaaggtgttcgatgttccacgggtttggcagctcagtgccgtcgcccgtggccagccgtacggagcccggccgggggacaccgatcactcgatacggaccctcccacattggtgagagcttgctcagtccagcacgcgtttggacgcggcgtaggacgaggtcgtcgacgcagagtgatcgggcccggacgtggcgctgatggtagcgccgcaggctctgctggtagcgcgcggctcggagggccgcgcgccgccttcgctcttctaagtagtcgaggtcatctctacgaagctgatcttgatcagcctcgcagtacatggtggcccggggagacctcagggtgagctcggatgggagaaccgcttctgcgccgtagacgaggaaaaaaggcgtttccccggtcgctcggcttggtgtggttcggtttgcccagagcaccgctggtaactcctcgatccatgaatcgccgtgcttcttgagaatattgaaggtcttggttttaaggcctttgaggatttctgcattggcgcgctccacttggccattgcttctggggtgggcaggtgaggcgaagcagagcttgatgcccatgtcttcgcagtagtcgccgaagagttcactagtgaattgggtgccattatccgtaataatacggttaggcactccaaaacgggccgtgatgcccttaatgaatttaagagcagagtgcttatcgatcttgacaaccggataagcctcgggccacttagtgaacttgtcgattgcaacatacagatactcaaacccgcccggggcccgtttgaacggtcccaggatatcaagcccccagacagcaaatggccatgacagtggtatgatttgcagggcctgggccggctgatggatttgcttggcgtggaactgacacgctctgcatcgccggaccagatcgactgcatcattgagggctgtcggccaataaaatccttgacgaaaggccttgccaaccagggtgcgcgaggcggaatgggctccgcactcgccctcatggatgtcagcaagaagctcaacgccttgttcctgaggaatgcacttcaggaggattccgttagccgcgcgccgatagagggtcccttctaccagcacgtagcgtttggaaatgcgttgtacgcgttcactcccttcgcggtcctcaggtagagtcttatctgtgaggtatgtttggatctcagagatccaagcaatcaatctaagggagcttggagcgctcccttcgggtcccgaggcctggactccgacgggcctcgggggccggtcaggcgcatccgtctcccctaaggggtcgggtcgcgccgacggctgggtaagcctttcttcaaaggcgcccggtggggtctgggctcgcgaggacgcgagccgtgagagttcgtcggctatcatgttatcccgtctgggcacatgccgaagctctatcccgtcaaaatggcgctccatacgccgcacttggcgtacataggcgtccatttgcgggtcagagcaccggtactccttacagacctggttaacgaccagctgggaatcgcctaacaccaggagacggcggatccccagtccggctgccaccctgagtccggcaaggagtccctcgtactctgccatattattggtcgctcgaaagtcgaggcggaccagatatctaaggacgtctccggtcggggaggtcaaagtgacccccgcaccggcaccctggagggacagagaaccatcgaactgcatcacccagtgggtggtgtgaggcagctgcgaggggttcgtgctggcctcggggattgagacggtctctggagccggggtccactctgccacaaaatcggcgagggtctggctcttgatagcgtggcgtggttcaaagtgcagatcgaactcagaaagctcgattgcccattttaccacccgtcctgtaccctctcgattatgcaagatttgaccgaggggataagacgtaaccacagtgaccctatgtgcctgaaaataatggcgcagtttcctcgaggccatcagaatagcgtaaagcatcttctgggcctgagggtatcgggtcttagcgtcccggagggcctcactaacaaagtagacaggccgctgcacccttcggtggggccgatcctctttgctaggggccgtatccccggggcgttcttcattcaagtggcctttcggggcgcacttgtcttctgtgccgatgacctcggggtcggaggatgaaaggggcggccttccctcagtggcctcggggccgtcctgggggtcggaggcccctggcgtcgtcagacaagcgggcaaagggcctactccggtcgtcaggggcctcaggcctccgttcggctcaggggcctcttctccctgctttctcccgggtcgagtcagcacagggttagcctcggggccaaagggcgttaagtgcggccttcccgcagtggccttggggccctcctgagggtcgggggcacttagcaccgtctgacaagcgggcagagggccgactccggtcgtctggggccgtaggccaccgtccgactcgggggcctctgctccccgctcgctcccgggccaagttagcacagaatgggggtgcacgaaatgaggattgtcttcatcgcgctccacaaccaacgctgcactaactacttggggggtcgccgctaagtaaagtagcaagggctcatttggctccggggcgactagaaccgggggagagctgagatatgcctttaactgagtaagggcatgttcagcttcctccgtccaagtaaacggccccgagcgcttgaggagcttaaacaagggtagcgccttctctcctagccttgatatgaaacgacttagggcggccatgcaaccggtgacgcattgcacatccctaagtttgctgggggggcgcatccgctcgatagctcgaatcttctcggggttggcctcaatgcctcgggcagagaccaagaacccgagaagcttgcccgcaggtacaccaaacacacacttatcggggttcagctttatgcgggcggagcggaggttctcaaaagtttccgctagatctgaaagtaaagtttcttggttgcgcgttttcacaaccaagtcatcgacataagcctcaacattacgtcctatttggctacccaaagaaattcgagtagtacgttgaaaagtaggacctgcattctttaacccgaagggcattgatgtataacaataggttcctacgggggtaatgaacgcagttttttcctcatcctccctagccatgcgaatctgatggtaaccagagtatgcatctagaaaacacaaaaggtcgcaccccgcagtggagtcgacgatctgatctatgcgaggcagggggtaaggatccttaggacatgccttgttaaggtcggtgtagtcgatgcacatccgaagcttgccgttcgccttgggaacgaccaccgggttcgccagccactccggatggatgacttcacggatgaatccggcctccagaagtctcgccacctcctcgcggatgaaggcttgacgttccggggcctgccgccgtactttctgccggaccggccttgcgcccggccgcacggcgagacggtgctcaatcacctccctggggaccccgggcatgtccgctggtctccatgcgaagacgtcagcgtttgcccgcaggaaggagacgagcgcgccttcctatttgccatccagaagaccaccgatccgtgtggtcttggatgggccgtcgcccaaggcaacctccttgaccgggacctcgtcgcatgtggcaatccgctgcctcggggcggtgggggcggaggtgccaagcctctcgtcaccaccctcgggcttggtcgcagcagcgaggtggtccgcgcgctgctccatgcaagcgagcgcgactttaaggtcgccacggacagagatggggccaccggggcccggcatcttcatctggaggtaggcgtagtggaccgccgccataaacttcaccaacgcaggcctccccaggaccgcgttgtagggcagactgaggtccgccacatcgaagttcacccgctccgtgcggaagttggctgatccaccaaaggtgaccggtaggtcgatgtgacctaacggccatgtgtgccccggcgttacaccgatgatcggttgagacggctggagcaccatccccggggccttgatagcatcaaaggccgcgggggaaaggatgttgagagccgctcctccatctatgaggacacgccccaacttcacattgcagatggtgggggaaaccaccatcgcaatctgccctccccgggcaacgcacggtgggtggtcggtctggtcaaaggtgagggccacctccgaccaccgcgcccgacgtgtcgcctcatgagtaggggccgcggcgagaagctctcgcctcatggccttgaaactccggcgagaaacgtgagcacacgctcccccgtcaacagtggcaatggtggccccaggttcttggaaacctaggtcatcatcaccgtcatcgatgtcaacggcgggggccttctgtttggcctcacttcgccgtttaccggagggaactgccgcggacttgccctcacggcgttcctgcctcctgtcctcctcccacttcctcgttcgctcagccaagtttttgactgcgcgacaatccgcgagatcgtggagggaggtgttgtggacggagcaccacttgctggctgggcgctccctgctgggagtaccagcctctttctttttgtcgctcgcaggcctcccatttcgggtggcccgcggaacgccctcgacggcgaggacgtgaccctcgtcgccggaatggaccgaccttttcttcctcctcctgtcacgccgccctgtctgagcggcggatccgggggcggccgaagctgccacaccggaaccggaggggttccaggtccaggcctcctccttacgagccactcggtccgcgagctgaaaaagctctgcggtagtctggggctctttggaggcaatcttttcgagcatgcggttgtgccgcacgccccccctgaacgcgtagatcaccgcgtgtgcagggatgcaaggtatagtattgcggacttggcagaaacgctgaatgtacgagcgaagggattcatcatcccctcgctgtactgcgtgcaagtccgcttcttcacctgggcgtggataagtgccttgaaagttcatggtgaactgctggcacaaatcctcccaggagtggaccgacgcgggtggcaggttcattagccaaccccgcgcctgtcccttcagggccatgggaaagaaattcgccatgactctgtcgtcacccccagcggcctcaatcccggtcgtatagacctggagaaactcggtggggttgacactcccgtcatacttctcggtgatggtgggccggaaccttgggggccaacggacattccgaagactcgccacaaaggctctacagccgacaccaccagccgggggcatggagggctggtcctcacgtccctgtcgaggtgacactctggacgaagaggcgccctccgttgcgtggggagtacgccggctattacgccgacgctcgatgtcgaggcgggcatccggctctccatgccgatcctcccgagtcggaggtgccgacgagggagtggcagccgaatggcgtgcaacagccgccgctcgccgcgccctccgtcttgacgacgcggaaccggtagtggcggcgccggaggtcttggtggtggcggaccgtccaccagcacccaggcgctgctgtgccgtcatgaccaagttggccacgtcgtccagccatcgctgggctggagattccgggtcagggacgacaggcgggtgacgtaggagcgcgccaacagcctgaagcgcgccctgaggcgtgctgccgtcaccgtagacgaggaggcgacgctccccatctcgccgttctcctgcaccacccgcgactggcgatgctgcggatttttcgactctctcgagtgcctccccctgcttaggattttggtgtggaggaggtgggggagtacgggctcgacggcgtgggtttggctccccgtcgtcgccgctcacactcggagagaggtcgtgcacctttgcttgctcggccattaggctgaacaagaaaaacttggcgcacacggaagagtatgagagctcagaaaacacacgctgagccccctacctggcgcgccagatgacggagctcgtggctcctcaccgggagaccgcgcaggcccccctttgccagttcggccgggggcttagggtgagatctcaagctctctctgtatgtagaaagatcgcgtgccaggaagaaacgcgagacacggacgatctatacaggttcgggccgctgggaagcgtaataccctactcctgtgtttttggtggatttgtgtaagagcaagttacaaaatatcaaccagccctctcctctcccgggaaaatccaaaatcccatccccctctccttgtgggcatggtcctccttttatatcttaaggggataccacatgcactcttcccttttcaaactggacttttcttctttacataaatggacggagattgcacggttgccctccgaacgtccttctgatgggacggcacatacctacctccacttccgccgggggcaggcgcgtcgtgggaacgtggctgtgcgctgacgacatgagcagtgtcagaccggtcacaaatcggtcatccttgtcca

SEQ ID NO: 9892 - DNA, 49761 bp, Oryza sativa
  unsure (1)..(49761): unsure at all n locations
cacctaacccctatgagagaaaaatatttgtcaacaaaaagaaaaagtacgtacatacatacgagagattattattggctagaaaaaaaaacatacttgcgtataatcggaaatgtcacgtggaaccacattatatcccttataattatgtgattctcatctaaatagtgttaacaattagcaccccacaaataaaacaagtggcacaaataattttgacaatatagattattccatcgtatatatattacccacgaagttagatgtataataaaagaaaaaaacctatattaattaactcatacgtttgagaaacatggtgacaggcgagattatatataactggaacaaaatgatttttgtttgaacatgactgttattatcattattatgtcaaaatctttgatctactccacggtataaatatttctcttttacaattataagctagcgtgttgttaagatatgacttatttcagtattctttttataaacaataaataaattggccgcgcatctgcgcgggctttctttctagttatcactataatagctggaactagaaattttgccaatagatattactctcttttgaaaaagagtaaattgctagcggtccttaaacttgtaagtaggtttcatctagatccacgaacttgcaaagtgtgtatcgaggtccctaaacttggtttattgtatcatcccggtccaaagtctcatttgaccgtggtcttacctacgtggcatgacatgtagacgatgacatggcacaatattattattatttctttttttttctcacttcttcctctctcatttccctcttctttggcctcttcaacgtgggggagctcgaggtggctctagtggaggaataagataaaagaataggaggaaaaaagaaaagggggaaggaaaaaaacgccatgtcatcgtccacgtggcgtgtcacgtagacaagaccacggtcaaacgacgctttggactgagataatacaataaaccaagtttagagacttcgatgtgtgctttgcaagttcgtagatcttagtgaaacctcatgacaagtttaagaaccgctagtgcattttactctttgaaaaatgtactgaagtgttaagatacctgatgattgttctgtcaaattggggcagtcattcatatgtatttcgatactgttgccacgtagcaagccttcggaaatagaatgtagcgcaggacagcccgacaaacgtataacttggagagaaggttggtgctctaaccattctggtaaagtctccagtttgttgcaattgtcaattgccaagcttctaatagaagaaatatgttgcagaccttgcgggaggcatgtcagctcatgacacccgcatatgtttaacttcttgagcctggcgagatcttgcaaaccctcaaagttagaagaagattccagctcttccccaaaacagattgatatttgttccagatttcttgccacacttctaaggcctccttttgaaccatataacatcttgttgttcatccacaaggtcaacttttcaacagatggaagctccatatgcaaagcactcaatttggggcagtgaataatttccacttctgcaagacaaggaaacgcacccgtcctgtctgcctgttcccagagttcaaggttatgcatataagagaaagttaacttctccagagaggggaatgtgccattgtgaccatagaaattgttgtcaatgcaggtgatactttcagctccacttatctcggctatcctcatacgtggtagtatccccagaggaggtaaggatttacattctgtgagattaatcagtcttatctcaaccagagatttaagatatggttcggtgtgtgtcatccaagatggaagcttatcaccttcatacgcaacaagctccagctctttcagctgttgtggcggtcgaagaatctcaattagttcataggctgctgtattggcatgttcagtatccatgttccacctcagtgccaatgattcgagttctagcttatcttgcagcatggcatctcttgcatctttcagatccaaaacattttcaagtctttctaagcttagcctgtgcaggtttgccaaaggttgcagctctgacagcataactacattgctgtttgaaacaacataccctagcaatgtctgaaggtttttaagatttccgaatctgtgaggcattcgagtaagtgatgcacatccaagaacactaagatactcaaggctattaattttactgatgttctgaggtaattcagaaagatagcggcatccttcaaggtctaacttgtgtagccgagaaagcctgcatatatttcgatgcagtttttggagctttccacagtaggataatttcagagtatgcagaagttgtagtttggatattgagctggggatgactctgatatctgtccctgataggttgagaaatgtcaagtggaagagtaggtcgaatttattagggagcttcctgatcttagtggcttctaaactgaggacttcaagatgtcgaagtgtttgacacaattcttggggaatctgtttgatctcacactgccgatcagatgagcacgttttcccttcctgtagcaaaataaatgtctttaacatcttcaattgggacatgcaaattggcagcgattccgtggaaggatgaacgagcagtgatgcactccgagtagacaagataatgtcttgaacagcattgaactgaccaactctgatgattgagctggaaactctgtctgcatattgcacgaagatgtgcaatatcttgtgcatcctgtacatatgcctacctccatgatcatattcttccaccggataaaagcactcatcaagaaactgttggaggaatcgtattcgttgggcttcaggcacggtcgacggtataaagcctttggcagcaaaaagatcagccagttcttcagcagtgaagttgaagtccaatgggaacagcgagcaaaaaagaaaacaattccgcaattcggacgagagatgctggtaactggcataagctctctgaaagacatcagtcagttcttcctcttgttgaatcctccaagaaccttccagaactcttttccaccggatcagagttagctggtccctttgaagtataagaaatgatgtgtactctaacagcagaggcacaccggcacatttttcgaccaacttgataccgtactcgtgataagggggaaggtacatgtccatgacgtgtttggaggattcctggtccagtggttgcaagaagtaagcctcagtggttcgcatgacgacggccgtccgtggtatgatagagggagttcgtgtggtgagaaggatcctgccatttggggggaatgccagcataaggttgtcccattcaggccagtcgtgctggccaacattccacacgttatccaggacgaccaagtatttcgctcctcctcttagaacactggaaattacttgttgcagataggatggcccatccttcctatcgaccaaccagctgcttgtaatcgtactgacaccctcagatagatcaaaatgtggtgagagatgcacccaatgccgcacctggaacgcctgcttgaccctatcgtcgttgaataggaaccgggctagatatgtctttcccatcccaggccctcccactatcggtaaaaccagcggcccgtcgccctcctcctcctcgccgtcggcgagcaacatcctccccagcatcttctccgccagctctgatctccccaccattggacttttgacatagtcgtcgggacccacatcgttcgtcgaggttcctactggatacaagtcttcgtccatactctctccagactctggcacggaggcaagtgattcctctagccccgcaagcttcttcaacaaactcctaagctcacggacggtggcacggcgaaagaagaggttgctaatgtggagagcggttacctgataccaagaatctggttccacctgcctgctcaggattgcctcaagctcgccgcgaaggtgggcgaacaatcttctcgcttcctcgagacggcgatcataatctccacatgttgccaacacaaggcatttatctcgcctgtcgatgatattgttgatgatgttggggaagcgcgcgatggagtcacgcactgcgccgagcagggcgtccaattccagcagccggctctggctctccatgcgcgccgagctcagaatgtcgatcaccctctgcagatctgctgcgacatccatggctccctgatactcttaacgctctaacacctctctcccagtctgcttctcggctgatctcctcgctcccgtagtcccgtcgcatatagactacagagttggctcctctgcattcatcctgtacttctttgactagatccatttctttaaaattcgatgggtagtacagatcacacaccaaacctaaatttaaaccagaacgcatatgcacgggcatctaatttaatgttgcttgaaatattactctacacatgtggatataatatttgtatatacgtgatgattctattctcaacctgttttttttaaactagctgggtggcccgcgcaattgcgcggctagcacccaaacaaaatcatatatttttttagtatgattttacttaaaatttattaaatagctatctcattatcttataatactttaaaagaccaaaccttatcatcctcgtgtttttaattatatagtttttaaaagtcacaccagttgctaccccttatatcatctccttctttatttgcttgctcgatctaccactatttctattcattcttcttagaacctttaaaaattggatttcatagtttttagagtttattgtcacgttgggttttgtttttataatttctagatgtcccgtcaaacgttaccattatactcatctatggcccgtctactgtttcttctctttattgtcattgaaattttaaaaatcgaacataattatcgtttgggttcatttttactttctagaattcccgccaaaccatcagcggctttgccattgtactcctctatagctcgcccgctacctcccttctttattgttattgagattttaaaatcgaacatgattatcattgggtttttttttactttttggaagttccgaacctttaaaaattggacttgtagttttattttttataatttttagaagtcccatcaaacgatgccactatgcccctctacagcccgtccgtcgcctactatttatttttaattcatttttaattttttagaagtctagtcaaccgtcggcagctctgcaactatactcttatacaccctgcccgctgcttctcctttttattgtcattaagattttaaaaatcaaatatgattatcaatgttttttttttactttctagaagtcccagcaactgccttacttgtttgcttcatggcctaactgatgtccctccttttaatcgtcattacgattctatttggtgttttattaacaatttttatatgtcgtatcaaccgccaccactctactcctttgtaggcatgttacttaatttatctcgtcatgtgttttagatggtcttttcttttaatagtctttatttttatcacaaattttagttatttataaattgtattcctaattgaaaacttatttttctttttctaatttcagaatttaatttttaaaaaaattagttaatatcatattatgttcttttaatgtttttattttttattttcaatttcagttgtttcaaaattgtatttctacttgaactctcctttccttttctaatttcgtattttattttatttttattttgaattttgattaatcttgtattgggttcttatatggaaacttctttcaatattgcttatttttaattccgaatttcagctatttttagattatactcctacttggactgtcctttccttttctaattttggattttattttatttttattttgaattttgattaatctcgtattgggtttttatatggaaacttctttcaatatcgcttatttttaattcctaatttcagctatttttagattatattcctacttgggctctcctttcctttctaattttggattttatttttttatttcgaattttgattaatctcgtattgggttcttatatggaaacttctttcaatattgcttatttttagttccgaatttcagcaatttttagattgtattcctacttggactctcctttcctttttctaattttggattttattttatttttatttcgaattttgattaatcttgtattgggttcttatatggaaacttcttttaatattgcttattttttattccgaatttcagctatttttagattgtattcctacttggactctccttttctttttttttctttttctccgattaatgtgggaatttctagcctccacagcgaacgtggtgccttcttttcgagctgtcttaataatataatagatattttgtttgtgactattttgaatgctaattatccttgcaacacataaattctaaataaaaattacttacaaccatgaaatcttgaattctaggaaagtattatgtcgcaacaatagagttggttcctatgaactgtcatctaaactatatgttctttttaatacatatcaaatattcgcgttggagtgataaactttaagaaagttattttcttaagaatagttattgaacttcaagcaaataaaagttccaatgatttttgcagtttgttttgggctttggattcaacaaaatttgtttaaatttagcccaaattttgtttgaattccatatgtcctttctacttcttttggagtattagaggtctatgttctatcactcgttcttgaaatgcttttgatctctttaaattgggacataaacataactgtgttgagtgtacaactcgatatgggataaatgcgtcctttctaaaatcctgcctctaaaattgagccaaaaaattataacagtagacatagtatgttttacttcctctgagatcaatatctgtgttgagtgtacaactcggtatgagataaatccgccctttctaaaaccctgcctccaaaattgagccaaaaaaaattataatagtacacatggtgtgttttacttcatccgagatcattatgtatgtgagacatcaatgtgaatatgcattaagggacacgcaaaaattctattttagctatcgcagaaaaaaaaagggcaaagaaggcgcatatgtacgtacttgttgtagccgtggagaatattttagaattttatttgttagatctaactgtctagaccaatcaatttattagaaattttttcaccataaaagagcataatatcttttaactaccgattctaaccaaaaaaaaaaagggggaaaaggggcatgataaggaaacggctatggtggttgggaaagttatagcagcaaaagccatcaaatgagcaattgtcccaaaataactgaagggagtagaagagaaaattgtggttgggaaggttatagtagcaaaagccattgaaactaatattttatatacaggaataattcgttttgttattaatgggaaaaagtgtggctaaaagaagagaaatcattagaaataaatgctccctccatctggtttttaccctttttaccaccccaccctcacctttcctccatccatttttttcactttttaccccccccccccctccgtgtttctttttctcctttccatctcatccgtgccccattgaagcgcccgataaattattaaccatctagatttttttttagttttctcgttccttcttttcagatcttttttctcatttaattaaaatatttaccatctagtttttctttctgacttttatgtttttatagtgtttcccatgtttcaatagtaacaaatttactctttagagttttccatttgctcccatcctcccacttctgtatcttcaaaaataataaatttactcgcatgaatgcccccttcacaagtaacaaatttacttgcaagaatgcccccacatcgttcggcaccattcctagatggccttaaaaaaatactaccaacttacaacgctagcaattcttttaccagtgttacaaatattgtttagacttcgtagtctgcaagtaaaacaattatcacctttctctcaatgtagtccatgttcaatgtagtccatgttctcgtagtcaccacatagtaatatatttactcatgtgtttaatacataatacatgagtaaaaactgatactaattatttttcacagagtattgttaatttgaatcacaaaatgattgtccgaatgaaaaattcataggctcaatcacacaggtgaatcaaactagaaaagaaaaaatggttcagctaaaaatccatcttgaagttgggatcctagtggctttgctggatcttgcgacaaggatcgagaggctggtctatatcttgtgactggtggtggagaaggcaaccgggtggcaagtgacggtgggctatggaatcacggaaggatgtagtggcgcggtatagagatgagctcggcaatacccataaggccatccatcgtctagcaaccagaaaaaaatgcaaaaaaaaacattcttgttcatgtcacagagacgacgagcaaaaaaaaaagcaaacaacctttgtcaccggctgactccaccatatactctgcagccagccacatggagaacgatgtgcacatgtagaacctatgcagcacatcaattcagataaggtaattgtgcagattgcacgctaatttgatttttaaaaaagaaattggtgttacatgcgtgaatgtgaagtataatatccatatccaaatggaattgccattaccttattaactcctccagtcaatgtcgtcgccgtggtaaatgatgtggagtacccgctggttgtttctcttggcctgggtgaacatctcccccttgctggcgaaggcactgcccggcgtccggcggcgaggcccggagcttcatcgtggcctttatgctccacgcctcacctcaccggttcaggcagcagcactgcagtgcagtccatccaagaaacgtacagcgacaaaccgacggtgaatgcactaaattgccagaaaggaatcaatcgcttgatgggctcacctgtggtggcgatggaaggagaagcgaactccgctggctagagaccatcccctcttgcatccgtcgattgagcatgtctctactcactatccagagaccacggcttgccgctgccaccaggagagggaaagggaggcgcgtacgcacatgagggggctgatgaagacgatggcgatggctggttctcccgtcttcgctgcgtgcgagatgggggagcacacggacgaggttgagggtgggaagcccccccataaaaaaaggtcggccaccaccatgaaccgtcatggtgtcatcatcctcctccctggtgcgcatcgctcgccgaccaccgctgtcaaccgtcggggtgcatcgtcctcctgcatggtgcgttaccgatttatgggttgggacggtggatcgattcagatcccaaaaaaataaaaaaatgaagtgtggtggagaaagaggttggtcgggtacaggaaaaatagaatatataccggaagtagaaaatttgctttatcgaagtaaattgtttactctaataatggtgagcctggctgatgcatgcttggagtagtacttagcgcgcgctgcgcttgtactagttactctattaatatgatttttttaaaaaacaacttttccatataatttttttacaataaatacgttgtttagcagttaggaaaacgtgctcgtgaagaacgagagaaatcttctctcaatcaccaactaccgaacgcagcctagctaactctcgtaatatctagtctgagaaaagaaagttagattttacttataagtaattttgtaataatatattttttagatattatcgttgtattttaatagaaattttgtgatcaaagttctacaccaaacatcaaataaactcagtggtagtagtacacccttttctccctaagttatgttatggggatggaaatgagctcgctcattttctccgatccataaatgtactaccacgtctccatttagttgtggtactgttgactattatattacggactattgacgttaatttattggtttacggaatctcgctaagaaacctaattgactttatttttttaccgtgctgaatttctaaacaacttgcaacagattgtccttctttttttctttactattttatggaattgctaaaaaaaaacttgcaatagatttttttaatttggggacgtcctggaggaatggaacatgctgttatgaaattattgtgttatctcatcatccatatattggatgggattggcaactgaagattaggcatggcttagtgaacaattagcacatgttaattctgtttggttatgaagtcctcatgatcatgaggggacgtccacactatgttcaactacaagatactcctctctcgctctcgctttgaatctcaacacgttatcagaaatgcccgtgaaggagaagatgaagagaaggaaatcaattgcgaagatacgatgcctaactttggtgtgatcttggatgttgttctcggcctctctcattggcaccgcactcaccgtctccaccaccttcttcgccaatcgatgaggttgcgctggggctacagcgccagagcgaggattcggatcggtggttggcgccaccaaccccggcgttgtgtggtcgccgatgtcggactggttgtcgctccgccggccccacactcccacttactcactctattaatttgcaaaactccttaaattttctattttaataatttgcaaaactctttaaattttctattttaacttagcaaatcctattaattatgtataaaatgattaatgaaggatttaatgcatgttagactacatattttgacttacaattaaaacatatagagatgtagccctatactttacctacaatagtcataatctaggctaattactaagaggtctacatcttatgatattacgtacatgtgttatttcgagaatatgtttgaaatatgagattattttaaatttggatatgtacaaggtagtagaatcctaaacatcggttgtggtatattcattagaatatatttgcttagagatcatgtttttagacagtgagtttatcttgcccactattaagagatctactccacagtttaattacttggagattatccatattgtgctgtctaattttaaattctaactcaacttgtaaggtctatattctacattttctaaacatgacaaaatatgatgccttatatttttgcattgagattactgttggtatttcttacgatcacaaataaattcgtaagcgcacggataccgctgtagcatttcaccaatgagtattccaagggtattgtatttatatttccacaaggaaggtgacggtatgaagatatgtttatatctctttaatcaacctatagttaattcaccatagtctaaaaaggggttaggataataaatgataaggtagtggacacacatgagattcacctctataagaatatcgagtatggaaatagctttaggaaactacgatttgtatgtacttctatactaatcatgtctagtatacacttaacatatatagatgcttacaacatatgacttagttctaggcacccaggtactatcgagagaccactcccttctagtctgccagcgtgattatagcatttatgcactcttacgtcagagccagacgtgaaggaatacaaaggacagacaacgctatcaccacctgccgcctgcctcactttccgtggggcacacccacatccaatggcatttatctagcctaagcacatgcttatgccggtaaataatatcactaactcccccgagactctcaccctatggatgaacaagttgaaacaagagcaatctataaaggttattggactgttatcatagcatggatcgactagtcaaagatgaagtatatatacaaagtatatactactcatatgacatatactcaataaagaaatatataaaccataagcataaataaacaaagtataattctattaattcaactgtattcttacacaaagagggaaatattagagacataccaagaactccaacaagactataggaccgaagctcctaagctttattccatttagaaactatagagaatacaaagtggaagagggaattgctccttgaggtgtgttgtgggatcctctatttgtagcctcctaataacggtagttaagtcggttgtaggtcgaaaaacgggtataacagtcatcaaaagtgaaggaatcgccacgtggaagctcagtggcgcgggcgccaagattggttcggccaccgcctttggtgagggaaattttattctttttgaaaaaacaaatgctctagaattccagtatcactcagagaaagatcataacaactctatttcaccaattcatatccaacaacaatctagatttagatcatgctttatgcaacccacaagtttcatgttgaaggcaaagatttttttaccaacaaactcaaaaactatagtgaagactaagctgtaaactattccctccgtcctaaattataaggcctatattttttacacgatcttcagtaacatattatgaacattaatttattccatgttatattcccaacaaatataaattagcatcacaaaaaagtactttaaaacaagaatctagtgatataacgtgcataatacttagcatatatatggttagtatgattattagttaaaagttaccgagtttgattttccttaaaaaaagagggtgccctataaattggaacgaagggaataaatactagatagaaataataacagagcaaatcatttcaagtgggaaatcttaaaacattcttatcgcgtatatgatagcttttttggtaatttttatgctttgcaaccttttgtcgtttttctttttctgattcaataaaaaatgaaagataaaagttaccttagtggaggagagagcccccaagctagcttcttgctagggtgcatgatggggatcgaatccatgcgatctgaagtagaccgtcatgtcagcctgactgctgaatggcggcgttgatgtccgtcatctggtcacagcctcactggtatgctgctgccatgagtgggtttcctggacatgctggtttagcatgttgtgcatctcatttgtccggagatccagatctcccagctgccgagtaacatccgcaaatcctcgtccaaagtcacgaaaacttcgataggagaatgagtagtgtgcactggactgcagggtgttaacaacaaaaattggtaagatatacggagattgcaatagattcgatgcggatttggatgagataattcggtttctaaaattagagttgcgcatcggttgaaaacaatatcggccaattttatataggagtcgaggagaagatctgaagatattgccaaacaaaatgaagctcgaagggggtaattttatatattaattaggacaagagtcacttttcctcaatgtctttgggaaatctttgttagaatccgggatcgatggactgacctgatgtgtttattttataatcagctcgagtgctttggtaaattgtgaagatcaaactttaaccacccgccattatgtggtgtaattaatgcagggtattttactaatcgcctataatagcctggctccatagaacgaaacgcccggccagcttgttcccacgaggcacagctagctggctctccagcgacgtgcgctgctggttctccagcgaacgtcctcaagaaaaaaaaacaaatgttaaggtgacttttatttgtttaggtttaatggccgagctaacggctaagagtaagtttaataatatagctaaatgttagcttcaaaacatatatagctaatctagttaaaccattgatataatagtcattacctatgaaaatatactacaccattaatacccggtcacatatttcatagacacacaacctcttgagtccagattgcagctggctataaatttatagtctgttttcttctctctcttcccttttattcctgatatgttattatagctggcttatagcctgctattatacttgctctaagtataaactcaaattctagaactaatatgctgatccatgtagaactaattaataaataatatcctagctaatttttacataaaactaacacagtacacttcacattttctttttctccatgtgtatttatagctaagcagtgttaaggtggtgtttgaatctcatgaagatgaagattaagttagcgcacgtaaaaaaacctattagcatatgattaattaagttttaattattttaaacttgacaaattgatatatttgatattttaaaacaactatatagaaagctttcacacagaacgtaccgtatagtaatttgaaaagcgtgctaacgaaaaccgaggtaaaatctatatcttcatgagaaaagaacaaggactctcatgttaaaactaattatacattactccaaaatatatacattaaatatataagtttcagaaaaaattgaagactatctcatagtcaatctattatacatctttaatatgtttgaattgttgtgttcccccgcaattaaattaacagttcatcacccatattgaccatattttaactttgtctcatcacatttgttatgtcatccaaatgaaaatttataaaaaggagctgatacagatcatattatcatagattacttcacatgcacgcatagttaaattatatataaagaatattccaaatcgttgtattagattttataaaagcaggtccacgtggtgcaactactgggtgcaagccacctattccacagtcccatcacggcgcgtcacgcatgcacgtttccttgtgggtcctgaccttctggcctctcctccgcttcacacattctccttttctcccccattattctctttcagtagttgagttagaatatatttgtaacaataaatttttgaacagtcgtaacttttaaattatatatttaattttttatctcttagcaccatcgtattatttatgattaaaattacaacttaagcctcatgttaaccatttttttttgaaacgaaccatataaaatagtgtgagattttatattaatattgtagagtgtgaggtttcatattgatataacataaagaaatagttacaagaccatagccctaagatgctataatgagaaaaaaataacaagtcacaccacgcgtttgcaaccaaaagaacacgatatggaagaaaccagagtgcaacgtcctggttgcactcaactccatccacgtctttggattggagaagcaaagggcgagagaaaagatagatccattatcccatgcacacaacccccgctaacatgctcatcttatgacggacggaagcgccaccacaacaggacagatggaatggaaatggacgttcaaagtgatgcatgatcgagtatgctctatttcctaacaaaggttcctatctgttgacgcaaaaaatgttgcagacatcaaggcctgagatatttggtttctctagtgcaggtactatcaaattgggttcagagcgtgtcagttagtttgatcctacaactaccaaggttataaaggaaatattagtccttgggccaattggctttgaagccgatacgaaatcgtatactgagagaatgccgatagtgattgctggtctatcggcaacaaccaatggaaataaatagcatcggccgtaatatggatgatgatgatgatgatgatgatgatgatgatgatgatgatgatgatgatgagatacatacatacatacatatagatatatatgcacgctaaacctaaatcttgttataatcaatctttgtagagcagacccaactgagacaatatgagattcaacaacaataaaacctagatttaacaagtatatatgatttccagatgtaggctaatgtatttagatattaattagaacttatcattgttcattattagtgaataaactaaaatcaattctagtaaaccagaatataatcggtaataatttgtagctattacccacaatcttgatagattgggcctaaccgagacagtgtaacattgaagataataaaaacagcaactagccgattatactaaattttgtaaaccaatcaataaaatatttcatattatgataagtagataccattacctcatggactgaaactctgatgaaactatgataataacttattggcttgaataaatctaattaacacacgataacctacaagatcggacctaaccgagacaattcaaggttaataatatgtctaatagatttaaactagccgatagatactattcagagtgattgatatagaaaccctatctagaaagcaaaagcaatcgaagcaagagccgatatatctgataagcaacacaagcagaagaagctctatggtgtcaaaagctttctcaaaatcaagcttaagaagaattatctctctcttggactgctcgcactgatgaatgtattcaaaagaccaagctaaacaatcttgaattgtcctgcctttaataaacccatattggtttgtatgaacaagcttgaggatcactccttgcatcgtatctgccatcagctttgttaagattttcaaacttataatcatcaaagatatgggccctataatcatttactttttgaggagaaagctttttaggaacaatagtaatgtaggatgtgttgatgcattgcagatcagtgcattctgcatgaaagtgggcagcaagcctttaaaagtcatgtgtaattataggccaacatttcttaacaaataggccattaaaaccatctgatctaggagctttatcaattgggagcatagagatgagattatcaatttactgagtgaagaatggatcaatcaaactctccaaatttttaggggtaaatagagacttagatttagggtctctttggcagagctttagtttcaacttcatttctcctagagctaattaagtctagctaaacaaatttagtttcacctaaattgaaaatgaagggggaattggatttagcctgtcccagaacagacccttgtgtaggggattaacgtaggggatccggatcgcaaagaggctagtcagtcattcagtcccgatcacggcgccatgtctgtcgctcagtccaaggagcgtggtaaccccgcggcccgcggcgtcgaggaggacatcctcgtcccactcctcgcccgactagcaaccatcaggaccgtcctcgacaacgcgccggctccaagtcgccgtcgtctaccagtgcatgtgcgcgacgccgaagaggatgctagggtcgaggcccgcgcgctgctggagaaggtccaaggagagatgtcctacctccagcgcgtcttccgccgcattgacgaagccgaaaatagcatcctctacggcttcgaccctgtcgaggagcagatcgacgacgcgctccagcaagcgcaggttgggcttgacgtggagcaggtacacgaggctctcctcgccgtggacgccgacatcgaggtcatcaaggccagcatccgcgaggtctacaggttcccctgcgacggcgacgaacgccgtggtcccccaccgccgtcgaccgcgccggccacgggcgtggtgatgacgaggaggatgggggagatccgtcgcggcccgcagatgcggcacctcggcctcgccatcggcggcttcgaggcgcggctccgcggctgcgtgctcaccctcgccgcgttcccggagtgcgccgtgatcaagaagcgcctcctcatccactggtggctcggcgagggcttcgtccgctccgccgccgaggggaagagccgcttcgacgagctcatcgccaagggcctcatcgtcccgatcccgggccatctctgcgccaccgtccaccgctgcacggtgcggccatggatgcgcgacctcctcaccggcgtggccaaacgcaccgccttcctcgacctcgactccggcaacgacttcaccctcgcgcgccgcgcgtgcctgaacgccggcaggatgtcctcggggttcagcgccgaggcgagagccatctacaacatcgaccagaaatacctcgagctcgacgacgcctggttcgccgggaagaaggagctgcgcgcgctgcagctcggccagtggcgagagttcggccccctcgagcagattgccaaccccatggacagccacatcgagctcagcggcgtcgaacacctcgcggacatggagagctgcaagaatctcaggtacatcagcttcaggggaatctcaagaatcgagtccctgcccgattcgatcggcaggctgcgtgagctcaccgtgctggatctccgggcatgccataatctggaggaattggggcaagggatcacaaggctggatcgattggggtatctcgacttgtctgagtgccacctgctcgtcggaatgcctaaagggattggccggctcacacggctcgaggtcctcaagggatttgtggttgcaaatccaagcagaagagagccctgccatctcaatgagctcaccaagctgaacaagctcaggaagcttggcattgtgattggcacaatggctgttccgacagatgatgagttcatgaaattgggcgagttcagggcgctcgaatcgctcaagatcagatggggtgtgctggcttctgatagcaaagggaaaattgaagcatcgtcgcatcaaaaaccgatcgacaaaatgaagtttgcgcttcctccaaatctgaagaagctagatctccgatgcttcccgctgacggatttcgctcagtgggttacaccgaagggtgttaagaagctgtacattaggggaggaaaactgatgacacttggagatgaacagggctgggaggcagaggtgcttcggctgagatttctgaatgatctcgagtatgatcacgatcggcttaaacgatcattcaggaagctcaaacctgaaaatacagagatccatgcatgtccaaagttcatccgtggacaatgatccagatatccagtgtactggtcgcctcagcttgcaacaacctgtactggttgctttttctgaaggatatatgggctggttttactgctttctattgagtctttgaaaaagaaaagaaagagttaccattctattctccttcacaagcaacttagctggttcttgccattgtactgccttcctgaaagatgttgtgattggttgtttccagataagaacaatatcggtcatatactttcttatagccctgctacattttcaggctataatgttcaggaaccctttttacccttttttctccatgtctgaagaaattcgctgaatcctatggtctggcctgttgtagaagggctgagacaagagtcaagacaagacaaaaatgtggtaccaaaatacaagttgctgctcccgtttgtggagtccgtcaggtacatccttttgcattttacataagtgaacaacctttttgtgttcagcttaacaatgctgctgattcctcatgatattacaatgctgtgataaatcgggtgagtaattcaatatagaagaaattctcattttacaatacagagaacatgacagattaggatcgaactagaactcgattacaatatagaacataacagctaacatataacaggtacaagggaccctaaaattacactgaaattattcacaaaggaaacatgctcactacaattcttcgtgcacgaagagttacatttcctcaagatgttagggcctgtttgtttgagttgtaaaattgattgggtcgaagaaaatagatgaatattaatgcatgtttatagcccatagtaccacaccaactgagccaaatagcaatcgggctctacttgcattatataagaaagatttatcctatccttgccggaattgtagttagtgtacgaagaattcagctaattaccatctgatgaatctatgtgaattagcaaatcatgttagactatatggataagatcgtattgtatccggtttgttatggtaggataggattagtttccatctgtatctgtttggtagaactcagtagataagtcagccacatatttgaattcaaaaaatggagtacgtggagtatcacaactctaccaatctactatacttgaagcctagtaggactcgggttggagaaacggatctttgcattgcaggctaggagcaggaggcatcggaggtgactatcatggcgagctcgccggacaaagggaaagagacagcagccgcagccgtggacgcgccgtcatcgtcctcgggatcctcgccggagaagaagaagaagaacagcagcaacaacaacaacaggggagaagcgacggcggcggcggtggccggagacgaggggaggaagaagatggtgaggatgtcgccgccgcagatcaacctgctcatgtcgttcgacccgccgccgctggagcacgtgaggggcctcaccaaggaggaggaggggatcgacgcgctggcggcggagtgggagagggggatccgcgcggtgacggaggctgtgaggacgcagtacgagcagggagggtacgtcgagtacgaggccggcgccgacctgcttgcgtgtcctggccgcagtaagaagaagccacagggaggaggagaaggagcaaattcaacagagctcagtgtattttactttgggtcatattttattaccaatgtataattttagattagatcatccttcatccaatgttttcacgttggatcggtatttttatctttgttgctcgcgtgtcctggccacagcaagaagaagccacagggaggagaaggagcaaattataattgtttttttaaagtacatttcgctttgagtcatattttattaccaatgttttattttagattagatcatcctttatccaatgttttcattttgcattgatatttttacctttgtgtcacttcgggaatcctccctcggtcgctcgggggagagagcaaaatcggaatataatgttgcagtgagttgaaacattcttttgcaataaatcacctacatattttggaaaactctctactaagaaaatccgtttcattttttttcataaaaaatgtttcactatgtatggatcaaatgttgcagtgaactgaaacattctttcgctatttgccgaaacattatttttatataagttgaaacaacaccaatttaaacgattggaacattttctatctactcagtgaaacaattccgatatacttggtggaacatcgtgcaacatttaaaaaaaaattaataataagctaaaattttttcgttggattatatccatgtgtggtcttgttttaaagatttaattgcaacgaatttaatggtgcaatcggatcatgatttagataaattacttaagaaaataaatagtttaaagtggttttttatgcatgtgtcatgctgacgtcagcgcccgattttcccccctccccatcgggcgcccgattctgagttgcgtccatatcactttggatcaccattaactttttttatccatctacctctaacttgtcatataccaaagaaatgatattgcatatgaccgtgagagtttattgataggtgggaactgacatactctagatcgttcatacgcttgataagagagtcgagatggtccaaagtgaaacaaagctaagattactcggtccaaactgaaaatattgattaataaatagtgatctgaagtgaaacatgggtaataaaacatagtccaaagtgaaatttactcttatttttttatcggtagttggttattgtacatacttgttgatttctttatgttatgttaggacgagaggatctgtggggaaatacttgtatttactcaaacacctaaatagttatgaaattgtttacaacatttcgacgacatacatgtattactccgcaatatcttaagcctaaattcaactcatacatcaagaaagagacaaatttaaagtatgaatatatatattcatacccaaatttatttccctagattatgtttgaagtaggtatcattctactctgtattatcaattttttctactaaattttcacaactattcttatgaattaacaactattctaatgaattcgaatgaaaaaggtaaaaggagacatccctttcttcgatcccacaactattcttatgaattcgattgaaaaaggtaaaaggggacatccctttcttcgatcccagttttgtcatcgtgttggttattgcagttcaagcaaaaggtcagcaaaataaattcgactttgggaggctttcataggtgagataataccccaaagagaaaaaaaatgtgggggcattttacaaagccaaccaaatatatatgggacaaatgagcaaagttaacaatgagaaatttcccctcatattgcatgaagaaataatgaataatgctggttcgctatgctgtagtacaaatatacaatgaaacttaaacattattaataattaataatttccactctaaagcattaaacatttattcgagcgcctaccactatgaaacttagggcctgtttgggggagcttaatattctgagaagcagctgttgagaaactagctagtgaaaatctggtgggaatctagagaagctgggaaacccagcttttggcttctagttcattttctagattctacaactacagattctcagaatctaggtaaaaagctagacagtttgaggaagcttctggcaactagagattctatgaaagctgtagctgctaaaagcttccccaaataggctcttagtagaaccaactaagctggttcatggaatcagttccagtcttacagaacttaagtacacagaaagatatataactatgacagctaactatttttttaaaaaaaaaagataaacaattgggctgctgcaatctctgcatcagcaaagtgctaagcacatcgcttcttggctaattcagcttgttaacttttcctgccttgatggaaacgccgggccgaaaccttctccgaccaggattaggagctcgagcttgttcatcgcctgctgtatcggttaacgcttcttcctcctctccttgtgaattatctgcaggagacgatgtttcgggaaagtcttttctgcatcagcacctaggctgaacaccacacgatgtgctttaagattcgcacgtacgcagtacccagctgcagtattccatctgctatccactttacctccatttacggcaggtgccatcgaaatacacaaggtgggtcccaccgtataagtctccctctctctctcacatgctccaactgcttgctttcgtattagcacactgcccgatcacacatcatctccactcctttatactgcacagctgcccctcttccagtcttccatttgtgttgggtagtactactattaaggtgatgtttggatccagtaatttaactttagtctatgtatttagacactaatttagagtattaaatatatactacttacaaaactaattatataaatgaaagctaattcgcgagacaaattttttaaacctaattaatccataattagagaatgtttactgtaacattacataggttaatcatggattaattaagcttaatagattcgtctcgcgaattagtccaagattatagataggttttattaatagtttacgtttaatatttataattattgttcaaacatccgatgtgaaagggatttaaaagttttagtccgatctaaatagagtctaagaaactttcttgttcaatcatcttttaatcacatcttttattcatccaaagaaatttcgttggtgtgcggcaaccggatgatcttcgccaggatcactggtgggtgtagttagtggtcaaatatttggatgcttggtttcaggggttcacattctctaccgttctctctctctgccctcttccagaatgttgcatattgcctcttccaaatcttcttcagagtttttagttttgttttagaagatttgtttgaacttcttcttattcttccaattttaaccaaaatttgttcatgaagacttatatgttgttgacttgttgttcaactgttgtgttcccttcctctatttctctcccttacccctctctctcttaatgttcttgttaaaagaatagatttctagttggcttgttcgtttctttttctcttgaaacaagatcagtgcactttttcgagagagaaaaaacctctatttctctcccttaccctctctctcttaatgtttttgttaaatgaaagagattcccagttggcttgttcatttctttttctattgaatcttgaaacaagatcagtgcacttttttgagatgaaaaaaaagaagaaacaagatcagtgcaatcttctccgcgagtaggatggacaaatattccaaatctaatttctctagaaaatgcatcttcttacccaaatgtcatcttgtgttccccgatctgttctccatctgtatctagaccctcctacttctctcacctcttgcatgcatctacttcactcatctctctttcacggaagcaggctgagggcttgaatttgtaatgtagattgagggacgaggaagaaatatcttaattgtcttcagtccataatctccctactcttttctctttccccccaaatttacctaaatttgataccccacaatggttcaatgatccaagcagtctggtaaatccctcatggttcttttttttcgacgtgaatccatggttccttttccatcttgcaattgaatttgtccccctttttgataaataaaaaaaatcatttgctgcaatgaaaattcacctcttttattgccaatagcaactttatgcagttgtaatggaaatatactctcatcattcatacttggttgaagtctctctctatctctctctcaaattcattttcgtctctcctcctgaggtgttgtagacggagatggatgtcaagttttctttttttttttccttagtcaatgtgagtcctctaaatttcgtttgtccaagaagtttgggagatagagacggtacgaattcatggaaaaaaatgctgagatgacgagcatgattttatatttgtttttgatctttgagctctggtaatgtgatttgttcattccttgttccaccacacttcggtgctttgttcatatggattcattgataccattcgaatctaggctgtatttagttcacgccgaagttaaagtttggttaaaaattgaaacgatgtgattgaaagtttgtgtgtataacaggttgatgtgatggaaaaagttggaagtttggaaaaaaactttggaactaaacacacccctaatcaattttggtgaactttttttctcataccatcagatattctgcacttcggatgcacatgtactctccccgtccaaaaagaaaggcaaaccctcggtttccgtgtctaactttgacagttcatcttatatgaaatttttttataatttgtattttcattgttgttagatgataaaacatgattaatattttatgcgtgacttgtctttttaatttttttcataatttttttaaataagacggacggtgaatcgttgggcacggaaaccagggtttgtcttttttttgggacggagggagtatgttttaaagtactaactaaaatagctgtgaggttgaattatcacccaaattttatgtaaaactcctataagtttgtttgccacaattcagtgggtcatcaattgtctttttttgtcttattggttttctcttctactacaagagcagagcagaggagtagtatgtactcctacaagagcagagcagaagtgttctggtttttctttggctcgaattaaacgacaggagagaggacgtgctgtcgcctcgctgtgtactccgtatgagtgtgtgtgtgagagagagagagagggagagagggagaggtgttctttttagctgaaaaattggagtcatcctgactgcaaaaagtccatctctgaaataattagtaagatttaagaactgcagacctcacggaattaatcattatgggtgtgtttagttgctgaaaaaaagtttaaagtttaaagaaagttgggagtttgaaaaaaaagttataaacttatatgggtaagaaagtttttgatgtgatatgatgtgatggaaagttggaaattagagggaaactaaacacggcctatattagcctttcgccccatgaaagcaaacctgcatgaatccatcttgccaatcttgggtgggtttagtttacgtcaaaattgaaagtttgattgaaattgaaatgatgtgacggaaaagttgaaagtttgtgtttgtaaaaaaattttaatgtgatgaaaaagttaaaaatttgaagaaagagctgggaaccaaaccagacccttccatcaatcctgtactcctgtcttttatcagcgctactaccattttggtgatattttacctgcatggaaccatggacttctacaaattaaaggatacaaataaataatcatccttaaactattcaaataacctcttcaatagccttgtactacctccatcacaaaagatatctatgacgggatttaacctatctaagataataaattttaggatgaatcaaatctcacgaggaaacaacaaagcctgtgtttagtttcacgtcaaaattgaaagtttgaagaaattgaaacaatgtgacagaaaagttggaaatttacgtgtagaaaagttcgatgtaacgaaaaaattaaaaattaaaaaaaatagggcctagtactagtaaaaagtctcgtagaaagtctttctgctctccctctctccactggtctggtgtagcagatgtcagtgcagtgggctccattgctacagcaatacagcatgcaaagcaatgcattgcctgaccagcagatgtggtgggcccggcacctagctgtgtacatgtacattgcaggttagatactacgagctgtacaaaagggtacgcgtattgcgtggaaagtcaggaaatacagcacgaatcactgcacagatcgacgtctcttagcttaggtgctgctgcacctaggtgcagaaaaaccgcgtccacgatgtttcttcttttttttcttcttcttgctcatcatcatcgtcatcggtggcctttcgcatcgcgtaacctttgcggtagtactgattcaggatcccgtctctatgcttcatgaactgatcgtcaatctggtttatctccctaaaaatcttggcgacgtaatcgtcgatctggtccatgggtacagggaggtcgcctttgtgatcagacaagtccgtgcatgctaacctctccttgcttactattgggaatatttcatctggcatcctgattgtctgataattgatgtagctgtcgatctcctcctgtgtcatcctcaccttcctccctgcagtcgtcttcttcttcttcttgcctccagccattgccggcgacggcggtttctccttctcttggttgggttggtccggtgagcttgccatgatcaaactgtcgcagaatatgcaagtcgatctctccgggatcaggatgtcacgatggcaccctgcaatattaattaattgttgtgggatcgattggatttgtgagaaacctagatatattcatgctgcttttatttgtagctccagcgcgctagctaggttggaattggagtcaagcctgccgacttgatccgattcctagctggagttcagtgtactcaattcttggatagaaatctgtaatttaatcgagttcacccccaatctattttatctacgcatcaacgaagaataacctgcacgaaagggctgatcagcgatcagccgcgcgcgccctcccccgcgcgactggacacgcgtcgtgtgcggagaggggggcgcgggcagcacgcggtttctccttttttttttttgattttttagtgttttcttcttttctgtttttttttcttttcgtatctctttagtccggttttcttttctttttttcgcatgttttttctgtttttttcctttctgtatctttttcagttttttcggttttttaatatgcacgtatacaaattttatatgcatatatataaactttacatacgcgtatacaaagtttatatatgtgtacgtacgggatgcaaagtttgtatacgcgtatataaaatttgtatttgtacgtacgtataaaaacctaaaaaaaaacacgtatatgaactttatatatgtgtatataaactttgtatacgtgtatataaaattggtatacatacgtataaaaacccaaaaatacacatatacaaactttatatatgtgtatacaaactttatatatgtgtatacaaactttgtatacatgtatacaaaattggtatacgtacatataaaaacctaaaaatacacgtatataaagtttgtatttgtacgtatataaagtttgtatacatatgtattaaaaacagaaaaagatacgaaaagaaaaaaacaaaacgaaaggtacggtagaaaaacagaaaaaacaaaaaaaaaaaggaaaaagcggggcgctcacaggaaagaaaagagaaaccgaaaaaaaagggaaaacgcgagagcgatgcgccgtccgccgccctatatacatgcagtagttagagaggagagactagaaggggttagaattgatcgcgcaccggtaaagagacacgatatattgatcgtccattagggctcccctaacctgcaaggcccagccgttcgtgcacaaacctatatgtatcgtaaacagcagtagctatagcaagttcggttctaccctttcctaacttctattcatttttcgtgtgtatggtttccaaactgctaaacgatattttttttcttaaaaaaaataatagaaaattttgtttaaaaattatatttttaattttttaagctaatacttaattgattatacaattaattatgagttaatgagtagctctgtttcgcatactcggaggaagagtttctaaccattacctatgtaccttcgaacacacctgacggagctcgtggctcctcaccgggagaccgcgcaggcccccctttgccagttcggccgggggcttagggtgaaatctcaagctctcactctctctgtatgtggaaatatcgtatgccagccagaaaacacgagacaccgacgatctatacaggttcgggccgctgagaagcgtaataccctactcctgtgttttggtggatctgcgtatgaatgagctacaagtgtgagctgacttcacccccgttctaagctcataatctgggaaagaatcaaccccctctctatgggcaaggtcctccttttatacttcaaggggataccacatgcacccttctctttccaaactggactgttctttttctcttgaatgggcggagatcagcacggttgctgtccgaatgacgctccgatgggacagcccacacctacctccacttccgccgggggtgagcgcgtcgtgggaacatggctgtgcgctgacgatatggtaagtgtcagaccggtcacaaatcggtcattcttgtccaccgcgtgtaatcttggcaacgtgcatgtttgcccttcttcacacaacatcttgcctgtaatggttaagatgaagcctggcatatatcgaccgggtctaacgtgtcatctctaagagataacacgcttaacgccggcttgagacgagtgactagaggctttcgtcttgacgggatggggcatggcgtgcgtcagaccgccagtcgccacctaacccgtgatctgaccggtctgtgactggtcacagaccggataaagggacgcgccgtgccgcactgcatgcagcgtgacacgcttgaccagactgcaataaatgctgttaggtgagcacagctgtgctcacttatcccatatacgtggcgcagacttcctaaagggggtcggggtgccccngccctcnnngccncngcaagcgcaacccgacccccccctcgggggaaatcaggaggagggcggacacctcaccctcgggcccgacgtccccgaaggtgccaggccacgtgggcgattgtgtctgcctcaagcctctagtcatgatactcccggtcccatatcaccgacagtagcccccggcgttatgccagagcaatttcccttcccaagggaagcggtcaggtgtgacgccactcctaaagcctggtgacaggtgggaccggtctgcatagttgggcaaaatccccaacggtcccagtccatgcacattggtattggtaactttggttgtccataatgggcggtctattcaagactgccacatcacttgagcagcgcgcgaatctgggtgagcagatttgtctcgcccggagatacggtaacgccgcttcggttggcgagcgtaattaacgcgcgcacgatacaatccgtttcgattgccacaaccgcatatccacttcaagcgccgtaagtgggcgaatgggattagtggaagcgtgggcacgggaaacgagggagcaagatagcgagatacgagggagcgaggtagtgggcgcgagaaacgaggagccaggcccagcgatggcaagggtataaaagcatcgagaaaaggatttgctcccttcctttcgccattgttcctcttgccttcgctgcctgagctctaactctttctctaccacgccctactttcgccacacgcgctcgttcccaatcatctcttcctccaccgccatggcacggggctctgctctgctcgacggcagtgtactgccgccttcccgcatcgtgaatgagaggcacgccggactgccgcgccgcttcatgccggagtccgccaccggtcgggagattgtgatgctgggcgaggggcgcccggcaccagactacccggggcggtccatcttcttcctccccttcgcaatggctgggctggtcccgccattttctcatttcttcatggatgtcctggagttctacgatctccagatggcgcacctcacccccaatgcggtgatgacattggccatcttcgcacacctgtgcgagatgttcattggggtgcgcccctctcttcagctgttccggtggttcttcaccgtgcagtcggtgtcaccgccatcggtggttggcggctgctacttccagccacgggggccggtgttgaaccgctacatcccctgcgtcctccgcaagaagtgggacgactggaagagcgactggttctacacccccctcgccgacgaagcgcgcctccgacttccgagccagcccccggcgcaggtctccagctggcgggcgccggtagatctgggggaggagtacgacgccgtcctcgaccgcctggcgggcctgcgatcccaggggctcaccggggccatggtgtacggcgattacctccgtcggcggattgcgccgctccaacggcgcgcccggagcgcctgggagtacactgggcctgaagactacatgcggacccaccagggagccagatgtgattgggctcctgaggacttcaagatcgtagtccaaagggtgctgaatcttagctccgcggaggcgtctcgccttcctcaggagatcctccccctctgcatcgatcccgaccgcgtctccattctaaccattatgctgggggtcggggcctcagaggagagagcccctaagggccacgacggcgcgggcgagagccgcccggggaaaaaatctgccccaggagggggtcgtgcttctgggccccgcgtcgggggctcggggagcagccgccctgccgacgccccggggaagaggaagctgggaggaatacctcccccatctcctccccgagggggcggggcagtgcgtaccagcggtcggcgcccggagggggctgcgccgacgtcacagcccgagggggagcgcaagaagaagcggctccgcaagatgggggagacggaaccagcccggggaaacctaatttcccctccaaggtggtcattcaaccgaccccctcgcaggttcgtctcattctcattgcgaccacctttctcccaaagagaagttttttcttactcattttgttcgtcttttggttttttcttctgcttcagcgatgtcccgtcgcattcctcccgccgccccaagtccggccagtccgaggtcgaagatccagcggccgcagaggagcggaggcgggagtctgaccggcgtgaagccgcagcccgccttcgggaagctgaagaggccgcccgggaggccgcccgggttcgccaagcggaggaggctgctcgggaggaggccgcccgggctcgccaagccgaagaagctgcccaggaggaggccgcccgggctcgccaggctgaagcggcagctgctgctggcgcgtcactcgggcccactccctcgggcggccctcaggcgacatcctccgaggcggctcgcgacgaggccgcgggcgcgtcgcctgggcctacctcaccgggcgacgcccaggaccaaacgggcccgggggacatccccgagcccagcgcatcctccggggggccaagccgcgtcgccttttctccaaggcggcttttctcctcttctctcgtcgccccagtgagcgccgagcccattatgcaggccttggccgccgcaaacaccgcggtgctagatggatttagcgcccaggtggaggccttgcgagcggaacgagcggagctcgaggccgcatgggcgcgtgtcgaggaggggcggcgctcggtggacgccatggtggaggtgggccgtaaggcccaccgccgccacatctcggagctcgaagcccgcaaggcggcgctggcggagatcgcccgggaggtggaggaggagcgagaggccgccctcgtcgccaccaccgcgatggtcgaggtgcaagacaccctccgtcttcagcacgcaagctgggaggcggagctgaagagcaagctcgacgccgcccaaggggttctcgactccgccgctgcccgagagcggcgggcaacggaagccgaagcggcgtcccggcggcgcgaggaggcccttgaggcccgtgccatggcgctggaagaacatgccggcgccgtggagaggggcttgatggaccgcgaggccaccactgctctccgggaggcgacgctggcggcgcacgaggccgcctgcgccgaggaggagtccgcgctccgccttcgcgaggatgcactcgccgagcgggagcgggctctcgaggaggccgaggccacgacgcgacggctggcggacagcctctccctccgcgaggcggcgcaagaggagcaggcgcgccgcaaccttgaaagcgtccgcgccgagagagccgcgctggagcagcgggctgctaacctcgaggcacgggagaaagagctggccgcgggggcgcgcatcggtggggcggctgcgggcgaaagcgacttagccgctcgcctcgcggctgccgaacacaccgtcgctgacatgcagcgcgcgctggactcctccaccggggaggccgaggcccttcgcttggcgggcgagattgggcccggcatgctttgggacgcggtctcccgcatgaagcgcgccggtcggcaagcaggcctctggggaggccagacgacggtgccccccaccaatctggaaggcctcgcaccgcacctcaacaggatggcttgggttctcgagcgactccccgaggagctcgagaagaccattaaggcatcctcgagggacctcgcccggggggcggtcgaactcgtgctggcgagttaccaggcccgggatcccaacttctccccatggatggcgctggaggagttccctcccgggaccgaggacgaggcgcgcgcgcgggtcggggatgctgctgaccacatcgtcaacggcttcgagggctcggcccctcggcttgcgttcgcccccagctccgacgaggaaggcgacaccagcagcgaggacggcggtggcgacgaggccggcgacccgggcgcatatgaatgagcccccaggcccccgccactcttatcttttttcttgttctttcttctaaggccttcatgcctcttttttgtacaattttaacttaatctgcaatgagaaatgatgaaaaatttttgtgttagttttattttgctatatatatgagttgaggatgatctgtgccatggtccttttgcgacttagcttggaataagggctcgcgcccaagtcccggtcctcgaatggctcgggtcggggctagtgcctggggagatccgcatgtcgagactggccaggccgggaacgtggtgaccgaggggtatgggtgacccgattgtgggtttttgccgattcccccccggagttcaccacgccccggggcacggctcggttctgggccccgtttggcgattttagccgaccgaaccgagcccccgagggcaaggttgagcacgagtgacattatttcaagtcaagattcttcaaaaggaaaaaacggcacagacacaacctttaggaaattgaaactgcttctattgaaatgctgaaaggaatatatatgcatgtgtggtagcccccggctaaccctgcacacccgaggggggggtgcggggttagcccgagccaaaacctgacacccgaccccccccttcaggggtagaagcgacgaaggtgttcgatgttccatgggtttggcagctccgtgccgtcgcccgtggccagccgtaccgagcccggccgggggacaccgatcactcgatacggaccctcccacattggtgagagtttgctcaatccagcacgcgtttggacgcggcgtaggacgaggtcgtcgacgcagagtgatcgggcccggacgtggcgctgatggtagcgccgcaggctctgctggtagcgcgcagctcggagggccgcgcgccgccttcgctcttccaagtagtcgaggtcatctctacgaagctgatcttgatcagcctcgcagtacatggtggcccgaggagacctcagggtgagctcagatgggagaaccgcttctgcgccgtagacgaggaagaaaggcgtttccccggtcgctcggctcggtgtggttcggttcgcccagagcaccgctggcaactcctcgatccatgaatcgccgtgcttcttgagaatattgaaggtcttggttttaaggcctttgaggatttctgcattggcgcgctccacttggccattgcttctggggtgggcaggtgaggcgaagcagagcttgatgcccatgtcttcgcagtagtcgccgaagagctcactagtgaattgggtgccattatccgtaataatacggttaggcactccaaaacgggccgtgatgcccttaataaatttaagagcagagtgcttatcgatcttgacaaccggataagcctcgggccacttagtgaacttgtcgatcgcaacatacagatactcaaacccgcccggggcccgtttgaacggtcccaggatatcaagcccccagacagcaaatggccatgacagtggtatgatctgcagggcctgggccggctgatgaatttgcttggcgtggaactgacacgctctgcatcgccggaccagatcgactgcgtcattgagagctgtcggccaataaaatccttgacgaaaggccttgccaaccagggtgcgcgaggcagaatgggctccgcactcgccctcatggatgtcagcaagaagctcaacgccttgttcctgaggaatgcacttcaggaggattccattagccgcgcgccgatagagggtcccttctaccagcacatagcgtttggaaatgcgttgtacgcgttcactcccttcgcggtcctcaggtagagtcttatctgtgaggtatgtttggatctcagagatccaagcaatcaatctaagggagcttggaacgctctcttcgggtcccgaggcctggactccgacgggcctcgggtgccggtcaggcgcatccgtctcccctaaggggtcgggtcgcgccgacggctgggtaagcctttcttcaaaggcgcctggtggggtctgggctcgcgaggacgcgagccttgagagttcatcggcaatcatattatcccgtctgggcacatgccgaagctctatcccgtcaaaatggcgctccatacgccgcacttggcgtacgtaggcgtccatctgtgggtcagagcaccggtactccttacagacctggttaacgactagctgggagtcgcctaataccaagaggcggcggatccccagtccagccgccactctgagtccggcaaggagtccctcgtactctgccatattgttagtcgctcgaaagtcgagacggaccaaatatctgaggacgtctccgttcggagaggtcaacgtgacccctgcaccggcgccctgaagagacagagaaccgtcgaattgcatcacccagtgggcggcgtgaggcagctgtgaggggttcgcgctggcctcgggcattgagacggtctctggagccggggtccactctgccacaaaatcggcgagggcctggctcttgatagcgtggcgtggttcaaagtgcagatcgaactcagaaagctcgattgcccattttaccactcgtcctgtaccctctcgattatgcaagatttgaccgagggggtaagacgtaaccacagtgacccgatgcgcctggaaataatggcgcagtttccttgaggccatcagaatagcgtaaagcatcttctgggcctgtgggtatcgggtcttggcgtcccggagggcctcactaacaaagtagacaggccgctgcacctttcggcggggccgatcctcctcgttaggggccgtacccccggggcgttcttcgtccaagtggcccctcggggcgcactcgtcttctgcgctgatgacctcggggtcggaggatgacaggagcggccctcccacagtggcctcggggccgtcctgggggtcggggactcctggcatcgtcggacaagcgggcaaagggccaactccggtcgtcaggggcctctggcctccgttcggctcgggggcctcttctccctgctctttcccgggttgagtcagcacagggttagcctcggggccaaagggctttaagtgcagccttccctcagtggcctcggggccttcctgagggtcgggggcacccagcaccgtttgacaagcgggtggagggccgactccggtcgtcgggggccttaggccaccgttcgactcgggggcctctcctccctgcctgctctcgggccaagtcggcacagagcgggggtgcgcagaatgaggattgtcctcatcgcgctccacaaccaacgctgcactaactacttggggggtcgccgctaagtaaagtagcagggactcatttggctccggggcgactagaaccggaggagagctaagatacgccttcaactgggcgagggcattttcagcttcctccgtccaagtgaacggccccgagcgcttgaggagcttaaacaagggtagcgccttctctcccagccttgatatgaaacgacttagggcggccatgcaaccggtgacgcattgcacgtccctaagtttgctgggggggcgcatccgctcgatagctcgaatcttctcggggttggcctcaatgcctcgggcagagaccaagaacccgagaagcttacccgcaggtacaccaaacacacacttatcggggttcagttttatgcgggcggagcggagattctcaaaagtttccgctagatctgaaagtaagatctcttggttgcgcgtttttacaaccaagtcatcgacatacgcctcaacattacgtcctatttgactacccaaagaaattcgagtagtacgctgaaaagtaggacctgcattctttaacccgaagggcattgatgtataacaataggttcctacgggggtaatgaacgcagttttttcctcatcctccctagccatgcgaatctgatggtaaccagagtatgcatctagaaaacacaaaaggtcgcaccccgcagtggagtcgacgatctgatctatgcgaggcagggggtaaggatccttaggacatgccttgttaaggtcggtgtagtcgatgcacatccgaagcttgccgttcgccttgggaacgaccaccgggttcgccagccactccgggtggatgacctcacgaatgaacccggcctccaaaagtctagccacctcctcgcggatgaaagcttgacgttccggggcttgccgccgcactttctgccggaccggccttgcgcccggccgcacggcgagacggtgctcaatcacctccctggggaccccgggcatgtccgctggtctccatgcgaagacgtcagcgtttgcccgcaggaaggagacgagcgcgtcttcctatttgccatccagaaaaccaccgatccgtgtggtcttggatgggccgtcgcccaaggcaacctccttgaccgggacctcgtcgcaagtggccatccgctgcctcggggcggtgggggcagaagggccaagcctctcgtcaccaccctcgggcttggacgcagcagcgaggcggtccgcgcgctgctcaatgcaagcaagcgcgactttaaggtcgccacggacagagatggggccaccggggcccgacatcttcatctggaggtaggcgtagtggaccgccgccatgaacttcaccaacgcgggtctccctaggaccgcgttgtagggcagactgaggtccgccacatcgaagctcacccgctccgtgcggaagttggcgggtccaccgaaggtgaccggtaggtcaatgtgacctaatggccacgtgtgccccggcgtcacaccgatgatcggttgagacggctggagcaccatccccggggccttgatagcatcaaaggccgcgggggaaaggatgttgagagccgctcctccatctatgaggacacgtcccaacttcacgttgcagatggtgggggaaaccaccatcgcaacctgccctccccgggcaatgcacggtgggtggtcagtctggtcgaaagtgagagcgacctccgaccaccgcgcccgacgcatcgcctcatgggtaggggccatggccagaagctctcttttcatagccttgaagctccggcgagagacgtgagcacacgctcctccatcgacggtggcaatggtggccccaggttcttggaaacctaggtcatcatcaccatcatcgatgtcaacagcgggggccttctgcttggcctcacctcgccgtttgccggatggaaccaccggggacttgccctcacggcgttcctgcctcctgtcctcctcccacttcctcgttcgctcagccaggtttttgactgcacgacagtccgcgagatcgtggagggaggtgttgtggacggagcaccacctgccggcggggcgctccctgccgggagttccggcctctttctttttgtcgctcgcaggcctcccctttcgggtggcccgcggagcgccctcgacggcgaggacatgaccctcgtcgccggaacggttcgacctcttcttcctcctcctatcacgccgccctgtctgagcggcggatccgggggcggccgaagctgccactccggaaccggaggagttccaggtccacgcttcctccttacgagccactcggtccgcgagctgaaaaagctccgcggtagtctggggctctttggaagcgatcttttcgagcatgcggttgtgccgcacgccccccctgaacgcgtagatcaccgcgtgtgcagggatgcatggtatagtattgcggacttggcaaaaccgctgaatgtacgagcgaagcgactcatcatcgcctcgctgtactgcatgcaagtccgcttcttcgcctgggcgcggatatgtgccttggaagttcatggtgaactgttggcacaaatcttcccaggagtggaccgacgcgggtggcaggttcattagccaaccccgcgcctgtccttttagggccatgggaaagaagttcgccatgaccctgtcgtcacccccagcggcctcaatcccggtcgtatagacctggagaaactcggtggggttgacgctcccatcgtacttctcggtgatggtgggccggaaccttgggggccaacggacgttccgaagactcgccacaaaggctctacagccaacaccaccggccgggggcacggagggctgatcttcacgtccatgtcggggtgacactctggacgaggaggctccctccgttgcacggggagtacgccggctattacaccggcgcccgatgttgaggcgggcatccggctccccatgctgatcctcccgagtcgacggtgtagacgagggagtggcagccgaatgacgtgcagccgccgccgctcgccgcgccctccgccttgatgacacggagccggtggtagcggcgccggaggtcttggtggtggtggcggaccgtccaccagcacccaggcgctgctgtgccgtcatgaccaagttggccacgtcttccagccatcgttgggctggagactccgggtcatggacgacaggcgggtgtcgtaggagcgcgccagcagcttgaagcgcaccctgaggcgtgctgccgtcgccgtagacgaggaggcgacgctccccgtctcgccgttctcctgcatcacctgcggccggtgacgctgcggacttgtcgaccctctcaagcgcctccccctgcttagggctttggcgcggagggggtggaggagtacgagctcgacggcgtggattcggctccccgtcgtcgccgctcacactcggcgagaggtcgtgcgtttttccttgctcggccattaggctgaacaagaaaaacttggggcacacggaagagtctgagagctctgaaagcacacgctgagccccctacctggcgcgccagatgacggagctcgtggctcctcaccgggagaccgcgcaggcccccctttgccagttcggccgggggcttagggtgaaatctcaagctctcactctctctgtatgtggaaatatcgtatgccagccagaaaacacgagacaccgacgatctatacaggttcgggccgctgagaagcgtaataccctactcctgtgttttggtggatctgcgtatgaatgagctacaagtgtgagctgacttcacccccgttctaagctcataatctgggaaagaatcaaccccctctctatgggcaaggtcctccttttatacttcaaggggataccacatgcacccttctctttccaaactggactgttctttttctcttgaatgggcggagatcagcacggttgctgtccgaatgacgctccgatgggacagcccacacctacctccacttccgccgggggtgagcgcgtcgtgggaacatggctgtgcgcgacggatagggtaagtgtcaggaccgggtccacaaatcgggtcccattctgtgtcccccggcggtggtaatctgtggcaagcggtggcatggtttggcccttcttccacacaacatcttgcctgtaatggttaagatgaagcctggcatatatcgaccgggtctaacctggcattttttaaaaaaaacccccctaaaccccggttggaaacaagggactagaggctttcgtcttgacgggatggggcatggcgtgcgtcagaccgccagtcgccacctaacccgtgatctgaccggtctgtgactggtcacagaccggataaagggacgcgccgtgccgcactgcatgcagcgtgacacgcttgaccagactgcaataaatgctgttaggtgagcacagctgtgctcacttatcccatatacgtggcgcagacttcctaaagggggtcggggtgccccggccctcggggccagggcaagcgcaacccgaccccccccccccctcgggggaaatcaggaggagggcggacacctcaccctcgggcccgacgtccccgaaggtgccaggccacgtgggcgattgtgtctgcctcaagcctctagtcatgatactcccggtcccatatcaccgacaacacccttagaacaaatacaataaaaatgtttaagctaacgataaaactatccagctcagcattatctcatgtggaggatagagaggagatgtgagagagaggagcaggtagttatgcaagagactgtattggcacaaactcctactccctccataaaaaaagccaacctagaacttgaatgggacataatctagtacaacgaatctgaacagacctcttttatcctccagtcccacagtcgattttcttaacatttctatttctattttaaaaataaactgttctaaaatttatttttatatctaagtcttttggtcacaccagtacaccaattggactagcatgacaaaacaatgcttctaccttgtccaacataaaattgtcacgtctctttatttttgtcatgccctctatgatatggtgcggtcgaaaagttaatatgttttggagggcttattttacaaataaaatattagaaacgttgaaacaatataataaaagttccgcacaatcccacatatccgatgatgcaggcagcaatagtgtgggtcagggtttaccaaacagattagggtgagggtgaggttatcgctacctcgcggtttggtggttaccacggtaaccatacggttatcacgagatataccgtggtttcaaaactgaaaaagttaccacacgtaataaccgtgcaataaccatacagtctggtaaaccctagtgtgggcgcgattgaccggtcgagcagagctgtaaacagacgtcatctacttctaatagcctgtttgcttgcttgttgtttaccgttgcgttatgatgttgttggttgcagctgtggcagcttatctgcattgatatgtgggttttgatgtatgactatcactaactttatcatcacacagaagtgcccttttgatacacgttgggggacaatgtttagtggatttaaaggagtaatttaaaatagaaattgaggtaacttcgttctttcttatgctattatagaagtaacttatagttaacaagttttcaataactttttcttcatatgaaagtagtaacatttaattcaactgatttggaactaaggcctggtttagttcctaattttttttccaaaaacaatagacatatgtatggagcattaaatatagattacaaacgctaattgcagagttagggaggaaatcgtgagacgaatctttggaatctaattagtccatgattagtcataagtggtatagtaatccacatgtgctaatgacagattaattaggctcaaaagatttatctcgcgatttccaggcgagttatgaaattagtttttttattcatgttcaaaaaccccttccggcatctgatcaaacatccgatgtgacaccctaaaaaaaattttcgtgaactaaactgggcctaactagacacaaacttgacgaatcgcaatttctgcagcttcacaatttcccaatgttcagggctataaatgcaagtttcagttcatgggagtaaattttagaaataagacaaacttcacaagttgaaattcctgcacaaactatttgatgtgccccagcccccgtcacatgatgatgagcacatcccttgctacaattgacgtaaacaagggtgatggtttacgtcatacatcacatgaagaaaatgaagatgacgtaaaccaacttgatggattacgtctcagtaagaacgatcaagcatctcatggtccaattatgcgcagccgtgctaggaagatacaataagaggtgaactcgctctttgcttaacttaacctaaattttagtgagaattttatactacataaatgctctacatttgtattgctaaggtttacgcccgaggacatcatcactacgcaaagaaggatgtgttacgttgaagactacaagggttacgtcgagcaggaatcagcccatgcccaaccagtagctgtctacgccagcaagaagattgtttacgctgcaaaaggctcaacttccaaggcttgtgcgacccaaccaatcatatttctccatgcttaatatatatggttggaaagataatcaagtctagtttcaccttcaacaaatggcttatcatttcgacttcctaataaggagttatggacaaatcattgagtactgctcagaagccaaacagacgcataagtcttctcgggaattcatttattgtgaccttcgagctagcctatatactgtaaactcccaagacctttcattctcatctagaagggttgttcctagtataaatatctcctatgttttatcatttgaaagacttttgacaatgaaaatatgaaccccttttgtttagttgtgtgctaataaattcaaagagagatctatacccctttgctcttgtgatttccttgtgagattacagaagcggcattcaacgcctcccaattgatgctcctggtcccttcgaggtttttccttggttgattgcaggttgtgttggttggtaacttaaagtgtggttaggcgaaccctcgattcaggttgccgtaatagagatggtggttggcttcgagtacgatcgccagctgacactattatcttggctgcttgcagctagttatcttggtctctttgaggctagttatcggttcttgatcctacgccgtgaagatcgtgacatcacccctaccaggatcgtatcactattttttcagactgaccgtagacagaccgaagtacaaaacttcaaaacatgaacgcagttagactgaagtaaaaataaaaaacaaaaacaattctttcagtagatttaatgtaaacatgaatgtagtcctgaagtaccaaaaagaatcaaaataaaattttaaacattgaaataaatctttgctgctcaaaacatgaactcagtcggagtgactgaatgaaaaaaaattaaaaaaatagtagatttaatgaaaacttgtgaagtaaaaaaataaaaaaaaatattcaaaagtttgactgaatgaaaaaaaattaaaaaaaagtagatttattgtaaacatgaatatagtcctgaagtaccaaaaagaatcaaaataaaattttaaacattgaaataaatctttgctgctcaaaacatgaactcagtcggagtgactgaatgaaaaaaaaaatagtagatttaatgaaaacttgtgaagtaaaaaaataaaaaaaatattcaaaagtttgactgaatgaaaaaaaataaaaaatagtagatttaatgaaaactcgtgaagtaaaaaatattaaaaaatattcaaaagtaaaaaaaaaataaaaacatttttttttgctggctgtggggttcgaacccacgcgcactcatgtgcagaagatcttaagtcttcccccttaaccactcgggcaaaccagctgaatgcttattaatttcggttgttgagtataatcctatataaaaatccaagccacagtcgacacatcactagtttacatttcagccatatgctgtattccactttcttcgatcggtaccttatcatatcgtattgcaaagaagaaactgttgttcctcaagaaaagaataattatatcacatgatatttttttatctggaaggaagaaagatcattttcattgcaaaaatgattcggccttttctgatatcacataataataataattgtacacctcagtttaataatcctaaagaattttgaaccctataatatttacgaaccagaacacccccaggccccaccccaaaaaaaggtttcataattatttgttttaaaactgaacaatatacaagattgaaatgataaaaaagccctcctataaaaatacatgtggcgtggctaacccttctaagctaactcattcttttggctattgttcttgatactcacttatttttaagattaatttgatctataccattataaatatgtcataatagaaaaataccattacaattcgcgatatcaactgttgtgtgccattgaaattttctataattggaaccatgccactcccgatactctttgtcatcctctctctcgtcgccattcttaccgttgcctcccaacaccgaagtcgaagctctcgtccccaccatcggagtcgaagctctcgtcgctggaaccctataccgccatcgtcgctagagctctcattgtcgatgcctccgtcagcggggaaggaggaggatgcagttgcagctccatcggcaaggagtggggtggtgctagtgcatgaagttgaggggagaccaacctgaggtcgccgtcggaggtgaagcagcttcgaggctcggttgtcgtgttctccaccctcctctccatgcgtcgtaagccgcctaacttgaggtcgtcgcgcggaggtaaagatctgggacggccaagctccaactcctccctctgcttcgatggccggccgtcatctccttcgttctcctttctgtgcgtcggaagccgtctcctctaaagtggatccggtaagccaggggatgatggtgacacacggcaaccagatcctcccgccttgaccctgagggcagtggatctagccacccccgtccatgacgctagctacctccttgtctccctctccgccccaagtgccaaccatcgactttgtcccccgacaccgccttcacccatgagcactcgccggtgctgtctccgtcctcgacgatgaggatggcgatgagtaggagcaggagtaggaggcacacagccgtacggagcctaacctcgtggtgctcacctttgcattcgaccccgctcgccccatcctccgctccaccctgcaacagctcaatatagaagaaaaagaaaagaaggaagaagaggcaggatgacagggagaacaaatgggagttgacgacagtaacagaaaattagatgagagtggacgggagtggcatgatttcaattttaaaaaattttagtggcatccagccgataacacgaaatataatgaatttttcaatatggtatatttgtaatagcatatgatctaattaagagtttggattatttttatggccctctgtcattttcaatgtatttataagtgcaagatttttttaaaagaaattatagagatgttggaagtaacatatatgtcttgctttgaagagtacatgaatattacggttgattatttatctaatcatatatatagaaccacgatcatatacattatcttcctagcaacatgtgacgcgttttttttataatggaatagaacatcctgacctttgctcaaagagttacagtaaattattacaatctcgcactcaaaatgagaggagtttaaagtgtggggattatggataccccatatctatacggcatatatagtccgactgggtacggggtaccagatataaatagaatatctttaagaggactcgggttaggttctaaacttgtatgtcaaggaaatatccgggatcctagtcggttacgattgtattttatctgtaatcacatattccgttagggatatggactgtattttgtaatacggaccccttcccctatataaggaggggtccgggtccctctggggacacgattttctcccagatcatacgatcaataatacactcggcggatcaatccccggacaggagtagggtattacttcttgattaagaaggcctgaacctgtataaaattccttgtctccaaacccatccacttttctagcttgatagccaccctcttttagtattgccgaaatcttgtttcaacataaagaaatttaaaagacgaaaccaaccatcaagaagaaacaaactaaagactgttaaccccaaataaagagtacacaattattgaattctgtttgtgagcctccatccaaaattgacaaaaagttacataaccgttgactcaagaatatgacatgcatcctacatgtgacgtatttgccacatcacatgccttgtcatgtttgtaatcaccaatagaaaataatacatgtgccacttagaactctactccctccatcccaaaataagacaacctactctgtccaaaaaagacaacttagtaataggatgtccagattcattgtcacaagctagtactaggtagcttttttttttgacggaggtgttcatttgaccatttcatagcttatatgacttggggcctgtttagatcccaccctaaaattttacaccctgtcacatcaaacgtttgaacacttgcatgaagtattaaatataggttttaaaaaataactgattgcacagattgcgattactttgtgttaatgaccaaatttggtaatatcagtatcggggatgaagattagatcgaagcggaatcgaagatgaagatcgtttcagaaacagagtaagaatcggctggagtccaaatcggctacgaccagggtcggttgagttcgagtcagactggataagccgatacagccgattccgacaatatgactcggtatatatcatcgggttgagttaatgtgcttcacgtggattgccacacatggattgagtcctaagaaggcaattgtatctattaattaagatattttatgtaatttccttagagataagtgtgggcaaaagtctgccgcaaagacttatggtatttagagttttttagagataatagtcgtgtccgatatggacatatcttgtaatcctcgggtataaatagacccgaacctcatgtaatcaaactaacacacgttcaatacaatctcggcggatcgccacccttttcatacttatagctgcatcagttgagtttgatcttatgagtcgtaattagaatctcaatctctagtctgccttttggttgccgattagggtagcgtcggagtttcagccgatcttacctgatttaaccatatttatttcatatgcttgattgacacgttaaaatctgccctttatgctaagatcttgccgcaattaagtatattaggcttttgtttagtatattctacttgctttaacatcttagtatagagtggtatcggagtattagccgatacatgctagatctatctgatcggctatgctatgaacgtgtatagcctcgttattaatatatatttcgatctaagtgatttatactgtctcggcatgacgatcgatctatcccaatcacttgatttaagtatatatcgatatagggattatatattgttaatatctacagccgatcgagtagatttagttcgttcatatttaataatgactgtcgatcgatgtagatatgacatcggctcaaagataaatgatatgtcatcggcacttagccgatcggctatcgtttattgatttaatcgcagtttctttgtctttgtttcttgttgattgcaggatcaaatcaactggcacgctagcatacctgaaggcgagttttggacctgcactagagttaagaagatctcccaggcctcgtgttttacatcaacactttgtgagaaatcttttaagcctaattgctccatgatttgataatatggtgctacagtaaatatatactaatgatagataattaggcttaataaattcgtcctgcggtttagttttttttataagggtccgaacaccccatgcaacaccctatataatacccgatgcgacacaccaaaactttacacccctaaatctaaatacccccttagactactatag

SEQ ID NO: 9893 - DNA, 8078 bp, Oryza sativa
agcaaccttcgcaaacttagcatcagtgttagcaagaaactgaagcgtgcagaagatgagctgaaagtgcttgccaattttgccagtctcgcatcactgaagattacatggggaatggtatctccacgagatgctgccgacgaatcagatgctgcaaaatttaaccttgttcttccctctaatctttcaaagctggatctctactgcttcccgtcgagacaatttgggacgattagttctgacagtttaaagaaactgtattttactggtgggaagttgcatagtctggaaattcagaatggggagtgcaaagtagaggtgctgcgcttgagatgcctcaaggatctgcagttttgttgggaggaattgcgtgaactgtatccaatgctggagtttgtcgaagctcagcactgctcaggagtagctaattggccgctagacaacaataaagtatggacgaaggatgctgaaaccagtaatgctgcttctgcacagtctgaagaaccaactgcgcctgatgtttgtcctgaaattgtggaagagggataaaagcaaaaacatagttaagccggtgtgtttttttagagagaactgccggtgtgtaagttaagccatgcaaggtgacttttaaaaaactagctgggtggtccgcgcaattctgcggctagcacccaaacaaaatcatatatttttttagtatgattttacttaaaatttattaaatatctatgtcgttgtcttaagattttgaaaatccaaatcttatcatccctatatttctaattatatagtttttaaaagtcacaccagttgctaccctttacttctgtcatatgcttctttatttgcttgctcaatctaccactatttctatttattctccctgaaacctttaaaaattgaattttgtagtttttagagtttaatgttttgttgggtttcatttttataatttctagaagtcccgtcaaacgctgccattatactcctctatggcccgtccactgtcttttctctttattgtcattgggattttaaaaataaaacataattatcgttcgggttcattttttactttatagaagtcccgccaaaccgtcagcggctttgccattgtactcctttgtggctcacctgctgccttccttctttattgtcaccaagattttaaaatcgaacatgattatcattgggtttttttattttttgaaagttccgaacctttaaaaattggtccttatagtttttagagtttattgtcttgttgggttttattttttataatttttataagtcccgtcaaacgatgccactatactcctccacgacccatccgccgcctactctttattgtcattgggattctaaaagtcgaacataattatcattagaattcattttttattttttattttctagaagtctcgccaaccgtcagcggctctgcaactacactcctatacaccccgtctgctgcttctccttttgattgccattgagattttaaatatcgaatattattatcaatgggatttatttatttttaatttctagaagtcccagcaaccgccttgcccgttagcttcacggtctgcctgtcgttcctccttttaatcgtcattaggattctattttgtgttttattaatagtttttgtatgtcgtatcaaccgccaccactctacttctttatagacctgttacttaatttatctcgtcatgtgttttagatgatctttttttttcaatagtctttattttttatcaccaatttttagttatttattgtattcctaattgaaatcttttttatttttctaatttcataatttattttttttatttttgaatttaagttgtttaaaaattgtattcctacttgaactctcttttagtttttctaattttggatattattttatttttcattctgaattttaattaatcttgtgttgggttcttatatggattcttctttcaatattgcttatttttaattccgaatttcggttaattttaaattgtattcctacttgaactcttcttttttttttgttgctaattttggattttatttttatttttactagcaatagtgcccgtgtgttgcaacgggaaaaacaccgtttgatggtgtgacaccttgaaaacctcaaatctgtaaaaatcaagtataatttgatatattaacaaataggtagaaccgagtctaatttgatcaattagcataggatttaggatttagttttagatttattttttgagcctacttagcagtttatccgacggactttaatttgaaaaatgtgagccacattgtttgatcaaatttgctttcggcccaagccttcccaagccggcccaaacttgggcttgcccatctttggcgagttgagtcaattcgacggcccacaagctgagcagctaagcgcgacctacatatgcggggacggtccgatgcacttccgcggcccattgggcgtagcataatcaatggcggcgacggcccgacgctgggcgaatctaagccgtccgatctaatggacggctccaatcgtccccgcgccgaatgaagcaccgaccggggagaggggcaaaaccctagctcccaaatccctctcatgatcccatttctctccggcgacgagcgagtggaatgacggtggtccggcaagctggtgcgcgcgtgcagcgacgaccgccgagcggctcctgcttcgccggctgggggacgcaaaaccgtgccacgacgtcggcggtccggctaggtgggcgtgcaaacggcgacgagcaccgagcagcctggacctcgtcgacggtaggggtgacgccaagctgacgcttcccgtcttcagcaaaggatggtggaggggtgctccaggacagcgtgcgcgcagggaacccgacacgactgcgaggaggtgaaggtgcggcggtgccgcttcctggaaagctccggtgagctctggggcttcaaatccggtaagtaacccgaacccttaacttaattgatttggatttgactcttatggttcttacccgaaattagagttcttcgaatttagagaattttgtcgggaaatttcaatctattttattccctctttacgagttaggggagtttcaatatcgtttaccctcttttaattttggaaacttcaatctagtttatccctttgctcaatttcgttttttttttgctttggctggcgtttcatcccgcgggtgaggacggagggcaccgctcgtcccctcggaaagattgagattaagataagataagattttcacggacgacggaagtaaattgaatcgaactttcttttatttgttctaatgttttttcgcccttttttcattattacggacaacagaaacattttaaatttttaagtagtagatatagataagatagagatatatagtaccgtgtcaaatataataggattcaattttttttaccgcgtcacatataattctttttttttttggaatcagacatatttgttttttatttctttcgctctttttttaccgcgtccacgcagattcatttttttttgctggtctttttttcacctggtttttttcgcccttttttaggaattggacagattccttttttatttcttttcgccctttttttaccttggaatcgggttcgtttttcttttccttttttttcccttttttgatcggacagatttggtttttctttttttttcacccggtttttttcgtccgtttttttcgcccgttttgttttggatcagacagatttttttcgcccgtttttttacggacgacggaagcacctcttatttttgttttggattagactgatttttttcgcccctttttttttacggacgacggaagaacctcttattttaagtagtagagatagagatagagattctgaatattaattaatctcgtattaggttcttatatcgactcttctcttaatattcctgatttttaattccgaatttcagttatttttaaattgtattcctacatggactctccttttcttttctaattttggattttattttatttttattctaaattttgattaatctcgtatcgggtttttatattgactcttctctcaatattgcttatttttaattctgaatttcagctatttttaaattgtatttttacttgaactctcattttctttttctctggttaatatgggaaattttagtcccccacagcgaacgtggtgcctcattttaaagctgtttaataatataatagattgaaaatataactttttttaagattttgcatttatatatatgtatgggaaagatttgcacaaatatatctctttacggcatgatgggcacgcgggagcgctacgtaattgcggcgtagccacgcgagacagtcggctgggtcgttcacgtaagatgagcgtgcggcaccgctttggtcccgtaggccagaattgcggcaccgcgtcaatgctgcggcctgggtgtgcggcaacgtggtggagggcgggaccatgtcggtcccgtggcatccatgcggtaccgccaggggcggacctaggattttgaaattaggtattcgaaatggaaaggggtaaaaaaaaaagttttacaacacaagcataatatttggtatgtatgatcaacagtatgatattttagtactgcttattgaattagaacttgcgtcaagattttcagcaattttcttgatttattgggatatactttatgaaaaaacatatgtagtacaatctaaaaaataaattgggttcagatattcacattaaacacattgggagaatgtagattgaacgggttacctattgaatcgaatcggaactgttcggcgaggcgatttggtaggggcagtagggggtgcagtggtgcaccgcgcgttgtgcggaagcggccgcggcagcgcgaccaacggtgccggaggcgtggggcgggccatatgacgagagagagagagagagggtttgaccgagcgagggaagggcgtccgcgacctgttgagggtgaggcctcgataggcgtcggcacgccgcgggctactccacatctgcgcgtgcacgacggcagcgcggcgttgcgttgatgagcaagacggagggacatgttgcgacttggaagttggaacaaccaacagcgaccagtggtggtctaggttgactttgccccttcttttgggctattgggcctacataatgagaagataagacaggtgggatgagggagccagtgtgctaggctttcttgttaggcttcttttgatcaatagtatttattttctttatttctctgcacagatacaaaatatatttttttaataatggaatgaaataacatcccgacctttactcaaaagagttacagccaattattacaaactagcactctgtaagagtgcagtccaaatgaaagcaaacacaccaaccaaaattaaaattaaaaggaaaccaataaagataaaataacattatttcagtgtattggtaaatctccatccatgattgacaaacagttgtataaccgtcgtttcaagcatacgacacacaacaattaggaattcttcatcttcatcatacttttgtaactgtgcccacagacgaagccaatatattgccttgaaaataacctgcatataagtaattgtaggtgatttgtcaaaaaccctatcatttctactcaaccacaaagcccaacacaagacagaagctccaacaagtatcagtttactctttttgtttacaactccctaaagccgatcatcaaaaatatgagatatgctagtaggaatatataaaccaaaagaaaactgaactgctctccaaataaactttgcaaaatgacattcaatgaacaaatgttggatatactcatttttcgtacaaaagcaacatcttaaattaccattcaaatttcgtcttgctaaattatccttggttaacacaactcccttaagcaaataccacataaagatcttgatcttaagcggcatcttaagtttccaaattaacttatttctgtcaatgtaaccattgttaattaaagctaagtacattgatctaactgaaaactggccattctgatgatagtttcatctaaaacagatacgaaatatatacctcatattgtattttttatctaaaaatcttgggtattcatctgaatactcttgaattgagctaggcccgtaccgcagcacagttgcgctgcacagagtaggaatccgcgctgtcaatacaatgctctcaaactttgagcaatcaagcacggtgaaaacgtcactcttttcgttcctctttcttgctcacctcacgccatataaggagaagagagtttgcaccagacgaggtgctcatgccataaaaaagagaagagaagagcttgaggaagagagaagaaatgaagaggtaatggtccaagccaagagggatataagtcgaagaaaatagaggtaaattttagtactttaattattatgaagtatagatttagcgatgatttatgtattagatgaaaatattaagtgttggataagtaataattaatgtagtgtgcatatattacatataaatagtttagttatgtgagaagtttagaatttttaggtactatgtatgttaggactcaagaaatattatagtatgaatgtagtagaaatataaaatggttttagtattatgtttcattatacataagacatgcataaattttattaatatataaaaccgtgtgaaaaattgtatatatgattaaaattttctttagttgtgtgtacgatttttgaacgagtaagagaaatgaggaaaatatatagtatgaataacaaactctatcagttatatagccgttgacctgaatcttattggtttcggttaggcccacaattccatatagaccgaaatagccaacgggtcattttaatctaatctatctgtattttatcttgttagttgtatgatcaaactaactaacacattctgaaatccataggacctatactaaagctaagcagaactcacacgcttccgtctgttcttttagattttacgtcaacaactgcacatcatttgtacaatatttttaacatgcatgtttctatcattttgatagtagcactactacttaagggcaagttctattaattaataggtaacaaatacaacatatcacatctaatacacaaacttcaatattggtttattaattctcacatcgtcttatattttcttaaagattgtgtggaggttgcctcttgtatgaggctggcacattctctctcttctaacttctctccttcatatcatcacctaatcctatgtgacatctttaggagcaacatgtagaggcttatagtacttgccctaacctatgtttattcagagcaaggccaataatacagccaactgcttactgtatagatttttatagcctatctctaagcttactcatatagtggttaacttttcagtataaatatatggtccacctgtctgtctcacagatttcggccacctcaataggggtggaaaaaaaagctcggattcatgagctcagcttgggcttggctcgagcttggttggcttggctcggctcgtaagccagacgagccaagtccaagcctcttatttagctcgttgttgaaatgagccgagcccgagctggctcgcgagccgcttattttggctcgcgaacctagaccatcatgtgtttatatcgattattttgcttttcatggagttattatttatcaactttaaatttatcattaagattttgaagaattgaatatataaacttatttaattttacatgtcgatgatttgctcttgcttttttgttaataattacaaaatatatatgaagagatgttttaacaggaaggcttgcaagccagctccagctggctcgagctaggaaacgagccgagctcaagttttagcttgtttccctaactgagccgagccaagccaagcctagcttgttgtgagccactgcaagccgagccgagccagtattcagcctacacctcagtattcagccttcttagggcaagtgt

SEQ ID NO: 9894 - DNA, 1120 bp, Oryza sativa
acccatgaattcaaaccccagagtccgcacatcctcaaatacaaagcacttccctagttagatgtaggttagacttcccgttcgagaaactctaccttctacctgccctcaatttatgcacgattaatgaatgccacctgggtggaagcgagaggtggaaatggaaggtcttagttcggaggtgggatctctacctgatagttgcattgccattcatgatgatcccctggcattcgtccattcagccattcaccattcacccattcaactggaattttggttgaatgccggaattgtgtccacaaattgtggatggatagttggttggctggctggatggctggctggatggctggctggatggatggtgaatggctggcggcggttcggttgctttgaagcatttgttgctatctaaattccatttaaggtcgtaccttatcgcccagcatcatcttattctctatttgtattccctccatctttcagatacggatgtagccttggatgtgcccgtgcccaatgaagaggaagagcgcaacatgaaacgtaagtacaaaagtaccggacacccacccagatcccaatagaatccgccaaatcctgcgggaaattgtaatcccattcaccagctcctacatttaattaacaagagaactattgtatttatctaacacctggattatctccacctttcatttgatccctatttatagattacgctgcgttgctaacgggccgcacctcctatttcctcaagggtgaggaaatgaagtccatgtacaccacctacaatccgcagaatgtggtggccaccgcccgtttcctgttccacaagaagaatctatactactccttctacacctcatcgcgaatcggtcgtccgcgtgccattcaattcgttgatgatgcgggtgtaatcctggaggagcatcaactggagaccaccttggcgggcactctcagtgtctatcagaatgccacgggcaagatctgcggtgtctggcgacgagttccacgtgattacaagcgcatcctgcgcgacgatcgtctccccgttgtcctcctctggggcaacaaacagcaggccgagttggctttggccggaaaggtggccaaa

SEQ ID NO: 9895 - DNA, 44246 bp, Oryza sativa
aatatatgcatgcatgcaactaatgattattaagatggctatttggattccagtcaacaatttaatttagcacatggagattacaaatatgaccatcctcatttagaaaaactaaaaaaatggaatatgcttaacacttttggatagagagagtatatatatagctttccaccaatttgtatggactatggattggcatattgtcaatctccattcttccaccctagattgttgcatgagacgctaagactaacatgtaaatgaaaaggaccatctaaaatttcttaagaataaccatacagctagcagaagatctatgtatttatatctttacaacatatttgatgttttgcaaaaaaaattgtgccacgcccttagagaaaaaaattcaagatgaaaacaatccaaaagaaagatatacatattaaaatatcaatttactatatcgtcttatattttagtcttcatttcatcaactgaaaaaccatgtttattttgagcccatttttctttctgttttatattattttttacacacatttcatcatgtaattcattcatgtactgttaatttgtactgccgtttcttcttggggtttcactattttcagtaccatctcatcctaacgaccaagctgtagatactagatgtgcatatggtttttttttttacgggtagatgtggatctctgatgagatcttcagtgtggaatagtatgcaactttggtattttcttcttgttgttttctttatgggttcaagtgcaaatagagttgaaacgttggatacaactcatgggcattttcggcactttcaatttggcatgacaacatcaccatgtggaggttaatgatacatctcccatagctattagtagggtgtttatgttaagatcacacgtcattttcttggagggaatgatgggtaaattactttttaaattactggtacaatttatctaggtacaagcaaatttctatatatgtatcatgcatatgcaagttttagccttcgagtaggtattaattaaggagaggggtcaaaatatatggcctcatcttttcgcttatgcttatacttatcggctaaaatttaaattttcaaccttaaatttgaagttgattttaaggttttttttcatcgtagtttatttttagccgttgcttttagatcgtaagaacacatatataaaagttttactcaaattatttttgtttgcaaatatatctgtcttcttagagtgagtaagatataggtctagactagttaggactataataaagataaaagataataggggtagtatggaaagttaatttaatggtaaaaatcaaatttataagtactaggttgttatatttgggataaattttaaactctataaattgttgtatttttttagaaggagtgagtagaattttttttttttgcttatgtactcttaaaaaaatttgtatttttttggtatttgatttgtaatgttattggggataattatcaacaactagctagaaggttaaacttgtttatataatgggaatggataagattatctccctacaaatatgaatagtatattatattttgtattaactctatattggggtgtttctccattccaagatatatctcccttttccaggtctatcttgatgtagtcactgacatatatgctaattaaggtctcggttatttgacgccatccgtatcctaagctaagactaggcaattagctacctattctttatgattgtgacatgagatttgtatacataaaacctgattaattagagccactacttcatgagaattgcctagaagcgtaagccgttaattttttttgtactttggaccttgatggatttcttattggaggccaacaggggcaaaaaggagacactcatgcctctgcatggggtgtgcttttcaacagcttctttgagaagtttatgctcacactgtataaagggcttttgatgtgtagaaaagttgctacagatgatctagagagcaccaagcatggagtaaacatatattgctaaaagaagatgctacaatatctgcataccaaaaaaaaaaaaaactaagtctgcaaaatgaccatgagctgaaaaatacaagtccatgatgaaacttttagaattacttttctccttttccataaaccccatacaaagagggatatatgattgtatatatgtatgtgcctatattatattagaacagaataggatcgagttgaaatttgttatgaattattctcacacatgttacttgctagtttgacttctgaatttttgtctaacattttttttggaagaaattaaatgtctagcaaatatatgtatgtgttagataatttttaagtgtacccacatgtatacttgtactaggtgtattattgatcaattcagatacttagctagctgtcctatcgctagttagaagtttgcatgagttgactttggatgagtctaattagactttgatctctggctagtttgttagttttggttgtgctcatgccagaggcagctagccctcttatttccagccgcaaattgagaggctcatttttttttttttaatcttttgaagacttaagagttaagactgattcatgtggctcagcaccaaatagtacaacacagcagaagaagtgttattctgacccttttagcaacttaaacttcttgataatcatttttgctcagttttcaagcataatcacacagtgagataacatttcattaaattggttaatatatttgcatctgatatagataattaataaatataaaatactaacatagctgtgacacagcaaaaagaaatcgcgcctacagaataagagtagtatgacaattgtacattctcaaatataagtaatagtgacaggagaattacatgagatgtgcttgcaagataattattatttttacaatgtcgcatctgaattttcgatatgcatttcgctcattatatataagagaagaacaagtgctagtaagtggtcctacggcatttgctttctaataagctgattaaccaaccttgctagcaaagtatcaccaaacgttggcagccataaaaacgtaaccagagaaacaaaatgaaatacagatttaattaaatcgaactctagaaaattaagatggataaacggatggaatggttatgctgggcctttactgggctcacttatcaacgacatgggcttcatctatatgtccactattccctgctgcagtatttctttcaaaagagaaagaaaaaaaaagaaagagaaactgtgatctgcagtacataaggaagacagggatcagagcaattcaatataagtccatgcaattcatatgcttatcaccttgtaattagtttttttaataatggtaatggtttacatatctggcttctgcctacaagcacacaaccaatgtgttttagaattgaaaatgaaaggaaaaaaaagagtgatgggacaagttcccaactcctctaaaaagatgattaccagaattaaaagctctataggtgctattccatccaaaatggtacaaaagactcttagctaccaatttcaacagtgtagcaccactgtacatagtattccgcttctcctgtgatagcatcaaacactaagtatagaaccaaccggtagacattaagataacatgtataggattagccattttttattataaaaactttatcatttcaacatcgccaaattaattaacatagagcattggtcccaaataaaccttttcttcggtacctgggcacccccataagcgaaaatataattagttagttttcaaacagatgatgaattaaaaatctaaaattaatccccttaataaaagaagggaaggcaaatgggaccatgctatttttcccagagtacagctaggagtactagatcactactactgcaagtgcaaatgcaattatgcaatgcaacataaattagctcatgacagagagtgtcatgaatatatatgatcatgcaggggagggttgcaaattgctatgacttggtaatttgataggagcagagcaactagagaggtcccacatggcagggagtagtgggcactgaacatgttgatatgatacagctaggtagggttcaatgggccatacatatactctgaaacacaagtgtgagattgagaatgagtgagagggttggatgttgatggaataaaaccttgtggcccccaatgattgagatgcactaccatttgctcaaccaaacagatcagtaagcaaggcatgcatctgcatatagcagctgaacagcattattttcccttcaaaatacggttattatattaattacatgtgtacctagtcatatgcataaactcgacgtcctgatcagctatgtgctttcatctctgaagcatgcagtctactccagcttgcagttgcagaagatctcagtgccatgctgctagcaagctacgccgtgtttagttccaaaataattcttcaaacttccaactttttcatcacattaaaacttttctacactcacaaacttccaacttttccgtcacatcgttccaatttcaaccaaacttccaattttagtgtgaactaaacacagccctaattgcaggggtcctgagcaaatatatgaaatgcaggagtggtggtgatctgtgctgtgtctcttgattgaagctgtggtcctagctaagataatcttcattcttcagctagctgtagacatgcatgcagtggcaaatttaacttcctaggaaattactgagcagaacatgcatgcagtgcccctgcttgatgagcttgcatgtatagtgttaagaaaaaaaatgatgacaaattaatcaaaatgggtcagattctgaataaatctagagctgatgagcggttagatgtatggaagtgcaacactctcagcaagttgatcagcattacattgcccaacccttagagccttggaaaattaaatgtgcttctatttttcataggacgaagtatatatgtttgtttggatgtccctgttcttttgtagaaatagatggattaacgggcacgtccataaagctcttaaatggcacggcttttttaagagaaaaatggcacgatttttacaacagaaaaactttttatatgttaatttcttaattaaaatattattttaaatctattttcaactttataacaattaattcattcatttataccctaaaatgctgatactagacatatataccaaacatatataccatcccttttgcatctccaaaactttgtgtttcccggtatatcaacatcagtacatacatagattttcctagttagttgtatctcttgtgatttaacttttaagtacatatatgtgatggcatgattttgaatgaatttaagtatgtgaaaatgcaaatgcaactactccatctatttcatgttacaaatcatttgactttttttcttagtctttaggtttgatcaagtttatagaaaaaaataacatctacaataccaaaatagttatattaaatttaacactaaatatattttgataatatatatgttttgtacttaaaaattattagcatatttttttacaaatctaaactaacttaaaaaagtttgacttaaaggctatgttcggcagtcacggttggaaactaatccttggtgcacgtaaaatggaacagctcattagcatatgattaatttaatattaactattttttaaaaataaattaatataatttctaaaataatttttgtatagaaaacttttataaaaaatatatcatttaatagcttgaaaaatgtgcgcataaaaagaagagagatgaactgggaaaggagagggaataactgagcaagtactctacaactgagcgtgtgcagccgcagtagtgacgggggagatgaaagtactccatccgtcccaaaaagacttaattcttggatttccatatccaatgtttgaccgttcgtcttatataatttttttttatgattagtatttttattattgttggatgataaaacatgaataatgcattatgcatgatttatctgtttattttttttatatattttttaaaataagacggatggtcaaacgttaaacacagaaatataggaattgagttttttttaacggagggagtaggcagcatcgcggctatttagactgacgggtgggcccagccgactcattcgtttccccgaaacgtgcacgtgtgtagtgtgaacccgtcctccccacctaacctaggccaccactgactccactcccatctccatcaaggcatctgcccgagccttccgcttccgaccgtttataaaccccaagcgcagcgatcgagagcgaccgctccgaccgccgccgccgccgccgctctcaggtgatcctctcctctcctctcctctccgctcgtctcttccccctcccgtcaccgccgccgccgccgcaggctagctcgatctagctttcgatcgatcgaccaccagccggcgcacggcgacgacgtgcgtacgtacgtcgaagccacacgccgcggggcggcgccgccggccgtacgtcgcagcgaagctaggcgggcgtcacggctgcttgctgctgtgtccgatccccgccgcagtcgatcgatcgatcgccggcggtgaggtcgtcgtcgttgccagctggtgccacaccggccggggcgccatcgatctgatcgagacgatcgaaaccctagctagctccatatagccgtagcatcgccggatctgtggttggttgccgggtatacgttgaggatgagtttttttactttttttttgtttttgatgcaacaaatcaacaaatggaggtgcatcgatctcatttttacgatgagttgtagtatatatacataactagtacggactatggagtaggctagtatatatgggtgaactaagaattataggcgttatgcgcaaactagtttgatttcacgcgtgtgcgaggttatttgaaagggtgattttactatccttgaaaaaaataaacccaggagatactgcatttcataaatttgataccacaaagtaataagtatcttaaatactgtaaaattgatctatttgaaatagaatcgtacctttatgtgtctctaaaggttcatacgagggacggactacgtaatagttgacagagagtaaattgaaatcttagacaccttagatatagaatcatagataacgacaaaaagttaacgatgccatcgattgggagttacgaaaaatattaatcatctgacacgtagcaatcctgttaatacaatttgtatttgctatatatatgttgtagctatcattctatgccgctctaataaatatgcttccattccatcatgatggacacatatatctctcttttctctctgatcaacggttggtgggtgataacagggcatatatgctggacctttttgtggctttcaaaaattatattctgccatttatttaactcaacgtgaaaaatatttatgcgcgctgcatgtgaaggggaataattgatgtggaatttaactcgagtaattcaataatatctaggtttattttgggatgcgatcggacccttataaggtgcgatgagattcctatgacgtctcttgcgtgggccattgtgaacctgttggttatgtggctaacatatgagctaagttagaggattcagttcttataagggtaattttaccattctagtgtaaaattcgatatctctagatactgagtatcttgaggtaccaaaaaaatttagtttaaaatttaggtagctcagatacttttttttaagaactataaaatttctcttcttataatatgacctttatgcagctgatgactcatggagttaactgttccttgcaggtttagtagggttttaagtttcgatggcaccctcatcccgtcgaaaattccgtcggaagaaaccttcacaaaaggtcgactccataggccttcagacaccgcgctcttcggccttggaaaaccaagaacccttgctgagttctgaatattcaggacacaattctgccatacagaatgtcagttccagatcacagacattgcctcttctctagcaattgctatgaaaatagatgatgagtagtttatcaccatcgatgacgcctctaatttgcatctcatttttcattctcagatccctgaagatttgaccgtctgggatgttgtcaaaggcgacgtcgccattgttgccagcaaaatgaaatccatgacagagcggctgctggaagaactcaagatcgcgctccggttgctcatggaggacatcgatgatcagagccatgtagagcaactcgttcgtcttcagaagcatgtcgaaatcaggcctgacctgacatcggcaacgcttctgacggctcaccatgtgcagttggagatgtttgttgccctcaagatggggatcccggcatatctgcacgaaaatgtcagcgtgccacggagccgtctcgcggagatcttcgcctacgagagatgcaagaacatctcctgccagagtgttctcccagctgaggagtgcgactgcgatgtctgctgctgcaggagaggcttctgcaacctctgcatgtgtgtggtctgcaacgggttcgatttcgatgtcaacacatgccgctggattgggtgtgacggctgctctcactggacccacgctggctgcgcaattcgtgaggagcagatcaagactgtgattacggttgaagatggagttgcccactatgtgacagtgttcttctgcaaggcctgccatgggacatctgagctgctggggtgggtcaggaatgtgttccagcattgtgccaagatctggggcacggatgcgttggcgcgagagctcgagtatgttcaggaggtgttcagtgttagcgaggattcgaaagggaagaaattgttcgagaaatgtactgatctgatcgaaagactgaaggttgttcaagctgaatcgatgggtcctgaagttctgcttcaggcgctccaaggtatgtgtactaatttttgtcttctcatcttattattatgctgatttactcagtgcttgtgtttggttcttagcactgactatgttacggaatctatgctttactttttctttatttatagaaggatcatcacataatcagatagaattatcctgatgtgatgggtaattgatttcatttctaacttttttttaggagacatttccaacttttccaattgaaagcaattgcatatcttcaattgtaagctgattgattgtccactgcagtttagttttatgcatactgttttacttgtcagaacagctacagttttgaagccaattttttacaaattaaaaatatgtggggcattggaatcaacaacaatatgtttgatggctatttctcatgattgaatgaaattccagaaagtttatcttctaacgtgtcatatgcttactgtcattgatatctgacatggaattaaattaaatttgagctattacacactgacattttccatatttcccagagattgagctagatgatgctccagagatcactgaaaacgaaaaacaggtgcagcagaacactgatccccatgaaacctgcaacaatcaactctctgaatatgtccaagaaactgcaatgacgaacaagaaggttcgcctctctgtcgatgccatcaccgacggcgaggtggagaaggccaaggaggccgagcagcagctgcagcccatggcggcggagcaggaggaggtcccgccaccgccggcgagcagcagcggcggcgtggcggcgccgacgacgcagaacgcgatgctgtgcaagatactcgacgcgctgagcggcatgccgtcgccgccgtcgtccgagtccgccgccgcggtgtccaaggtgcatgagctgctgcgcgaggccctgagcatgccgcgcagctccggccgcgccaccgccgccgccgtcgacgacgacgacgtggcgcagaacgggagagacagaaatgacggcgacgacccgcggcagatgatgatgctgaaggagatctatgacatggtgatcggcatgacgaagacgatgacgaaatgatcatccgacgaacatgtttgtcacctcacatgtgtgtgatcagtgatccagatccattgctagctcgatccatccatccatccatgcatgaatggtaaccaatctctctgcactctgcaccgtgaacacaaaaaacattcagaatccatggtaaaatggtaagtggatctgtgtagtgttttaccaaatttacctgtatgtactgcagccagggtttgaagtttcgaaattaggatttctactgcatgtgggcgatagaaccgaaatttcagatttttttcgtacgatttttttaaaaattttgactgattttgaatgtatttgaataaaatctgaccaaattcacaaaaatttgcaaaaaactaaaagtttgggggtgagatatgagcatttcggtgaccgaaatttcaaaccttgactgcagctcatcgatcagccaaacacccaaccttgtttttttttagtatttttttactgttttactgatattgcattagttagttgttcaattgttgtattagagagatttatccatgtcgagataaggtgagctggatgcatgcacgggtgcgtgcccgtgggcgctgtcacgggtgcgccgtgcgcgcgctggcgtgcgcgtgcacggccggtcgatcgctcgaccgcgacagatcgcgacgccgggagcgcgcccggcgcgccgcggcgacgtggatctggtcggcggcgtggcgtgccaaagtcgtcgccgtgaacaagtcaacgggggcatcgtggaaacgaagacacaggaggaggaagagcacgccaagtcaaaacctgacagctcaatctaatacctcgtcagtgcaccatgcccatgaatcgaggcctgtatgcacgaatctcgaggggatttggacggatgggatcatcccggtgcagggatcggggtcgtggactcggaccacacctccctcccacggttggttcacgcgggagaagagagagggagagagcgcgcgaatttttctataaaagcccctctgcttgtcccaaatcaccacgcctcaacagctgctgcttcaactctctctctctctctctctttctccggcgagatcaccggcggcggcaggccacgcgacccgcggagatggtaagcgagcctgaatccctcaacacttctcttggaggcgtactactgtagctccctctcctgttgggtggaagggcgcgggtacggatcgggatctgggtgaggaaagggtctcgcctttatcgtcgagttgaggaaaaattttggtacaaagagatgctggctttcgcggatccgtgcggttgatgtgttgctttcgccagatctggtggttttttcgggtattctgttgatgtttgattgctggggttacagaatttgttgagatttgtagtcgagataggcagttttttttttctttttgtgaatcagtcttaaattggagtagtgattagcaaatattttctttccattctccaattgatccttcctttgtgaaaaatagagcagtagttagttctgattgtttctgacagacataattaatacttaaaatttaaaatttataagcttctatgttcttgtattctagtgtcgatatcgatgattctccagttagaaattatttttaggttacataacagaatagctttcgtacttgagtttggagtggtaatcattaggagcatggttaggcatgttagtatcatcaaggattggtcttagcctcttacgtagagcgaggtaaattgcataggttctttagcaaaatatgggtgatccatgtttgacttgtggttttaacaatgttcactgggaaagtagggaggcatctacccattgaatatggcttttttacatttaacaactaaaataatccaaagagtcagtctgagtcagagttgacttggtctagaaaggaaccgtgtttcaaaaacctgtagttgcaacttgttatctgattcatggtaggtttttatacactatttgggagttgaaagtgcttcttgtggaatattctgaatggtgtctgaaccgccgttgcatggtttaggttgtgcttttaggagaggtgtaggtcaaggttaagttttgccaacttttatgtctacctttttttttgcactaagctgcattgcaaccaatgttctggtttccattattttaattttacaacttttaggcataaatcggatataggaagaatagtgaatatttgatgtttaaagtaatgaatagtaatatctaaactggtagctgagcagcatttggttcagttagagcatgatgtgatacagattttgcacttttctggattatgacttggcatagtaaggtccattaactacttataaattctataaaaaagtgatcttctctttctttgatggaccatgagttggtctccaacttgttagtacatggatctgccatttattttacacctggcagatgtaaagtagttagaaaactgagtatgaatatttgtgtatgctgaatggttgggttgttttgcacgaccagactacttcaaggcgccttgctgacaggaagactgcaaagttccagaagaatatcaccaagaggggttcagtgcctgaaactactgtgaagaaggggaacgactatccagttggacctcttgtgcttggattcttcatatttgtggtcattggatcatgtatgccttccaaccttatctttatcctctgttgattttatttcactgacacttgtgctgtgttactttagaatgcgctgatgcatagcttattattgtctcttcttttgctttcaaaagataatgacaaatgaattccatcacattagctttaagtcttcatgacaaagcactcttaggttttgaattgatactagaggaattaaaatgctgagtgtcactctgctacaaattcatgataacctaatgaaatagagctggctatgtcactagaaatttaagactgctattgtgcgtgttttatgagtgatttggtgaattcttaattagttattacaactcaaattctaggttatttttatctctgttgtatactataccaacaaatctagctcttcagtgcatgcaagtaggtcatgttttgatcttctgttgtgtagccatgcaactttcttgcctatctatatggaacttacagttcggatgttctctaggccaccttgctatgtttcttctgctattattgcgcttttaacaccatacatttttgtgcatctgcagctttgtttcagataatcaggacagcaactagcggcgggatggcctaaaaacagagctgattcaagagatttgtgatacattgcatccaatgcaagtggcagcggcagctaaaatgtttggtgttgtcagtgttttgtatgcatttacatttctgaagcatcgagttgaagtacaatgtaacagaattacctgtcttacaatgttgaatggattagtataatattataccgttcatctccagttaacatctgctgttggaaaaggtccctgcttgtgcttgtgaattttgtcggtctggaattatgaattgctggacatgcagacctcatcttgttatcttcatgcgagcaaattgtatgcaaagaagtatgttgattcactgccattctcatcagcttaattgacagacaaacaaaagataaccataagcaagcaccgtcagcactaggcactattatatcaaagagagtgatttgatcgtttcaccttgaactctatgctatggttaatattatttagtttggataagaaccaaccaacagatctaacactgcagtttacttgctctaaacctttgtgagtatcatgttcagtttcttcagagtattcttgcttttaacactatacactttttacttctccgcagttctttttatttcacataatcaggcatggattagatatatcttattttcaagagattttcacataatatatgtattaactgtcatgaaatactgaatttcagctaatgtctgaagaactgtaaacagaattactagtcttacaatgtgatttgtgaatttgtcactccacatatttcagatcaacaaagaaacatttgacaagaggttgaaacttcatcagcatgaacaagtgaagcaacaaagtcacttgtggagtccttgtcaggaaggaccctcatgttaggtggtaataatcactgccattctcaccaggtagctaactgacaaaaagaaagctactaatcatgctaccctcactgataatcactgtcattctcatgactaatcaactccactaaggcactaactcaccactaatcttgcaaacttcgtatctcacttggctttgcatgcttgtcaccatcttcagagctgttcattctgatcacctgctgccacctgaagattggaacaagaacaacatctgcttcttagtagttgtttcgatcatattatacgctgttaatcttggtgatttttattttgtagagaatttcgtacgacagagatcgttctgtcctcatcggcggcggcgggcgacgcgccatggcgagcggtggcgacgacgcggcagcgccgctcctcgcctcgaagcacggcggcgagcctcgccggaacacgttcgcgttcgcctgcgccacgctcgcctccatgaccaccatcctcatgggctacagtacgtctccgagcttgctgcttcgagtgtcgcgtcgtggcacgcgatcatgccgtcgccgtcgttgatgtcgtcttgctgtttcttgtagatctcgcgctgatgagcggagccgagctgttcatccgggaggacctggggctcgccgacgagcaggtggaggtgctgtccgggtcgatgaacgtgttcatgctcgcgtccatcctcgccgccggcacggtggcggacgccgccggccgccgcggcacgctcgtgctggcgaacgcgctgctcatggccggcgcgctcgccatgtcgctgggcggcagctacgcggcgctcatggcggcgcgcttcgtcaccagcgtcggcgtcgggttcgccgtcgtcgtggcgccggtgtacgccgtcgagatctccccggcgtcctcgcgcggggtgctgtcctccctgccggagatattcatcaacgccgggatcctcctcagctacgtctccaactacgccctcgccggcctcccgctgcgcctcggctggcgcgtcatgttcgccgcgggcgtcgtgccgcccgtgttcctcgccgcgggcgtgctcgccatgccggagtcgccccggtggctcgccatgcgcgggcgcgacgccgaggcgcgcgccgtctcgcgcgcacctcggatacccccgcggaggcggacctccgcctcgaggagatcacgcgggccgtcgcggcgcaggccggcgtggccggcggcgtctggaggcagctgctcgtccggccaacgccgacggtgcggcggatcatgaccaacgtgctgtccctccacttcttccagcaagcgtccggcatcgacgtcatcgtgctctacagcccgctggtgttcaagcaggccggcatggcgtcgaacacctccgtgctggccgccaccgtcgccgtgggcgtcgtcaagacgtgctccatcctcgtcgccacgctcctctccgaccgcgtcggccgccgcccgctgctgctgtggagcgcggcggggatggccgtggcgctggcctcgctggcgctgacgctctgcgtcggcgccggcgcgccgtccccggcgcgcgcggcggcgggcgtggcgtcggcggcggcgtacgtggcggcgttctcggtggggctcgggccgctggcgccgtcgtacggcagcgagatcatgccgctgtggctgcgggcgcagggcgcgggcgtcggcgtggcggtgaaccgggtgacgtgcggcgtgctgagcatgacgttcatctcggtcgccggcggcatcaccatggccgggtgcttcttcgtgtacgctggcgcggcggtggcggcgtgggtgttcgtgtacgtgcggctgccggagacgaggggccggagcttggaggacatggacgtgctcttcaccaagtgaagatggctttatttgggcgatctcggccgtgtttctttcttggcctagcggccggtccggtgctagccttttcctagttctatgcgttggcgctgtcgatgtgtgggtaatgatatattttttttcctagttacgacctttcaattttttctccctctatcaatagaatttcgcactgtcttatgtgagtcattaaaaaaataaagatggctttatttgtggtattattggttgtgttgctacgattgtccgcagttctaacttgaaagagatgaagaaatcatttctaggcagtagaaggacaaaatggaaatgttaagcttggaaatattaatgtaataatctccatgatggtagactcagaagtactttcttgaatgtagactcaaaactcagaagtgcactcagttcaccatgaacaatgacaataccgaaagataatagaacgaaacataccgaaagatacttatttttttttaataatagaacgaaacatttcagcctttactcaagagttacagctaattagtaccgaaagatactagctagctacctgaaattaaccgtaatcaatatcaagatcattgtctttaccataattcaagagtacacaaattaacaatgttacgatgatgtattgacatggttaattatggttcaagagtcccatgtcctaactgaatattagaatatgtaaacaatgtctacatgtagcatttcttggggatcaggagcggtccacagattaaacttgaaagagtgaatgaggagaataaatcatttccatgcattgctacctatacgggcccctttgaatcgcagggtagaaaagaacagaggaatagaaaaaatacaagattctgacagaaattgaagtgtaaaacataggattgcaaaacacaggaaaaacaaatgaatggtcgtttgattggagcgcaggaaaaacataggaatcggatgagagagatagacaaaggaaattttctaagaggttggagctcttactaaattttctccaaaatccacatgcaatgtgccattccataggaatttcataggatttggaaagcttcaatcctttgaatcaaagggccaaataggaaaatttcctataggatttaaatcctatgaaatttctacgtaaatcttttgattcaaagtggcactacatatggtgcaattaaagggatattatcctacatgtcaagccatccatgcaacctgccgatcagttaaacagacaggccggccggcaaaaggacacagaaattacgcaggaagtaatggaatattcatccaatcgaccatcttcataaagcattcaggagtaccagaaagttcacaaatacatacattcagtttctcatatataggtgataccatcatacttaagataaaaacaaggatcaatgacgatatacacaaccagatatgtaccaaaagatacttcctccatttcatatcataagactttctagcattacccatattcatatatgaatctaaacatatatgtgcctagattcattagcatctatatgaatgtggacaatgctataaagtcttatagcctgaaattgaaatggaggtagtaatagctaagctacttcaaaccgcaatcaactaattaactgatcaccacattactcgcagtacactacagtagtaggaactgatcatcacattactagtagtagactgatagaagaaataagatatgattcaaccaaattaaggtgatcgactgtagttaccacgcatagttaatcagagtagtatagtcatcatctaacagatcgatcagcataacggccgtagacttggttaattataatagtagtagtaatcgtagtaatcatcctcttcactgggcggcagcttgagcgtcctgatcctcgcgcacttggcaagcagctgggcgtcgtcgtcgacacacaaatcccagcagctgcacacatcgagaagctccaggcgagggcagccatcgacgatggccgtgagctcgtcgttgctgacgccgatgccctggacagtgagccgccgcaggtggcgcagctccgccaccgcgagcgcgagccgcggcagcgggggacggcgatggccgccgctgctgaggacgatctcctctaggagagggcacttcctcgtcagctcggcgaatccttccgtggacatcctggtttcgtcggagcaccaaacggaaataaccttcagagaaggcgacctgtacttgcaaagttgcaagtttgtaaattagatgaataccgctgcgggaaattaagttgtataatatatacaaataagatgaagtatgaatattaaaactaaaaaaattgatacttatgaattttgaggcctaaaaatgattaaaattacttggtgttatgagagaagaaaaaaagagacaatttgaaccatagatctatcatccaatggctagaaataattggggtgacgtggcttcatgagagaagagataaatagcattaactacacttagtggggatgaactatataagtatattggattaaaagcatttttttattagcatcgatatatatctcgcctgttgtgagtggttcaattataagctgatcgattggcgcaggctcatgctttgaaatttcggcctccaccgactaacacaaatctccccgaaattttcgggttttttcaaatgtgtaaatttggtcaaaatttattcatattcagtcaaaatatgttaaaaattttaaataatcttaatccgaaaaacccaaaaatcacgaaaattttaaatttccggcaaccaccaaattttcggtggcaactgaaattgcaaaccctagcgcgcgcagaggccaaaactttttttttaaagaaaaaaacacttcacggtgctagtatattactcctatatacggctagtacgagtgattcgggatataaattaatttatcttcccacttaaatggtttataatttaaaactgtaaaattattatgtattagcatatagtgttcttttttttaacagtatatgctaccgatacattatactccatccgtcccaaaatatagcaacattatatcacatcaagtataaggttgtaatattttgggacgaagtgagtaatgtacttatatagttatataggcttctataaaattaaaaaaaatacttacctgtctccaatatactcgagcagctcatcgctaacaaaatcctcccccttgaacacctcgagccggccgccggagcggtcgacggcgaccttcgccatggcgcacatcaggtccctgtcctgcccgaggtggaggcaccggaccgcgccgcgcagcatgtccacggctcgccacagctcgggcaccctcgccgcgtcgagccacgagcggcacgcgaggcccgcgccggcgaggacctcgacggcgcccaccttggcgaacaccaccgacagcacgtccgccggcagctccgaccagtccctccccgccggcgccgtcgtctccggcgccggcaacggcggcaggaggaggacatccattgttgttattcgttggtggctgaaaacaaaaatggatagttagatatatgcatgtatgtgtttgccattgatttgatttgatttgatggtcagattgggatgagaagttggaaacttgtagtgttataatccatgcattacctttgctgatggtgaagaagaacacagtgcagttcttgcgctgatgtgaggacggccggcgagatttataggagagatatggggatggagattgatcgttttttttttttcatctcggtgcaaatgcaaacctcgcgttctacgccggtggcattgatgaggcgctggaattcaggcgcgagtgcgattggctaaagtgagcggcagctactagtagcaagcaagcaaccaacatgctgtgcgacgcgacagtgtgcgtatttactccctccttccattactcttcagattataagttatttaaactttaattaaagttaaattgctttaaatttaatttgtaaaaaaaaagtagtaatagggcctcatcagcaagctagtatatccttagggcacccacaatagttatctataagctctctacaagagatccatgtcagcatattttcctacttggaatatattaaatgaagagagagagcaaagctatctactaacttagagatagtctatagagaaaaacgaggcaatgtatgagagagctatagatacccatgtagacatactattgaggtggtttaatattaatctagtctattgttgagatgtacatgttttatagagaacaccttactttaccattgcgggtgctcttaggctgatcagccaaataagcctttttcaattcaggcaaatccattgcattgattggcttaattagttaattggctggacatacaagggatcttctatttgtgtgtttagttcacactaaaattagaagtttggttgaaattggaacgatgtgatggaaaagttagaagtttgttagtattgggatttttattttttgtgcatggccactagagagttcacataattagccttcactgatgatccaacttccttacgggtctcactctgtttggctgaaaagcttcggcccaagcctcagccaaacaagccagacacaaatatattataaaaatatatttaattatagatttaataaaattaatttggtattataaatattatattatatttgcctataatcttaatcaatcttatagtagtttgactttgatcaaaatgtttgtttctgtggttcgctcatataatattagactacttaggccccgttctaaagtggcgggttaatatgatgttaccatccaatgcactattcacacagctaccaactaaagtggcaagttaatgtgctgctatctactccatccattccaaaaaaaaattcaatcctaggtttaaatttggacgtacattatgtctagatcaacccaggattggttttttctgacagagggagtattatttagactgctaccaattcagctcaacgtagccaaatctgcgcattagaatggagcctaaaataaatgtttgcttccaagtccaacccaactagtcagcttcctcttctttcatgttaacaaacaaagcccgaatccctatcaaccaccttactttcttttccatgggatttttgttgagcccgcagcttccataattgaattgggcctcagctcatcccatcaactggtttttgctggtccaaccaatccagtttaattaaaaaccggttcaattgatttttattcctgttcgattgcacacacgtttattttagttaaccagataggccaaggccattttgtaggttttttaggtaggaccatcggtacgatcctaataagtactatgaaatttgtaagattcaaattatataagaaaattttcatatatgaccatttggaacaaaggattaattgtggcttttggagggggagagagagagtgtgtgagtgagaaaggttagtgagacatgtaaaaaaaaatgaatctattgaatctgacagtggctaactagaggatggcttatgggatgccattatatagggattcaaagtttagattttggttgaaattgaagatgatgtgagtgaaaagttgtatgtatatgataggttgatgtgatggaaaaggactgaagtttggatccaaattttggatctaaacacatccattgttggtctttaaaaaaccaggacttgtaccatccaacttctatgcttggatcgtcctacatgaacaacagatgaacatgcagcaggtagcatctttaatctgcagcactcgtgttaggtgataaccaattgtcattacacgagaaaaaaagcagaggacaaaaacaaaagctaaccactggtttagtacacatctgatgataatctcactaacaagtgatcgacaagacaaccaagtgattggccttcatggtcgtcgccttgcaaacagacatatctcacctcgacattgtccgtgtggatctgttagcatcatggaatcgatctacctgcatctctgatctgagatactttttgctcgtgtagagatcgccggttcaaacgttttcttccggtaagtttggatgggtgatttccttcaactttacataaaacatgagaattttggaataatttttttttggttgagtggaagataagaattatagatagtattgatgtacatgtggcctcagaaaataaaaggttctaatgtttttttttagaccttgaaaactgcttgggctttgcctatgtaatgaaataataccctctttagccaaaagaacaagttgttttatatcccaaaaaacaagttgttttaaattatgtgcaattacacgagttaactttgagcataaataggattttggtatatgaaaatggcaaaaagaaaaatcgccaacacgcaaaagtcttaggggaaggtgagagatatgacacgcaagaacttgctaaaccaggtgtgactcctaaggggaagatgagagatgtgaaactaagccaagctatgtgcctaataacaacccgataggattggccatggtctcaacccattgccttccttcttgcccaattcactccaccatactgttggcacctatgatagaacattgtcgaagacgcgggtgttcctttattttcataagtgctaggcaacatgagtgcaagggagtcgaaacctcttcctgtcttgcttgtgcaggcgacatcgcgaggtttgccaccaatcttggagcatcaataaacatagtttccatagcattacacttttgtaactattattgttttgaaaaaattataccaaagaactatatgcagccaaaactgtataatctgactttgaaaaatccaaaaacggttttactttttaccgaaggaagcatatacaattgaaatactttccttagaaacatatacttgagtaacctccattttaaataatcaataggtgatatttatattcaacatacctccaataattttaaccaccataaaacacctcaaaacaaactggttgttccccgggaaatttttagatttttttaaatatttgtgaatttggtaataatttattcaaattcaatataaatgtgttaaattttcaaaaaaaatcgttcgatatttcggtgccaccgaaattttcctgcttaccgaaatggaaaacactggttgtcccagcaatggaagcctttaaaagccagcaatttacactatagggctgtgtttgcatccccatgttcccaacacttctccctcgttttccgtgtgcacgtttttcaaactactaaacgatgcgtttttttgtaaaaagtttatatacgaaagttgctttaaaaaatcaaattaatccattttttgaaaaaaaaattagctaatacttaattaatcacgcgctaatagaccgctccgtttccgtgcgggagggattagttcccatcgctggaatccgaacacagcccaagtcacaactcgaccgtgttcgccgagaaaccaagccacggtcaccatggcgcacgccggcgatgccacggcgccgctcctctcctcgccggccaagcccggcgacgagccccgccgcaacatgtacgccttcggctgcgccaccctcgcctccatgaccaccatcctcatgggctacagtacgtgtgcaagttcttgagcacgacgcacgcatcaatggagcaagctcatcgtgttttgtgtgctttgcagatctcgcgctgatgagcggcgcgcagctgttcgtccgggaggacgtggggctgagcgacgcgcagatcgaggtgctcgccgggtcgatgaacgtgttcatgctcgtgtccatcctcgccgccggctgggcggccgacgtgctcggccgccgcggcacgctcgtgctggcgaacgcgtacctcatggccggcgcgctcgccatgtcgctcggcgccacctacgccgcgctcatggccgcgcgcttcgtcaccagcgtcggcgtcggcttctccctcgtcgtcgcgcccgtgtacaacgccgagatctcgccggcctccgcccgcggcgtcctctcctcgctgctcgatgtaacgctcgcatcatagctctagtagtgtttgatttgggtcgctctgatcgatgctccgcttgcgtgtgtcagatgttcgtcaacgtcgggatcttgctgagctacgtgtcgaactacgcgttggccggattgccggtgcacgtcgggtggcgcgtcatgtacggcatcggcgtgctcccgccggtgttcctcgccgcgggcgtgctcgccatgccggagtcgccgcgctggctcgccatgcgcggtcgccacgccgacgcgcgcgcggtgctcgtgcgcacctccgactccgtcgaggaggccgagctccgcctcgaggagatcaagcgagccgtcgaggcgccgcaggagtccgccggcgtcggcgtgtggcgggagctcctcctgcggccgtcggcgatggtccggcggatcgtcacctgcgttgtcggcctccacttcttccagcaagcgtccggcatcgacgccatcgtgctgtacagcccgctggtgttcaagaaggcaggcatggcgtcgaacacctccgtcctgggcgccacggtcgccgtcggcgtcgtcaagacgtgcttcatcctcgtcgccacgctcctctccgaccgcctcggccgccgcccgctcctgctcgccagcaccggcggcgtggccgtcaccctcacctcgctcgccctcgccctccgcgtcgcgtcgccgtccacggcgagcgccgcggcgtgcgtggcgtccgtgatggcgttcgtggcggcgttctccgtcgggttcgggccgatgacggcgacgtacaccgccgagatcatgccgctgcggctgcgcgcgcagggcgcgagcctcggcatggccgtgaaccggctgacgtgcggcgtggtgagcatgactttcatctcgctcgccggcgggatcaccatggccgggtgcttcttcctctacgccggcgtggcggcggtggcgtgcgtgttcgtgtacgtgcggctgccggagacgagggggcggagcttggaggacatggacgtgctcttcgccaagtgatcaacgtactatttcattactacattttttatggaagagtatgaagaatttatttattcttaactttgattttctccatccaagaagggacgatgtaacatttagcaaccaaaatgcattggaggtgttatcagttacttcgtatagatggacaaatgggccgcctgacacgacctggcctgggcacaactagagcatggcatggcccaacatacttttcgtgtcgtttcgggctagctcacaggttgtacctgcgacccaggcacgacccgtgtcttattgggctgtccattgtgctcaccttgaaataagtctattttgcctctctcatttctttgggccatgtcttatattcctagataagtccattttgagtcccttacttatttaggtcgtatctatatggttggaaaaagtctcttttccctctctgattgttcggccgaactgacccgttgtaccgaagaagaggcccaggcacaacctattggtcgggccgggccgacacgggaccgacaacagtcaggccttgctgtgccttggtcgggccaaatctccatgctgtgggccagaccgtcgagctatgggccttttggccaactatataggttagcattccgcatctataagagtctcaaacacaaccaacctatatgcatgcgtaaatacatgggcaaccttcgtagttcactataaaatgcccatctatttgttggtcacgtaataatttcacaaaatcttaacaattattcgatgtcgtgagtttgtcgatttgtctccttccctgagctaatgctggcccatggtcatcctcctcttttgtggccaaggggccacaacaagcctactcctccgtcctccctctaaaaccacttccttgacctaaccctctccaaccatcttcgccccaagcacctggatcttagggtaaagacaactccgggctaatctgacaatcatggagttgatgatagagatggagagaagtattctcaaatgcctaattttggagtgacatttagactgtgctagttgaagctcaccttttgcttgaacatggctagctggccaatttttttgcataaccagatgtaacaagagaagatatttatttgagtgtgttagggggcgtatttgcgggtgatgagtatggtgttgtgtgtatgagtgtgtgcatatgcgtgtgccgtgtaatcgaaaaaatgtttatttaagaatagttatgcaaatctaatatcgaacacggaagaattttccagttcatgtagaagtcatactttttaaaaaaattaaaagtttatgtgaaaatcatgtaaaattaatgcatgcctttcaaaagaatcataagtgtttagcactcatgtacttctagcttgaattattattaattagtatatatatcacaaattttttctttaagaaaattctttcattggtcttatcactattgaagtattgattgagtagatttgggattgtactgttgacctgccttcggtgcttttggatcctatattcctactcctacaagaacaaaagacacagcattagcagaacattaatctttgccggcacaagtacgaatagtactactgtttggtgataagattcacttgtcatgagctcatagacaaacaaaggttagccacccatcaggcattcaggccatcagttgacaccaaaattctcaaaataaaaacaattacttacgccaatatagaagggaaaacccaacaactgagttaacagcttttaactctacatgcctcactgatgggccaggctgctaatagtctcactttggacatccgttatgtggatcatttggagcatgagcatccatgcatccctaatgatattcattattgttgttattgtagataactttagaggcatgattaattattttatgattcagcgacatgtacctgtgatgattgattagacaggtactcacttaacaatgtaagtactatctgtccaaaaaaaacttaatctaagaggggtcacaacgaatccagttgatttttagaaaatatagaggaactagatttttcaagattatcagaaaatgtccttggaaaataagattactggaaaatggaagtgtcataaacatgtctgcgtttttctttttgtcgaacagattacatttttggattttattaaccaaataacttgttgctctcaagtggaagatatatttaaccatcaaagatggatgaactgattgaacgttgatgtttccgccattgctgcttttaatttggtaaatggagtaaaaatattttattttacacaacttcgtgatggttaattaagattgtttttggtcaaccattaagctggacacactaatggttctcatggattgaaattcctgattccatttaacaggaagagtttcccaccgcattgctagctgacagcatgtgatctgccttcctcacacctaagctcccccagtctccaactcaaatgtatcattaggaatttaggatttcccctttgtttttattttcttctgtgttggctgctagccttctacggattgttgtggaatcagggagccctatagctgtgtgtctgatgtgtactctattttgtaatcttattgacttcgagtgcgggttttggaatctgtaacaggtagcttctgatgtctaaatttgcagaatctcgcaactgatttgtaataggagttaagtagagttgaaattttgatttcattcttgctcccaaaggtagaaactgtgccatggaagatgtgtacctttgagcaagtggtcctttctcgcctttggtgagaagtgcctaattctaactattgtacttgtacaacaatacaacatatacaattcaataaagtgtaacaataaaagatcagttgataagttatagtgagattgggggatcataggagtatggtccttcacagtttgcttagctttctgtacatcctacctgttcatttgacaagttgcgctgtcattgttatgaactggtttcaaatcagtagatatattacatattttcatcattataacttataaatcaacctggcaacattttgcagtggtcttacatgtaaatccaatgattgaaaatagtgggtccgccgtatttaacgtaaaatcaatggttagatatatattttagtattattggaaattcatctaatttatttgagcaacttatgagcgtcatttggtgatttagaagcgtttgtagaaatcatacgtggtggtttgagagtgtttgtagaaagtttaatggactttactatacaatagatagatgatcatgtcaattaattactaatattgaccaacttaccagccaaattttcaccctattaattgtccggagtattagatgataaataattgaaaattgagttatatttgctacttcatatttactctctgattccattgcaaattatcaccatatcctttttgtcaatcatcatgtcctcccgttgatccttagatttctctcttgcaactacttcgtcagttcgtctcagttattgaatgatgtgctggaaatgagatacgacagttatagcttgatttggtcaaatatgagcaaagcttgctaaatcatgtttccgttaggactgtagttggattacggattcatcatggtcacgctaaacaatcacttatttcatccgttttatattgtagtaagtttttttattttttttaagtcaaacttcttaaaaatttgattaaatttatagaatagcaacatttatagcattattttagtcttattaaatctaatattaaatatattttaatagtttctttgtttatgttgaaaatattgttatatttttctataaacttaactaaagttaaagttgtttgacttttaaaaaatcaaagcgacctataaatctttgattttatatgtactagaaaaatgaccgtgccctgtaacaggcgaatgctattttaatcttattattgtcatatggtttagctagaatgaaatttactgtgttaaattcgcttagatgtatatctgttagaaaatcgtaagctgcaattaggaattcgatcgtcccaagttagaatgcgagtttttttaatgagatttcttatacgattctccttttgtatttaaaaaagtgaacgaacttaaaaactgactcaaatacagaattgtgtttctaaaagtgaacgaatttaaaaaccaacttatacacggataacgtaccaaaataccagtaaaaatatcttcaacttttataatagtagagatatacttctgcatcatatcataatgtgattcatatctctgccttccagtctacggcagtaaaagtgaatggaaattactttccaataatcggaggttgcccaccatgatgatgtaggtcactgttgtcagtatgtcgccctgcttttaatcccattcgcttcacaccacacacacagcttagctctcgcccaaaccaaacctcgccatggcgagcgacggcgacgccgccgcgccgctcctcacgccgtccggcgacaacgacgacgagccccggcgccgccgcaacatgttcgccttcggctgcgccacgctcgcctccatgaccaccatcctcatgggctacagtacgtgcactcatcgagttcttggcaacacatccatggaggtagttcgatcgtgttgtgtgtgcttgcagatctcgcgctgatgagcggcgcgcagctgttcgtccgggaggacatggggctgagcgacgccgagatcgaggtgctcgccgggtccatgaacgtgttcatgctggcgtccatcctcgccgccggctgggcggcggacacgctgggccgccgcggcacgatcgtgctggcgaacgcgttcctcatggccggcgcgctcgccatgtcgctcggcgccacctacgccgcgctcatggcggcgcggttcgtgaccagcgtcggcgtcgggttcgcccgcgtcgtcgcgcccgtgtacaacgccgagatctcgccggcgtcgactcgcggcgtcttgacctcgttgcttgacgtacgtatatatgcgtccgtcgatctggccatgtagaatctgtcgtcgtccttccagtgtcgaacaccttgttaggcctccattgatcgatctcgctctcgcctcgtgcagatgttcatcaacgtcggcatcctgctcagctacgtgtcgaactacgccttcgccggcctgccggtgcacctcggctggcgcgtcatgttcgccatcggagcggtcccgcccgtgttcctcgccgcggccgtgctcgccatgccggagtcgccgcgctggctcgccatgcgcggtcgccacgccgacgcgcgcgtcgtgctcgcacgcacctccgactccgccgaggaggccgacctccgcctcgaggagatcaagcacgccgtcgcggagccgcacgatgcgggcggcggcgtgtggcgggagctgctcttccggccgtcggccatggtccggcgcatcctcgccaccgtcatcgggttacagttcttccagcaagcgtccggcatcgacgccatcgtgctgtacagcccgctggtgttcaagaaggcaggcatggcgtcgaacacctccgtcctgggcgccaccatcgccatcggcgtcgtcaagacgtgcttcatcctcgtcgccacgctcctctccgaccgcctcggccgccgcccgctcctgctcgccagcacgggcggcatggccgtcaccctgacctcgctcgccctcacgctccgcgtcgcgtcgccgccgtccacggcgagctccgcggcgtgcgtggcgtccgtggtggcgttcgtggcggcgttctccgtcgggctcgggccgacgacggcgacgtacacggcggaggtgatgccgctgcggctgcgcgcgcagggcacggggctcggcgtggcggtgaaccggctggcatgcggcgcggtgaccatgacgttcatatcgctcgccgacgggatcaccatggccgggtgcttcttcctctacgccggcgtggcggcggcggcgtgcgtgttcgtctacgtgtggctgccggagacgagggggagaagcttggagaacatggacatggtcttctccaagtgattgagctcttgctttttgcaccaaaatttttttagacaaaactcaatttgtctccaaatgatttgaggtctcatatgaagcaaacattatttcagcaaataaaagaaaaatccaggtagcagaagactctgaagaatgatgtattagctttgcttttattatctaaaaaaaaattagctttgcttttaggtagcagaagactctgaagaatgactctcacagtcatatttgtttttttttaacttatagaagttaaatttaaacttgtatgtttatggagtggtatcacatactaatctatattgtcatttttttgaatttttttcataattatttggattacatgtaaagaacgagaggatgtcctctcgagggattaaaagagtttgcccatactgttctactccctccggttccataattctttacgttctagacagtgacacagttttcaaaatatatctttgactatgttttttattataatatataattaataaataaatattttttattatagtgctttaaagataaatctatatatggttgtcctcaaccttatttaaaactaacttgagggagtaacatttaggaaccaaaatatttttttgccccccaaacttttagatatgtggccattgccttgttatccaagcaagaatggcctcgagattcatgcaagaagcgaaaaaaaaaatcaaatcgaccatgtgcaagtaggagtcaagctccaaaccacttgtatggagattacgttgctagccaaccaaaaaacagagtagttttgactatagaatacaagttatatagtagtagttgtaatgtaattatactgttacatttatttttcacctaaaaactatcgaatattatatcgaatattatatagctacttcctatgggactagctgtatctatggcatattttccacgaaaaacagtcaattgttttctcataatatattagattcagttacactttaattacattacattataatttctgaaacttccacaacaatatccattacttacatccattacttacgttgtaatttttctagtacgcagttattgaaaaatgagatattaataaacctatttactctcttcctcttttaatatataatgttgttgacttgtttgacgttttatcttattaaaaaattatataattaccatttactttgttgtaatttgttctatcattaaaaaatactttaagtatatttttcatatttgcgtaatttttttgtcaaacatatgtaaaaaatcaattatgccatataaaagagaagtagcaatcacatttggaaataattaaccaaaatcaagttcacatttttagcataccactaaaatcatctaagagcgttggctggtgcagggccagagtaccctagccagccatttgatgttcttcaagccaccatagtccaatattcacacttttggttgttcagtttgtcaccacttttgactttattaaattttacattataaagttttagtaagataataaactaaacatttctcctctcattgacaccctataaaaattgtcatttctgacaattccctcttataaaaaataccaaatttgggtaagactacaaactaaacaaaccgcatgctatagatatttgtaacgctaaaatgtgacaaatttttgataagattgattttgacactaaactagataaacccgtgtttccttagctatcgcaacctccacgattttattagctagcgtgtgtgtgttctaggctataaaaaatttctggatctactgctgtatataataattgggctaaccattttactgagatgggtaaagtttgaggtttgacatggagcacggtggttaaatgaggcttcgtccagagtgtgggagaacgtccttttatgactcgtgtaactcgtgttaggtgatactaataacttgtgatgatctgattttcttattattttttgagatatggaagaatggaaaatgattaattgtgatcatgagctgatgaacgaacaaacaaagcctagtcactcatcaaatacaccaaatctttggaaacgaaaacaaaagttagggggtgtttagatccacgggtgtaaagttttggcgtgtcacatcggatatacggacacgcatttaaagtattaaacgtagtctaataacaaaacaaattacagaatccgcatgtaaactgcgagatgaatttattaagcctaattaatccatcattagcaaatatttattgtagcaccacattattagatcatgaagcaattaggattaaaagattcatctcgcaaattagtcgcaatctgtgtaattagttttgtttttagcctatatttaatatttcatgtatgtgttcaaacgttcgatttgataaggtaaaaatttttagggtaggatttaaacaggactcctagctaatattgctgggaaccaaccaccgatgtaactgcttagacccagtttagttctccaaaaacttttcgcaaaaacatcacatcgaatctttcacacatgtatggagcattaaatatagataaaaagataaactaattgcacagtttgcatgtaaatcgcgagacaaatcttttgagcctaattagttcatgattagccataagtgctacagtaacctacatgtgttaatgacggcttaattaggctcaaaagattcgtctcgcggtttccaggcgagttatgaaattagttttttcattcgtgtccgaaaaccccttccgacatctggtcaaacgtccgatgtgacacccaaaaattttcatttcaccaactaacatgcccttattaactcttatacgcctcaacctcagggatcggagatacaagagtctgacggctcatcaatcatgctcatcgtcttggttccacatagatacaatagttacctaaaaatatatactgcattattgatacttggttccacatatcatacgcacattgtatcttgtagttcgtgctagctgcagctgactataaatctgtagcccactgttcatatatctagtcttttatcttctcgatatatgtttacagctgttttatattctgctattttacatgcttgcaatatgcgaatagccaaatacaatgtggacgatctgttgcagcatatgtatgcatctctgttcatctactactatatttaatatttattgttgtttgctgttgtaggcaactttggagacatgattaattctctgactcatatatagacatgtacgtatgacacagttagtacagccactgttactaaacaatactccctccgtcccaaaaaaaggacaaacggtttccgtacccaatttttgaccgtccgtcttatttgaaaaaattaagaaaaaaaaaagacaagtcacgcacaaagtattaatcatgttttatcatctaaccacaataaaaatacgaattataaaaaaatttcatataagacggacagacaaagttggacacgtaaatctagggtttgcctttttttttaggacggagggagtactattaattatctatgtctgtagtttttcttcttcttttttattcgtgtgtccaccggagtttatgtgtgcaaaaacaacacacacaataaacattctcaaatttaatgtggtaccaaagatgtagtagtaagatacacatcttattattgtttctaaaaatggtccgcccatgtcgatgcgcctaattaatacactatctaattttgaggttatactagaccatcttcagtcataggatccccattttaaagcctgtaaaactaagggtatctatgtttatgatcacgggtagcattgaggtgacctcttcttatgcaatgtggcgaattctaacccttgactgtggatatgcatgacacttctattttaccactacatgttagataaggggcaaaatttgctaaattaaaccacacatatgattttatatgacatgattatttatgtacggttagatgcacctttgcacatgtcatgttacatatgcacctttgtacttgctccatcttataaaaaataaatctagaataggatgtgaaacatactttaatactataaatctggataaagaatttatcgatattcgttgtagtaaaatatatcgtatctggtcttagttttgtttttttagggacggagggagtatatatcacgaattttttttagtcttttttatttttattaatagatcattcaaaaagtattttcgaaatctaaatcttttggccacgcaagaggctggcgtggccaaataacgctaccacgctaactgcgcgtggcgtgacagagttatttggccaggtttacatctgtaaatactttttagaatggtctattaataaaattaaaaataaaaagtctaaaaaataaaaaaaaatcatatatcacctgcattcgacacagttgcaacatgacctatgggaagtaaatgtgaaatcaatttaatccgacacacctacaacttgctctgagtggttagtccaagacttaaaccccatgctagctaggctccagtatgaaaccttaagcaagccatggcgcacgacggcgccgccgccgccgctacgctcctcgcatcgtccggcgacaacgacgacaagccccgacgccgccgcaacatgtacgccttcggctgcgccaccctcgcctccatgaccaccatcctcatgggctacagtacgtgcactcatcgatgttcttggcaatggttagagcttcttggcaacacatccatggaggtagttcgtgttgtgtgcttgcagatctcgcgctgatgagcggcgggcagctgttcgtccgggaggacatggcgctgagagacgccgagatcgaggtgctgacgggttcgatgaacgtgttcatgctcgtgtctatcctcgccgccggctgggcggctgatgttctcggccgccgcggcacgctcgtgctggcgaacgcgttcctcatggccggcgcactcgccatgtcgctcggcgccacctacgccgcactcatggcggcgcgcttcgtcaccagcgtcggcgtcgggttctccctcgtcgtcgcgcccgtttacaacgccgagatttcgccggcgtccgcccgcggcgtcgtgtccacgctgttcgagatgttcgtcaacgttgggatcctgctcggctacgtgtcgaactacgccctgtccggcctgcccgcgtgcacctcggctggcgcgtcatgttcggcgtcggcgcggtccctccagtgctcctcgccgcgggcgtgctcgccatgccggagtcgccgcgctggctcgccatgcgcggtcgccacgccgacgcgcgcgcggtgctcgtgcgcacctccgactccgtcgaggaggccgagctccgcctcgaggagatcaagcacgccgccgaggcgccaccgcaggaggatggcggcggcgtgtggcgggagctgctcttgcggccgacggcgatggtccgccggatcctcacgtgcgtggtcggcctacagttcttccagcaagcgtcgggcgtcaacgtggtcgtgctctacagcccggtggtgttcaagaaggccggcatggcgtcgaacacctccgtcctgggcgccaccgtcgccgtcggggtcgccaagacgtgctccatcctcgtcgccacgctcttctccgaccgcctcggctgccgcccgctcctgctggccagcacgggcggcatggccgtcaccctgacctcgctcgccctcacgctccgcgtcgcgccgccgtccgcggcgagcgccgcggcgtgcgtggcgtcagtggtggcgttcgtcgcggcgttctcggcggggctcgggccgatgacggcggcgtacaccgcggaggtgttgccgctgcggctgcgcgcgcagggcgcgagcctcggcatcgtcgtgaaccggctgacgtgcggcgtgatgagcatgacgttcatctcggtcgccggcgggatcaccatggtcgggttcttcttcctctacgccggcgtggcggcggcggcgtgcgtgttcgtgcacgcgcggctgccggagacgcgagggcgaagcttggaggacatggacgcgctgttccacaagtgatcgtgtcggacgactcgttgtgaacaccatttgatctcggtttgaaatctcgttcgaatatttaacatcaattcgtttggaaacaacaacactcgcatgaccgatttgaacataatcgtgaatattgttatgtatatgggccgtatgagtcaggcctttaccgggccgcgttgcagccgagtggcctaaattgtggccttgtgtgggattcgaacccaaatacgcatcgaattctggacttctattggatactctgatgcggaaacgcaaaaatcaaaacgaaacccgatgttttttttttctcttgaacaaagcacgaattcaaccgacttaaactcaaaacacgacttcgcgacggttgcagacgccgccaccgccaccgcctccaaaaaccgacgtggctctcacccgagtcccgggccccacacgtcagtgtcctttctctatataaaccgacccgttcccctcgcgtgctctcccacctcgcgcccgccgcctccaccgctcgagccaccgaaccctagaaatcccgccgccgccgcccgcccactccgtcgcgccgatggcggagcacgaggagcagccctacgagggcaacgggaacggcggcgacccggcccccgcctccgcgtacgctgagtaccctgcgcccgaggggtccccgcccgccgccgccgccaagcccaccggcttctccgatggcgccaccgacggcggccgttctcaggtgcgcgcgtcgcggatctgtagggggggaatttggcccatgttttgggatggggggcggtttggttttgggattgtttcatgggttgggtgcaaggggatttcatctggttgcctgagatttagggatttaggtggtttactttgcttgcaatgttatgctctccaaatcgatggaactattaggttgttaggttgattgtaattgctttgtgctgttttaatttcctctggagaccacgattcaaataaaacatagaactaggaaatttttaggcgattttcggattagatctgtttgaatttaattgttgtgcaaatttcaacattcaccttatgctgattgtatcaccttggactcttagagagtagtttctggtcgttgacagcttattggggctaaacaataattgaatcttctcttttgaagataagaggactgactgataactcttgttcttttattcagcacgagacacagccacatgatggcaggtcctcaaagtctagagagagggaaagagaacgggacaaggacaaggaacgcgacagagaccgtgatagagaccgaagggaccgcgaccgtggtgacaaggacagggaccgtgatcgccacagggagcaccgcgatagaagcgaaagaagggaacaccacgatcgtgaacgttctgatgaccgtgatcgacgccggggccatgattctgaaaggtacaggttatttttccgtatgttaatggatatgctatgattcctctgccatttgtttgcttcatgccacgttttattgtgggaatctgatttacactttattaatgcaggagaagagaccgtgacagagatggtcaccgcaggcatcgatctcgctcccgctccccttcaaagggtcgtgatcgcagatctagatctcgctcacgctctcgatctaggtatgtgattgaatgcccttgtatgcttattatatgcattggttcctgatgttgatgatgggccaagtttgcctgttcttattagcttacaaaagtcacatgttcttttgatacctcttaagtcttaacagtgatgcaattttcagaatgttagtaacttagtatttcttcttatcttcaaaagattgacactcttaaaacatgcagtgaactgtgtttcttttcaattttttttcaatggtacattcatatgtctttactagtttacttaatgtaatccatttatgcgcttgattttgttctttgtcatgtaccttcttaggtggctttaattctatttgcttatgtaattcttttggtctagttattaatttggcttttgttaaaacagcaagcgcgtgagtggatttgaccagggaccacaagcagccattcctgcgcttgctgctggagcagccccaggtatgttagcacccaatataatttgagagtttattttgctctgctgaatttatctatttatacttgaaactaccacaaattgctgtagctttatcattaacttgtctacatcacaaaacataaggctcaagtaacattaatgcaaagaccaagaaagagttattagcacctccttgtttggatcgccccaataaatacaatacatgcacccaatgagatgagagatcttgaagatggatgattttaaaaaaatggttttagggtagggagaggtgctagttaattgcatgcatacgtgccctgaattatgaagcctcggaaaaaaaattagttgctccaatattttgggatggagggagtgacaaccaagttttttcaactagttgaccttgtaactcctttggtcctttttttattttcagcaatgctagcacttataaattacgaacatctctagttcccaatgaagtacatattcaaaatttctatatttgttttgcctgagggtcgagaaaagactatttactggtctctttctgacactgctgtcttaccactggatgccttgaaggcatggtaatcattattttgtacttatatagttgatatttcatgtagaaaattaattttattttatcataactggtttggaactaagtgattttctctttttttgttggtgtttgtttgttttgtgtgcatatcggtaggaaagcaatcttgggccactttgtccaactgctgcaatgggagacactgtagcttaattgtacgaggaggaaacaatctggtttgatatcctgttcgtcttccaatagcagctagtattacattatgttagtttaataattgttaacttcagtcctcactgggcaggcagatgccatccattcatctatgttgaattttgaaaaacaggacctatattagattatcagtagtagttgggttgttctaaatggttttgttaatgatagatcacaagtaaaaacattgattatttttctgatgaattctttgctggtatttgcaggtcaggtacctgttgtggcccctgctatttctgggatgcttccgaacatgttcaatttgactcaaaccccggtgagtattatgttgttttgaactttaggaatgaaccccctgtgagctatgatacttcagttatttgttataaagacacagtcctaattttctcttgtttttgtatcagttcactccgcttgttattcagccacaagctatgacacaacaggctactcgacatgctaggcgtgtttatgttggtggacttcctccaactgctaatgagcatgtaagaaatcatcctcttttctccacatttctcactttctgtggcttgtacttttgtgtgttttatactgatgtctggtcttcttttacagactgttgctgtatacttcaatcaagttatggctgctgttggtggaaatacagctggtccaggtgatgctgttcttaatgtctacataaaccatgataagaaatttgcatttgtggagatgaggtctgtggaggaagcaagcaatgcaatggccttggatggtataatgtttgagggagcacctgtgaaggttagaaggccaacagactataatccttccctagcagctgcattgggtccaagccagccaaaccccaacctcaatcttgctgctgttggcttaacacctggctcagctggaggtttagaaggtcctgaccgcatttttgtgggtgggctgccctattacttcacagaagctcaagtcagggagttgctcgaatcctttggacctctgcgtggttttgatcttgtgaaggacagagaaactggaaactcgaagggctatgctttctgtgtataccaggatcttaatgtcacggacattgcctgtgctgctcttaatggtatcaagatgggagacaagaccctcactgttaggcgagctaaccaaggagcttctcaacctaggccagagcaagaaagcatgctcctgcatgtacaacaacaggcgcaaatgcaggtatgtgctgtgttcttaaacacattattttacggagcacaaatcagtttaaacactagccttccaatttctgactgttgtttcttggacagaaactcatgttccaagttggagggggagcactgcctacaaaggtggtatgcctgacccaagtggtttcaccagatgaactgagggatgatgaggagtatgaggacatcgtgcaagacatgagggaagaagggtgcagatacggtaagcaacaatgaactcgcacattctcgcttcctgtgcaccaatcactctgattcagtttcataattgatttttgcctttgctcagttactgaactagtttccttttgtgtgtttgtctttttgtgtgtcttttttgtagtcccacatagtgccattgcagagtcttttatagtccgaccttatgcaatattggcagtcgggcatagcctacagaagacacacaattccaattttactttgctttatcagctttatgattatgatataatatgatgccatgcttttttctatttgtctatgttctcactgacgcttgttcaggtaacctggtgaaagttgtgatcccgcgacctgatcccagcggtgctcctgttgctggagttgggagggtgagtgctcctcttgctcttttgccaatttaatacaaataataacatcatgggttatgaattttgaaactgttctgaagcatgagagtgcattgcaggtgtttttggaatttgcagatgtagagagctcgaccaaggcgaagaatgggatgcacgggaggaagtttgccaacaaccaggtggtggctgtcttctaccctgaggacaagttcgctgaagggcaatacgacggttgaacatcgaagtcgccctcttattgtttctaacgcctataaggcggaatctatttacgtttaccttagttttgcaatttttacatctagttttttttttctgtgttagttgaaattttattagtagtccagagattggtgcagaatcatgtgtactttgggtatgttcttatggttctgacttgaaaagcaatagtggctggttgtgcctacgttctgtatttctggtcatgaagcaggccatggcaacattcgatcgtgcgtgttgtcagccgtgtctaattcattcggtcgcgacccgggcgccttgccaacgtgaaaagacaaaaaaaaaaaatccaaattggagaacatttatgacatattagcccagggcttccatgcgggctttgtctgttttcttttctcaggctttgggccgaacaaacaaagccttacccgaacccaacaaaaaatatttacatacataaaaagtttgtacatagaaactttatgtataaaacttaattttagatacattgaaatttctattgaaattcttgctaaaatttaatattttccattgtgttttctttttccacgtgtggagctcaagccaagctatgtcccgcatgcagggtttcccttaccggcggtaaccgcggttaccgggcttaccgcgggggtacggtaatataaataccgcggtaacctccttaaattcaaataaatttaaaaaataatttaaatttttgataaattttgcacagtttctcgcagtttttcacggttaccgcggtaaccgcgcggtaaccgtgcttaccgccggggcgtggtaaccccggccccggcggtttgggaaaccctgcccgcatgtggctccagggttcatggttataatcggtacattaaaaccaacagatacttagcaacatacctttaatttgttcttaggctaaatattgaagcacatttctaatgctgctcaataacgatgtattcctaatgccgctcaatcctactgtgacatggcttacaattcttgcgatatgctgatagttttatggtaaactaggagatgagaaggaaaatatgcaagcgggctagtaggaagaaaaatatggacacagaaatagcattgacaatcctggttaactaagagcaattcgatactaggaacacttaaatgcttgcttgtaggacaccacggacacatattgatggcctggtgcaatttcaccggatcatctgactatatgagaaccaggaatcagatgctcccaggattaatgagcatttgctttacctccagtgaagtgttctattcctcatgccacacattcctattgcgatgttcatgctttgaggttgaacttgcaaagaaagatagataaatacacaactgtgtatacaagaaccaccatgttaacaaatgtattatatatagtccagagaagagtaataattggtacagtctagtagctgtgtgatgttctcttacaacttaatagctaagtacatgggtgtgtacaagttcagcaggttcacgttctgcaaaagaaaaaaaaaagggactgtctactcatcatttggtagaaaaccctcctaatatcttgcaaatttttgaccattggattgatttgagattcgtgcaaaccccaacaaaccctaaccacttttccttcccctcctcccagccgccgcaaaaattgctcgatcctcctctcgacaccgcacgcattctgcgccgccgccgccgccgccccaccatgccgccaccccggctggccaaaaggtgtcaacggcg

SEQ ID NO: 9896 - DNA, 38887 bp, Oryza sativa
tacctgcttccctacagcttaacaagtgcagcaagaggagtcgacggagtcccgggattaggtcctgatctggatggagatgaggcaaggattgactgcagcttcagctctggacttggagcaaatccacaggcgctgcagccacagatcgacgcggcaacatcttcgagtccaccattggagcaaaccctagccacaggagagcagcaatatgaaggggattcgaggggagaaacctacatgggtggatttgaatgatttggagtggggaagaggaagaggctggatggatttgaaggatttggagtggggaagaggaagaggctggatggatttgaaagatttggagtaagaggaagaggaggctggaggggatgagaagaggagaaggattagatagaagtgaagaggcttctggacagggtggtgaatgaagtggttttttctctctctcttttttatgtgtgcccgcaaaacaccaatatttttggcgctctatccatccatctggcgccaaagcgaaaatagctacccacctaactcccaccaaaacctattattttcacttactgctccattcacgtcagaaaaatcgcattattgtgacaggttgtgaatcctcgtcaagaaaattctatttttctgacgttagtacaggctcgtcaggaaaattagatttttcgcgataggagccattgtacacgtcagttaaataattggccgtcaggcctagtccggtttctggtagtgatatactttcataataggattcaagttctcatattaggtgacattaaagaatcatacatacattgtgtgttggcttggacaacacatatgtagtcacgttaaaccattaattagagtaggtacaataatatggactccgatcaatgatgatataaaaaaaaaacccacgtaggctcgaacattaatgacttgacagagtggagggatgattattttacatattgactctaaggttagttgtggatgacgtaaaaacatttagagccaacagtgaatttatctttgcatgcatgcattattgttactaccaatatataaacattaatcagtcttggagagttatatcaactattggcctgctcctaatatgacatgtcctattgacatttattattaccacaattattcacatatactaggctgcacaaccattaacatggttatatcttatatgctttttgtttgttggtctaactcatatccctccatgtttctctatatatataactagaagtacatctaatttttgtcggccacatagagataaaaaagaatatagggaggcgcgagaagagatgcaatcttttgagtgaactactcatgggtccatatccttgttcacatccttaattagttttttcttcaaaaaaaaaaactttcctatttgagggggagggggggactatctggcttgctaatttcgtaagaaagaggcaaattaaccacaccgcttacttccaatataggaatgaggggaatctgtgaaagagcacatagagattattcgactgccaattacgagttcgacaaaagaaggtgatccaatcttgtattgactttcttgttaggcaaattttgctatacaataacgtgactttgtggttttatctctaggacacgtcaaaagtcaatcttcaggggaaatgcactctcaaaaaaatgtggttatttgctaatggacaccgcaaatattaatttccgactgaataggagagataaacagtgtgaaaggtcaaaaatacccttgaacccacttataaaattcttccccaacatctcactctcgaccctcctcgcttgatcctatgactccgccactcgtttctgttcttcagaaacaagtaaaaaagagcatttgactaattctatcatctatagtatgctttcatccatatgtacaagatatattgagcatgccgacaaattttagttcatgtgttaagagtgctctggtctaatatttgatatgcagcagtagaagttagttagggcgttaggctagagcttcaaagaattcgagcatgccaatgatggtatacggccttccttttaagagtttcgacaattaattaatactccctccatccacagaagttacttttgacaccaagaccacggagaaattaaatcaccttggatgttacaaaatcaaggaatgaatgtaagcatgcaaccaatgagtattttagatgactctttgggttctaataaaacatttaatttatctcttcatttaagtcttgaatgtacaaagactataaatatgaataacttatttgaaaaaactcgaatgtgaaataggtgcaacttttgtggatggagggagtatgtcttgtagatgatcgacctggcctgtaaatgctcagacaatattttttttaatttaaaagaaggcaaaatttgctacaggacaccaaaagattgtggcatttgctgtgagacacctgaagattgtgtatttgctcatggacactgaaaaaagtggtaattagctgctggacactcctcccattattttattatttccggtcaaaatggagagagaaactttggttaaagacaagtttgcccatgggcccacttgtcaatctctctttatctgttcttcttcctttctttgtctgttcatctctttctcattgcgccgccgccgagctccgctctggccgagccatcgtgcgtcgtcaccgtcggcagtgaactccggctctagtgtcgaccaaaccgagcatcgtgctcctgctgcaccacctcctcgccgtcgacgatgggagcagatcatcacgtgctctagcctgagaagcttcaacgagctgctcacgggagagctgaacacacggctgcaattgagccccgacgcgtccgtgctgtcgtcattgtcacttcactccccagcagcagtaatggcggcgcacccggcatcgacgtcgacgctcaactactatgcgacgttgttcgacggcctgcagcagagcacgacggcgccggcggagcgcgtgctgctcgggatggagatccgcagcgtggtggcatgcgagggggcggagcgggtggagcggcacgagtgggcgtgacagtggtcagcgcggatggaggcagccgggctggagcgggtggggctgtgctacagtggcaccatggaggcgaggaagctttgccgaccaaacattgcagacctcatccgtgctccaggatgccgccgtgcgtcattgccgtcagcggccccagcgatgcgctgccgccgccgccaccaccccgccgtggccgagccctcctggctcaggccggccgccgacgcgaggagaaatggggaaaagaaaagaagagagagaggaagaacagtacgtgtccaggggcattttggtacttacacagctctttctctctccattttgaccggaaataataaaataataggaggagtgtccaacagctaattaccacttttttacagtgtccacgagtaaatacatgattttcgggtgtctcacagcaaaggccgcaatctttcagtgtcctgtagcaaattttgtcttaaaagaatgacaggaactcaggaattaatggtcgacttatattggttgcctgaccacatatatacaccatttcgctcgctaaagataaattttctatcaattaactgccacagcccacacttcattcgatcttgcaccagcaaattgaggtgtaactaactccaaatttaagaaaggctcatatatatacatgttctagtttcccctgggtactacatttagtagatgcatgtttgctcgatacagactttttaattagtttctaaaagttttttattggtgcaaatttcgtgttacatgttcagcctgttgtaccaaattttattttatttttcaaacagaagggtggcactgggaatgagaggcagatggaaaaatgttggctgatgctgtgacatttagaggagcagcatggcagaaagagtaagtggagtgtgtcgaccaccggccttcagagcagatcagcttgcagaatttgccgcagtagcagctacacgactgcagttcctcgtgcgctctcacatcatatgatgtatcaactgtgatggatgtactttgagtgatggactctccataccacaaggtgacaactagctagctgcatgctggttcgattatgagccctagcaaactgttgatgatcacctctctaattaatctgccgcattagacaggagagaacgtccaatatgatattacatatgtcccaatataagtgcagtcgtggttttcgtgttaaacatttgaccgtttgttatgaaaaaatttaatgaaaaaataaaaaaaatcagtctcacataaagtattattcatgttttatcatgtattaataaaaaaatactaatcataaatttcaaataagataaaaggtcaaacgttggaaacgaaaacccacatctttacttatattggaacggaggcagtaagaataattgtgttgttccgcattaaatatctcaaggaataagttaacaaaattaagaagaatattagttttgttatgttggccgaccatgtttatcctgtgaaccaaagtaatttttgttagcttatttcttcagatattcaatgcggagcaacacaatcaaggactataaaattcctcaaggaatataaaattgctctataaattaagttctattgggtgagcaaagtcaattcactagctcttgaattatacactggcaaagtcagtagtccttccacaaattatatatatatatatatatatatatatatgcaatcattatttcactctaaaatattaactagaaatgattatatatccatatgggtgcaagagagaaaacagtgtaggagctgttgggggaatggctccagatttacggagctagcctccggttcagagccacccctaccctggagaagcaaccaagtcatttgagtctctcggggctgttaaacatccagaggctaatgggcttccagaggcatgatgagcctccggaggacagccagccgccgtagggtcacggagcccctccggaggccacatggtctccagggccccacggagtctctggaggccatcgatccgctggaggccaacaaggactccgaggatatcaagccattaagggccaatcgactttcggcaaacaacggaactccggaggccatcccggactccggagttggttaggatcatggatggccgggaaggccatgtgccagaagccattgtagatccttgaagtgtaatgaggagtaataaatacgcactacatatccaccaaccacctctggcgccatggcagggacgggcttgcataggccactacctgggaaacgcggctttacccgtgcggtggtcagagtttttgggggcgccgctgtaacgctccacttttcgtgagacgttaaaaactaattcggcaaaatcctaattgcgaaaatttttgttctttgtgtgcgagtctaagtcgtgccaagatctcatttcaaatcccgttgttccctctcatcgacatcaaatcctcctcctcaaaatttctcttccagttcaagtctccaaatcaaattccgaaaattcaatccctctctttgaatccttgccaaatatttgccctgactccaaaaataaccaaattcctattttgaactccttcccccaaattcaaattctctccaaatctatctccttaaaaaagtctacttgacctccctatttttggatagaccggttttcctcccctggcccatctcccctcccagcccatcatcttcccccctcgcacgtgcgttgcacgcatgcgagccgagagagagccgtcgctcgctctctctgtttctctcgctctctcgtcttcttcctctctctctctgtttctctctctctctctcgttcgatctctctctctcccatgccagcgctgccgccatcgccgatttttcccgctgccgccattcgattttcggccgtgccgctcgttcccgcgcgcgcgctcgctcgaggccagccgctcggtcgccgccgcgtcagcctgacgccgcccgtgactacgcgtcgcccagccccgcctgtgcgcatgcgtccaagggagggaggcagagccctcggcctcgctccctctccctttcctttatcccgaaacaggaaggagcagagctccctttcttctccacctttttccttttgcccgaccaccatcggcgtcaccgcctgccaccaccttgaccacgccagctcgtcgtccttgcatccttgaccgcctatgtcggttccccctcccaaaccgcctcttctccatctataaagcccaggccgagcctccccatctcattctctctcggcatctctcttccaccgccgccgcgcctttgttgccaccttgcagctgtcgacctcgcctcccttcgccgtcgcgcgtgctggtgaagccggcgtgtgcgcgaggagccgaagaggactccggccacccttcttcttccccttccccagcccaaggccggagaactcgccccgcgccttcgaccgcccatcactgcccgcccggctctatagtgcctcctcccgttccccttcctcgctctccgtcgccccctctagtctgcgtgatagctcagtggcactcccgaacacgcgtagacgccgcccctagacccgccgccgcccagcatggcctcgccgccgttgccgcccgctcccggaggccgccgctcgtcgccagccctccttggtgctcttctgccccatcggacgccggaaacggactccttgaaccccggagatgcttccaccgcctctaattgaatcctcgtcgcccctccgccgtttgccccttttctcaccgccggcgagcgccgccgcgattcgtcgtcgccggtctcccttcggtgaatccgagccggtggcgcactttatctcctccgtctcattattccggtgtgctccctccctctcgaatcgtcgcgacaagctcgggtgaactcgaacgccgtccgccgtccattcgaccgcgccccctttcttcctcctctcgccggcccgcgtggccgctgcgtaggcgccacgtcggtgccaactcggctagaccgagtcaaaccggccagcctcgcttccccctacgtgcgtgcgcagaccacggtgagccatgcggctacacgtgggcccatcgcgcctcgctccacccggcgcacgcgcccaaaccgcgtccaccaaaccctatcgccgcccctcccgtgagcccttccctcagtgaacctagtcaccgacaagcgggccccacccgggaccccgcgaggtgcacccggtccaccggtcggcctccccctcccgcgcgcccctaatgggccgaccacccgcgcccgcgccggcccaatggcctgaccgcgctgcgcatgaccccttgggccgcgcctaagccgcccgagtaagtctaaatgacatccctccttccttttcttttccaaaggatttgataaatccttttcctttagacagaaaatccaaataatcttaggaaatccatatctcctcaaccgctcgtccgattgactccattcctcttccagtaattccgtaaattgagatctatttaatggcactattatttagtctaaatagggtctttttcttggtcttttgtctaggttttcgattgtttgcgtatagttgcggttaccggattttcgtcgatcgtggatttctcgaagattcgagaagctcagtgaagactttgagcaaggcaagtcaccctttgtccaattgctcctataattggaaaatcattattattttgtttgcaacttgcattattagaatcacacacttaatttgcttggcctcggtttgtgtgccaaaccgacggacctacccagtagtcgcactaattcttgtaggctgtactatcctgattccttgtcgctccacccttgtggtacttcggtatccgtgctctctgagcgcgtatacctaatatcccacatacaccgttgattatcgaaaacttgggaaatgggtttgtgaagccttcaaaatctgacatgtggtgtcggtgtgtttgaaaataaaatgaattgtgaaaactcgcgatgcgggggttgtgcctatgtggcactgtcctgtattcgcatataaggaccgattcctgtgggaaactcatcgaacataatcaaagtgcaaccacaagatggaatgggacaccctggctaagtaactagtcggttcagggaaacctcgcatgccaatagttgggaacgccggggcggggtcaggacaaaccgagttcctggtaaggcaaggacgagaagcttgctctcttaccgatcaaggtggttggagttgatttgtgaatgcctaaaatggtctatatttatctgaggatttgatccttctatgtggcatgaggtaaccctgggtcggcttgggaaaggctttgtcacgaacctctgacaccggccagtgtctggagtaagttcgtgtcttgtgggtaaagtgtacccctctgcagaggttaactaactgttcgaacagccgtgcccacggtcatgggcggatgtgaggtggttcccgttgcgtagatttgtttgcctgtgctttgtgaagagttgttgtggattgggaatcgtaaccagaattagcctatgtggcagatggatgacctgagtggtcagaaacgaatctgtgtgattcgggatgtctgcgggcatcatagactaggctgaccgagtggaagcggattgctttgctgctgggcagctggactctgggagtctgcaaaaatgaaaaaggctctggcagccgcctaatcagatgaaaaaggatctgggagccgcttaatcaagtgaaatggctctgggagccgataagtaatgatctgacccgggaggtcggtacattaccatttgagttgttgaaaagcatctcttaagtcgaatcgagacgcaagtctccttttcgacccaaacttaaaaagaaataaatcacttagtgatttcaaaaatgatttcaaacaaaggatttgcaaaacaaccttgtctctcttccaagcttgcattaaacacctaagttcccgtgacttgctgagtacgaaagtactcacccttgctctatataaatatatatagttcctccgtcctgaagctaaagatgaagtgaattgaagaatagggtttcgtcctggttcccagccgtcgcctgtagtgttgggtgttagaccgttggttccgctgttgttgctgttgctggtgtttcctcgtctgtgtcttcgtttgtattctcaggctgtcctgagctgcaacctaagttaaggtaaataagtcctctatttattttaaggatttgcaatgattcatatttgtcaccgtgggtaccagcactatgtcctgggactggtactgtgatcgcggtttcgtaggaagcggttcacgccgtttttcctacgacacgctcctgtcaggtgccgttgtacgagcacagccgtccctgtcacggaggatattactaggagcccgagggctggcccaccgggcagccaccttagattagtccaagagataggggcaaaaatataatttcctcttgtatacctagtataaatgcataacactgctcacgattaagggcagaattcgcgttgaatgcactagttggaatttgtcccaacaggagcagagaattgactagtaaacttggcaagtgagttgctaataatttcacatatatatgaactaatacttagatggctatagctaggagcaatttctaattaacaggttagtacgaagctagtaggtaagggcaaatggaaatgggaggcatctcggagaaatgaaggactatggcacggtcgatgcctcggtggcaaccaactcatagactcttgatgtgtgttgagttatcaggatgcagttgagttggggaaaatgtgcaacttatatctactccctccgtttcgaaatgtttgacaccgttaactttttagcacatgtttgaccgttcgtcttatttaaaaacttttgtgaaatatgtaaaattatatacctacataaaaatatatttaacaatgaatcaaatgataggaaaataattagtaattacttaaattttttgaataaaacgaacggtcaaacatatttaaaaaagtcaacggcgtcaaacatttcgaaatggagggagtagtagagaacctagatccatcaaattttactcccggctaggatgggactctatctgggttggctgaagagaacaaaattagagttagtttagtcttaccaatccaacaggctgatcagcacagtgtttgcactttcgtttttgaataaaatttcacaatttcggggtcccgaaaattcaggatgttcaaaacttttttggacaaaattatttgaaaatttaacattgttataatatccaatattgaacactcaaatgtgctagagtatagtacaattaatacatattgcgttaatcaggcacaactaattaatttgcacggtatgtggcacagggtatttttttacagtgtgctgaagtaccgggtgaattgcaatacacagcatgtaaaatacaagacactcatttttgcaccagagcctctgtaattttttatttattattttttctttggttttcacactgttatactacatcttcctcgaaaaaaagtacactccatctaattgaaatctcgtggaacacgatcgaaatttatgatgtagctttcatgattcaaacctgaagaaagaaaaaggaatgttttttcacataacctattgcaacgtgcgtgatgcatgtcagagcaaaaaaagaagctgatctgcccggttagcagcgctgacatctttcaattatcagtgacaccagatacacctactgatatgcaaaagttgttattgcctctactacaccttctcctttaaatacattttatttattttcgtgcaatgttccattgcattctgagaaattaatatcagaactgtttttgtcatacatacttcctcctttccccctcgtttctcaaattgagcagtgtcatgaatcatgataggaatgggtggcatcaggaacacaacatttacaggatactcgatgtactcgatcgatgcagtccagcaacggtgcgtaaggtagcatgcgaccttgctaattccacccactgtatctctttcgtacggttgaatacactacactcattcaaaatttacaaatttgcagtttttcatgttttgatcatgaaaattaaatctagcataccatccctcgatgctcgagaagtttttgatgcaaactgttcagataaaaaatggttgcgtgggtagattgggccaatttgatccctttgtaactacatctgtacatgtacatgcatggacagaacatcactatgtgattctccttagttataaagttatcagtcccatttttccattaatttgcattaaacaagcttcaagaaaacacctgctctgattagctatagcttctttcaattatgagtgacaccagacacacctactggtattcaaaaaatgttattgcctccactagctaccttctcctttaactattttatatattttcccccaacgttccatttcattctggtcttccatatcttctatctttttaggcagtgagaaataacctcatgttcctatcttacttcaaccctttgtcacttagttcctctgatgttgatcagtgtcaggataagaatgagaggcatcagcaacacatcatttacaacatcattcacagactctgtcgacgcagtagtctagctaccaacaattcatgcactgctggggaactcatcttttagtcatgtttgtaaccccctttagtcctgggttgtaaactgggaccccgataccgggatgtctcagttgaaataaccgggactaaagattcatttttagtcccgattggtgttaccaactaggttttttctttttttttatttttattttactgcttgcatattgatttccccaaatcaagtgctcgctacataacaaatcacagattcatagatcaaatacatcacaaattctaaaaaaaaatacatcacatatcaaatacattgcaaattctcaaaaaaaatcatcacaaattctcaaaaaataaattcttcccccgcatgttgcatggccgcatcgtcaccatcaagctcccgtcgctccaccgctgccgcccgaccgcggccatcaccgctgcttctcccggccggctgctgtgggagagagagatatgcgagagaggcgagaagaccagagcgagcgagagaggaatttcatttattcgacgtgtgtggagatcaatagaggacaaggacgtgggagagagatatttagtcccgaaatatatgatctttagtcccggttggtgataccaaccaggactaaagattgttggggggcttgacacgggctgacagctattgaatcgggactaacaatgatctttagtcttggttggtaacagcaaccgggattaaagattataaagtgccattgagcttttgaactggcgctatagatattcgaaccgggactaatgtgatatcccttctccagtagtgttggtattaggtattccaattttgttttgggccaaaatgattttgaggcactgaaatttctgaaatttactctttttttgcacgaaattatttgaaaatttgactatatttaaataaactttgatcaaatccacaaaaagttgggaaaaaaaaccctgaaagtttcagccagtatattttgccagaatggggcgaaattaccaaaccgaaaatgtaaaccatcctcgatcctcagtatagaatgcttacatccctgtcccacccagtctaaggcatgaactcgaatgacccttaacgcggcaccatcatcatatttcctatggcagcatgccccaacactgccaaattcatatgggaattaaactagcagggagtaggcaactcgattttttgatggcattggtacagcgcagtgccagtgttggtaactatcgcggtggatatctactacactgcgtatgtttgcaaccaccttgctgcgagtatgctaatccacggagatggctcaattggactgcggaagcgcactggagacagcatcggcgcctgccgatgaagagatagtactatatatgatacttacacacctttctcgagttcgctggttcgattaataataactacagatcaaaaatctctaggcaatgggaattaattatgtaaggaacttacaagtttgcaatggtacataccgcaatcttcttcaatgatcacaaatcttgcaaagatctaagcattgaaattccacgtacatgtgagagaggcatcaaaagtgcagctagctaggttaattattagtgaaagggtatgtagtctaatagttacagtaacttgagtagtatccaaggtgttgagttcaaatctctataggagcgaatttcagattgggttatttgaggagctaagttcccaacttaaaaatgagttcaaatctccatagaagcgactttcagattggattgtttgagaggctaagctccccaacttaaaaatgctgcatgtatccagttagatgcagagaccagattaattaggttgcctacaaactgtcaaggttaatgcttcagcttcactttgtcataatggtcattatggttttgaacatgcaaatactgccaactagtacttccacatgcaaaaatcaatgtgtgatatcactaatttaccccttgtactcccaacatttccatttgcctccagtcaaaaaaaaaaacatttccatttgcccaacatggtcctgtgtatcaatgataagcccctatatccatttggtgcaatagaagaaaatattttttttctatgtgaaatagcacgagaggcttctattacaccatattataaaaaaaaataggaacagggctagagcagaagattggctagtgaactttgccaagtgactttctaataattttgctagctatatatatgctgaagtaatgtagattgctagctaggagcatccatgtttaattatgtacgaatttctaatggacatgagaggtatataggaaaaatgaagtaattcgattggtctcttcattgcacactggaggattctggtgaaaccgatggacatgccaaggctgcagtgcttgatctcgtcgttcttgatgagattggaagttttcaccctccaagtccccacgtaggcgatggctgatgctggtcaagctggtgatctgaaggagctagaggaggctggagtggaccgtagtgtttgttccagcccactgtctttgccttggaatacgtatattttgcttctcttatatctttgggctgtgctatatatgactggaataaatctattttatcttcctccactctttgggtcggcgaccgatgggctatggcctataggggcgggggatcgatgttggcctgtggttgtgctgatcgttgggccgtgtcgtgctgggccagcacgtcgtgccgaggaagaggcccaaacacggcttaacagttaggacgggccggcacgagcctgataacagttgggccgtcctgtgcctgggccaggcaagatctccatgccgtggaccgggccatcagactacgggctttttggccaactatactcaggacaatggctcaccatctcaaagaaaaaaaaaagctcatatttgtactgccctgggtactacatatatagtagatgcttgttgcttgacacagaccttttaagttctacaggttctctattggagcaaattaggtcttacatgtccagccctttgtatatcaattttgttcagaaagggaatgacactgagaatgagaggcatctggaaaactataggttgttgccctggagatcatagcagcagcatgtcttacctagtacatgaggtgagtcgatcacagccgttgagagcagatcagtttgcagtgatgggcagtgtggcacccatgacttccattgatcgtgagctctacacatcatatggtgtaacagctgccagcagcgtctccatggacacacagccgagttgagtcatgaaatctcaatgcccggataggaggtgtcagctagcgatctggatcatgatcagccacaacatattgttgttgttgagcactaattaagctgcacaattacacaagagaggatgattggtatgcataactgtgtatactaattgttgataattagcccatgcatgcattcatatggatgcaagagagaaacaggggaggaactgagaatagggtagcgaattttgcaagtgacttgctaaaaatttgctatatcctgaagtaatagtgcttagatgactatgagcatccaggtttaagttggatttactagttaacaagctagtactacctccgtcccaaaataattgcaattctatgttgtttagcatatattaaggtttgagaagaaagactatggtgccactcattaaatggtgtttatgtgagagtgagaagacggttgagggtaaaatagggagaaatttgaatgagatatgattgatggggcaattagtactctagaattataattattttgggacgaattttaaatcctagaaatgcaattattttgggacggaggtaatagttgaaaatgagaggcctataggaaaaatgaagtgccggacaaggtaatatgtccttcaatttcaagacatcttgtaagcaaattaattgtaacaaggttagctgctacaaattaaagcttgacgagtgtacaacttgtttctaccagagcatgcatttagatccatcaaattttattcccggctaggattgtggatcaaattatgtcatcatcagacacactggaaactcaaatgaaaatacacgtgctagactgctagtgtatggtacaattaatacgtattgcagtctatctaggaacataaatatcgcacaactattgcttgctatttaatttgcacggtatatggcacgggatatttttgttgcagtgtgctgaattactgggtgaattgcatgacaggtaaaattcaagaccctcatttgtactagactgcctctgtaaattttttttttttggttttgaccctgttatatagtccttctaaagaaatacagagtataataaagctgtaccaatgctgtatttgtgttttttttacactacatataaagagcaattttatgatccttaaggaggtaccatgaaatactattttttctagagcaattctacagtccttgaggaggtaccatgaggtaagaaccgtagaattgctcacatataaaagcatcagagtagtgcgaagaggagtgctttccttccctcgttcctctctagactctagtgtcgagcagtgtcacgataagaatgagtggcatcagtaacacaacatttacaacatattcccagcagctgatgcagtctagcgacggtgatcactgtagcacgcttgcttacatgatccacccaccatctctctttcctatggctgaaccagaaccggcaactagcaggcggcacgcaggtcgcctttccaccgttgttactgaggcgctatgttaacctgcttcactgatgcaagaaacttgacaaattggcgatgatgcatattgtatttggatgtaggtgggcaaacccgctaccaccccacataaaaattcacttaaaagattttagaattattatataggtggggcaaaaaactcgctttcccgcctccacttggaacctaacactgcactcttctttagtctcgcaaatctttcaatatttaagcatgtgaattaaatccactctatcatctttcaagatatttttaaggggagctttcggtggttgtaattttcaatgatcaatgtttgatccacatgaataaattaaaagccaaaaattaaaggccggaatttcacctccgggaccatccaatcagcccatgaataagataatcgaataatacctactaacaagagatattttataattcttaaaaggcaccaagagatattaaaaacttttagtgtaaatttatgcaccttctagtgctggaggtatcgagggatgccaaattttacactataaaatatggtatgtacctgtcagtacctcctccacaactgtaaaatcactcatataacaaaccatatgtggccaaaaacaacttctcggttgatctacactagctaaattggttgcaacttgcaaaaaaagcaaatacacatgcacgagagctacctaagctagcatgctagtgaacagcccagcaatgaaattttagcttcaattatgcagttagctagctcgatcgtgagaaatagttaagtgactcaccatctcaaaatctagctctatagaaccaattttttttaaaaaaaaagagtaaagtgtacgggcactccttaaacttgtaggggtatgccatctagatccctaaactctcaaaatgcatatttaagtcctaaaatttgtcatagtgtgtcatctagatcccaaatcgccacaaccccttcaggatcctacgtggcgctgatgtgacatgccacacggacatgatgtggcatcattttgactgacaaatgtgacccatttaatatttttccttcttttttttcttctctttgttccctttcttctcttttctctgtgacccgagcagaagaaaggaaaaaaaagaagaatgagaagaaaacgaaaaagaaaaagaaaagaagaagaaaaaagaaaatgacatgtcacgtccatgtggcatgccacatcaacgccacgtaggatcctagaggggatgtgtcgatttgggatctagatggtatactttgacaagttctgtaatttggatatgcattttgagagtttatggacttaaatgacacaatactacaagtttactaaaagaaaatggtacgattggctcagctttttagtaccctgagtacaatatgtcaatatatagtagacacatgtttcagcccgtttgtttacaattttggttatacaacttcttttgaaacaaatttagttctacatattcagcccgtttgtttacattttatttgtaagaaaagaatgacagtactggggaatgagaggcatctggaagaatgcaagccgtgacattggagactagaggagcaccttggaataaagaggccgtgtagggagtcgatcgtcgccgtttaagtccaatcggcttgcggcgctgaatacagcagcagctacgtctccggttcttcctgtgatcccatgtgatgtgtcagctgcctctgacgtctcgttgcgtggatggcttcagctcaggaattttctacacatacatggtggtgaaaactaactgaatgatcagtcgtaactgagaggggagatgctgccagtggcctcttgcagatgcatctattctccaaaactgattcgatcgagcaatccatggatagctagagagaattcaatcccctttagttacagaagcacatacacatggacacaacatagcacattgagatgctttccagcaagaagggacgacggtaccaaatcaggagcgttcattggatcgaatgacagagcttggttaccatcatactttgttggttactttatataagatagatccaaaggttataactaatagttcatcgatttaaaatgcataggagtattcaaaatatgtagcttaaattatggttgtttaaatatctaacgttattgcgaagtgagcgcaactcaactggttagatttcttgtggtgaaacttgcccacatgggttcaagtcatagacttgacataggtgctcgtatttacagctaattattctttcagtggtatgtggcgtacccgtcgacaacaggacgctcacggtgacttcatcaatctcaaaatgtgccatctcaatcttttgaaggtactctaagggctagggtgtacgcgtgttgagtttctaaaaaaatatccaatattattgattgtttctattttagtttaacaactaaaaaatagcgaggggatagcaaaatatatttgaattttttcttaaaaatgtattgattagtgaataatagctagtccgtagaatatatatgatccaaagtaatatttttttaataatatagttaacttggttctttaattttaaattttgtaataaataatttaatttatcccctacttaggctacatttgatctcattggttgagcttatgtagggcacgcaaaatgatgtaggtcatcaattcaatattaattaagtattatattacaaacatgaaaatagattttttttaaaaaaatgtatagaaagtatttgcaaattgaacacgacagtttagttgttcggagaacatggtcaagataaataagggagagccaatctgataagcattttagaacacaatattaaatttattacttatgtacttatatattgattaacttcattatatatatatacatatatatatatatatatatatatatatatatatatatatatatatttatatattcaacatcgccatcaccatggttcattgaacaataattccttggtctagtactactatatagcccaagagagaacggccatctactatatagctagctcatatgagaatttgcctctcttgttgaagtagtgggtactatatagaagatgcatatgttgcttgatagatacagatggtactatgaatgagaggcatcagaaagcatacgaggtgtctttgtgtagactagaggacaaccattagagggaaatggctatggagcaagtccatgtcgcctttagacctgatcagctcagcttgccgtctccacatgatgatcccagtcaattgccactggcatcttcttaagtcgacggcatcagatcagggtttcgtcacaccctattgtgccacaacatatatatatatatgtatgttgatgagctcttgaggccacccaagtggatatgacaatcagtgaatgcatggctgtattattccagtcttccaaatagaaaatgaagaaagtaaaatgccaaaatgaaaatgaatgttgttatattggagactatgcccaagtagttgtcgcaatagtgacattggagattagaggagcaccttggactaagagcacctttaccatccttgaaaagaaagaagggataaatcagggccgtccatctaattagatccaacggtggttcagactttggtaccttctagtatcgtctctccatctgcaccaggtacaaacctctaccccaatctccggcgagcccgtgccatctgtgcctcctttgcatgctcgtaacctccctttcagtgtcgaactccactgcatgccttgcccctcctccatttcccccatccgaaggcccccaaagcaacacctttatcttaatcaggacaaggcagcttaggggcgctcgacgtagaaaggatggtgcaaggaaaaaggataatgggtagggaagaacatgcgagcaaggtttacacaaattcgatgttaccaatcttaccccatgtcaatggatggcaaggtcttcctagctctattttttgcgagttccattacaatttgaacgtttgcctttgcgacgctccaactatgggggtattagagatatagagttatagacatgttttgtatcttgtcctagtcggtttccctaattctctcctgattctgattcatgtagagattaggaaccgcctctatatttactcgtggtccgtaattaatcaaattatcacattgactcaattgcgctttcactttgagccagagcctttgaagagagagaccctcttacaaaccaaggatgaccgaccctaaagacaattgaagatggaagcagagatgctacaatggggaaaatttattctccccgaatgctgtagacaactggaattcagcaagaaatttacatgtttgcaatgatacacgagttcacaaaggaaaaaaaaaagaaagatctataattacagttatatagatgcaggaaataaagggtactgtttccttaattagtattttatttgcttcacaccataagaaattttggattttgaatatatccacgcatgtgcttaatgaatctaaacgagggattgagaggctaaaatatcttataatgtaaaatatagggagtacaaatattacaaatcaggatttttttttatcctcccagcctgccttcacacattattttcagcttggacttcctactgcatctatataactactagtttgcatccaacattgcattagaatcaatgctttgtctttcagacatttccttgaaacgcatatcttcattctttgcatcctgaccagttcatcgaaaattggaatgagtggcaatggaatacaacctattatacctctgctttcaacggttcttatcctgcaatacattgagttcactcgttggagggctcttgcaacttgggaggcatttgcacctgcaaagcatgattaagttttgttctgaggagtaaactctccagcaaaaattcttgaagacgggagtatgtctgtctaggaaggattcacttgaacatctgaacttcgaagcttctcaaaccaaggttcaagttcctcgtgaagagaacactatcctcttactatgtgacatcatgtctctgagcaagaatatctaattatgtaccaatcgggaattggagaaagaagtactaaataaaattttgccgtctccacggagagcagggaaaacaacaatgctttcaaaatatctttgttgggtgcaattgtgcatagcccaggtttagcatctttgttgggttctatttatttccagcataattctgaccatgggatcacatttcagcatcacaaattggtccacacaagagttggataaatactttgcaccggaacattttttctagaaaaacattatgaatttaactaaaaaaatcacagaaatcttgatcgggttggggaaattgtataaatagaacaaccctatcgtacgtggaaatagacaccacttggatgagaagttagtatagctcaattggttagactcctggtcgtggaacctgcacaccttcatttatgtcctagactttagacgggcgctcgtatttacgtttaactattcttttatggcaggcaacatatctatccacagcgaaaccacggtggtgacttcataaatctgaaaatgtgctggcccatttttcggacgtgctcataagggtgcgtgtgtatgttcctaggggtgagggtgcatgtgtatgtgtgtaaaaaaaagcacacccagttggcctgcaggatcgttaattgttctgtcgctttcacctttatatactaacatctaattttacaattttccatttaaacttccgtattttccagtatcttttttagctaaagagaaatggtcacctgttcttgtcttacaccttcccttgccccttgccaaaaaaaaacaataatcacaatgttgagaattcgagataggaatgggtgacatggggaacacaacctttactggatactgctgatgaaacatgcctttatctattcatctacaagattcctggaaacaatgccttctttgtctcaatcccctgctcctacttgagaccaagagagaactcacaaaatcggaatgagtgacgtcacgaatgccatacatagtctgcgagtaaaaacaagtcaaaattatatatgttcctaagggcctgccataccagacacagttatagttagtctacatgctgatcatcgaatgagcttttgttacaggcaccgacaattccattttctcactgaacgatgagaattgaattacaatattatgtgattattcttcctatatatagttcccacttagacacatcatcaccatcattattgctagttggtgagctttctttggtattgctctagttgttgttggtcatatgaaattcgtgcttttttttggacccgcctaattttttggatgcgctcactactacatgtggcccatgttgccgaagtgaatggggatgagtttggacagtgctacgatccaattgaaacaaagtagacaaagctaccgataaagtgtcttactgaaatagaagaaaatgataaattatgtgcacggtgtcaagtggcaaatagccatgaagctatagttcttgcgagcaatcgcattcttctagtgtccatgcgtaaattttgctgaaagtaatgatgggtgggcagcgaaattagtactatgaaattaacttcttataattgtggacgtaacttaaagcctatgatccattatatttgtggatggaggactagaacgttatctgaatactagataaatatttaagactataccaaggtttttttctacatagaaatttttttaaaaaaaaggaggacttttttagcattctttaagaaattagacagccttcaactaaaacaaaaaaaaacaaaactataaaagtgttaagaccatttaccaggcatactttcatgtcaaaataagacacaattatcgatatatatatatatatatatatatctttgtttgtatttgtggtaatgctacaatgtgtattagggtattagctgtctgtttggtcatggagatggatgaatttgaactatactttactttcttctggctaatatgtggttgtccatatttatcttttctgttttgacattcaatttgcaagaaacaagttacaaaaaaaaacacctatgccaataattagcagtacaataactgttattgcgtccccccagcttctcctctataaattttgctatccattcaattgaatccccaccttttcacatttcaattcccctatgaaatgaaaaggaaactaactcgaacctgatgtcaagcattgtggcgataagaatgagtggcttcaggaagaagatgcgtactacccaaaagaagcagacaatctgtggacaagttccagtaggcatgttcagtacagaaggtgtttgacatcgttctgaagagttctgttcatgaacacacgaacccatcatattgcatctacgtcgttgtgatggctttctcgccacagttggcatggcgcgttgccagcatcgccaccgtgctcaacggccttcaaggtggaggcgggacagtgaccatggacaacaagagatgagagcatcgctccaagaggcattgcgcgattatgcgtatgtgcgtgctccttcgtgacagtttgctacgagaagagcgatagcaccttacagtacagtaatgtcgttgtcgtggctgtagactgatgattaacataataatcgagcagtccactatagtttacatgttagtgggagggcatgatggacaatgtttgaccgtcggatggcatttcgatgtccgagatgctggagtatgtgtccgaatatgtatttaaagttaggtgtaaattaggacttggagttataatatatgttaggatagaagtaaagttaggcttttatcataggctctcgcttaaattcctcccacatctatataactagttgcatgcaagtagaagagatgctttttcttttattcttttccttgccatgaatatcttcatgctttgcttcctgacccatgcatggaaattggaatgagtggcactaggaatataacccattataattgtgcttgcaacagttcttcttgaagtgaattgagatcacgcgctagatggctcttgcaatacaagaaacctgcaagacatgattttggttttttccatggaggaaactctcccacaacaatccctgaagactagagtacatttgtggcctggcaagatttggatgtatttctttactaaacatttactaatttgcaatctatttgagtttctgacattcaaacatagaagtctgtctgtctgtccctttatcgatcatcacatgtaacaatttaagtcaataacatttttttacccctcagctaaggctggcatgagttgtgtacacattacagcgtcgatcctcatatgtgagttgtgtattctttcatctacaaggttcctctaaattaatacctagtgccatcttcgtagtttagttcatgggaggcaacacgatcacaaattggaatgagagacatcaggaatcccacacttagcaagagctgaataattaatcagttaaccccttacgttatagttttttcagttcgcccgtactgatcatgtgcaacgaaaaaacacggatgatcatgttgttttcttaatatgacatcctgtactgataattttgtttgtttctgggaggctagtaataggagactggcgagaggattcagacattttcatcgttgctcttattcctttcagttcagtgactctagattcagaactactagattgttaatggacatagtagttgcatcatattttgcctagctcagttaacagaagatgtgctaattgatttttgttttgttttgtgaaatcacgctgtccggtctctctttctatcttgtgttgactctgttagtttgcaacttttcatagtggcacatactagcagatcatctaacccggcttaaactgtaataaaccatgctccttataatttgttactgctttctggcttgtccacaagaaaacaacatgtcatgaatccaacacgcactttggacctgattcagaggttgccatggacaggggcgggcccagtgtatattcaagggtattcagatgtatacccaagatttttggacaaaaaataggtatatatactctatatttcgtatatgtatttaaaaaattaaaaaagaaaccttaaactgctcatattggaccttatttcaccatttcttctctattgggcctaaacttcccactcccctccccctttcctctcagcccgcggtctaattgggccgttgtcaaccttgcatctcagcccatttcgacatatccccaattcccctcccatctaaccctaattcgcctccccatccatcccgacagttgcgcaggcgtgcggctggcggcgcgccgccgagcaggcggggcttgtggcgccggcccggccgcgcgactcgtgtcctcgtgctcgtggtcgtgggatgtggggcgccgcgccgggcgcagggcggtaggcggctgcgccactgagggctgccggcacctggcctggccggctgaccggctcagccgcgcagggcaggaccgcagaagcaggagcaggacagcaacagcaagccgcgcaggacaggagcagcacaacagtgacaacacagtgagtgactaaatctgtacatgcacaaaatttgaataaatgtagtgaagattttaggattgggagctgcaattcactgatttagtgagtacacaaatttgaataaatgtagtgaaaattttaggattgggagctgcaattcactgatttagtgagagtgtacttgcttgcttagtttgtagtggtctagtggacactggacggtagttcatagttcataccatattatcaaatttgtttaattttcagaactgaaacatgaagacgaagaagggccagctgttgatttaaactcttttttggagaaacaagatggggcttcattaaaaaaaattcaatttgcaagctaaggacaaggacatcatcgattattttcaaaatatcaagcgtcgaaaagttaatctctaaattgtaagatttcttcctaatttatcattttctttcatttttgtatttcatatgttattatgttggcactttgatatgtttaggcttttaggtgtatgaacaattttttttaccccttctcatttcgaatacacaagttcaaaaacctgggcccgccactgcccatggactcctacgcatactattgagcaatttggccttcaaaggaaagggtcatgctgacgaagccgatgtaaatctttgagcattgatccgttttttctcagtcttagctgcattttagttagtctagccttgcatatgtaggcaatactgaaaatagtccaggagtactagaattcagttgagcaatttccatttctttctttatgttgttgaccgatctaggagctatatcgtgggatggcgcggtttttgcgatcctgtacgctcggccattagatgcatgtaacaaactcccaggagaggagaataaaaggagaagatgaacccagaaaagctgtgcaagtttcaagcagcgcatactctatctcagctagctgctctgttttctgaatttcttcagtctactgtagcgaaacctacaaccgtcagataacacagcaccggtgagattgagagtgaaattgaatgtggtggagcatatttcctgacaggtcattgatccaaaatgtatattgcttacatctgcttgcaatccttcttcacgagcttaccatttgcttcagaggtttacatctatttatttgaagggtgagggagggtttttgcttccctccccatgtttttctcctctcttaatgaaatgtttcagcaatcctcttatgtattcaacaaaaaaaatgtttgatgtaattttacacttttatgacacgttgtgaaaatcttcaaggaaggaaatagagctagctagccatgcatgctaggataatgcactgcatcattttctaagtcaaatcaatatacttaactaacaatccaacaattttgtagggaggggtatatcctcaattcccatataagaagatgttatatgaccaattgtctcatcaaataattcttcatcctcagatatagcagaacttctgtatgatgaatggatatatccttaatacccagctgactggtttaatattatccactggatatattaatttctcacacgtgttttgaaatttattacgccaatatatggtgaagtgccaaaaggcgcaattggtcaggccacatgactgtttatgtacccatacagctgctttttgccaagctcacctaatgtgctcataatttcctccataaattatattttaggcagtaataataatgatatattgcttcttcttgatgctatccataccaagctcatcttgataatatcctaccttctttcacactatatatatagcagaacatcttgcagtagagaacttgcacacattttgctcctgcatgccttcttgctagcaagttcccattgtggccaggcttccgccgctggcctcaatggccagggcataattcttgacgaactccgcggggttggagtctccccggtacttagagagcttaggtggtcggaagcctggtgggtacagctcctcttgtagctgccacatcagtggggactcgaggtttacggcgatggggggtcccttcggaggctagcttccctcgatccggagatactcccccaacacccgcaattttgaagcatctgacaagaccaaggaatggtactgctccataatttgcatttacaggctggtctgtactctgcacacgttattttccagcttcaacttcctactagatctatataactagttgcactgcaaagtttcattagaatcgacgatttgtctttcattcttttccttgccattcataccttcatgctttacatcctgacctgtgcatcgaaatcggaatgagtggcgctaggaatacaacgcagtataactctgcttgccactattatgaaactacagtatattgagatcactcgctggatgtctcctgcaccagggaaaaattttgcacctggaaagcatgattttgttctgttccaaggaggaaactctcccacaaggccacaacgattgccaaataatggagtgcatctgttcatgcaggattgacttggacatcagcctcaaagagtggtacatgttccctgcagtgaaccttgtcactttactatcttagaatgtcaatgtattggaacaaacatgtaactatgaatggggaattggatactaaagaaaattttgccttctctgcatagagcagagaaaaaaaaaagcaaatttccgaaaaatcaacttgctatctgcaatcatgtatagagtaagattgcatcttattgtatgccggtgttctctcataattagccattgaatcatatttcagcatcacagaatggtccaagcaaagagttcgatggatcttttgcagagaaactccgcaaatgtacagataacatttaggaattaggatccttgtgatgttgtttgagtgaatgaacagtgcaatcatctttcagtagtaatacccctccattatttatatggttcgttgaagcaaaggaaaccacctatacttgtgtaattaaagcggtgatatcttcattttttaaaaaaaaaataagcattaacatcaaacaggggcggagctagaacgaaatggaggggtgcttaatttactttattttatatagagtttaagttgatacggtgatctaaatttgtgttgagagtggtgcatacatggtgaaaacagtgagttataactacaaaattttcttaactgagttcctaggcccccccccccccataccgtcgctccatccctgacatcaaacacacctcatctacaaaagttattattacttctgctaccctcgtctttatatactaacatatctttctctttccacaatgttcgatttcaacttccacaatttctatctttgtagctaaagagaaacaacaaccacacattcctatcttacagcttccctagcttgcagtatcgagataactaggaatgagtgacatcaggaacgcaacatttaccatttcccccacgctatgtcgacgcagtctagcagcagtattcagtatggcatgtgattactccatcccatctcgtgcaaggatgcaactggccatcggctacaccatctttcttccagaaggctgcaagaacaccgacaaccagcaggcagcaggctcatctatatgctcagtattctgcttctgttaatgctttagtgtcatgccagtgtcatcgccatgggtcacagtagattccatttgaatctctgaggttgaacttgcgaagaagtaagataatggtagtgaaaagtctaaacgaatcagtgctgcatcgacagatatatggacttaataaacagtggtaaagccagaaaagagagaagtaataatgtgtgcatgctagtatgacgttctattacatcaaagtatacatgctcagctattcagagttaacattaagatgcttaattgttatcatagtgaggctagaggatttaatttggtggcctcttgaatcaattttttgttcctagtttgcaaactaaataaattttttgtgcagtaattttggcacttcaaatacttttgcagtaccttcgctgaattcatagacaagtatatgctgaattcattatatttcttggcgacgaacgccggcgacgacgcatatcttttttctttcagtattgcggcacacgcacacgtatttggaatggacacacaagaacagaagcctttcagcaacaaatgccttcttttttttctccgttattcgcactgaatcagctaattatcacaagcgcacatactgcagagcaactaatttggctttataagtctcacgccagcacgcatgattacttgacccggactctactacatgcacttctccactaatccctgcaacacatgcatgtacgtacttatccactaagtaactaactagcccactaattaaggcatgcaacatatgcacgttgtaactagctagcaacttgacccatttatgaattggccggcctcaaactgaacacatcaagtttccagccatatgcaaacacgtctaacacatgatgtgatcacagtaaacaaaactaattaaccataaaagaatgatatgcaacaagaattagtgctaacaaagtattgatttgacttagaaaatgctgcaatgcacatcatcctaacatgtctagctgcatttcttccttttaaaatcttcttgcatgatccttccctttgatggccaaatttcccaacatgtcaacctactagtcgcaaggccaaagaatgcaacaacagctagtatggacaggccaaagttcctgctgcctctcatgtcaaatgcaagcaacatcaggaagctatatagcaacaccagtataggtgaagagaacgacaggacagagagagccagctcttaatttgttgtcacattctgctatatatgtaactgcccttccaacattggagagaacaaatttgacatttacagcttccaccagcatagacttgtattatttatgatgaatctcattgcttcaggttaattaaggaaaaagtgctatattcttgatatactacgtacatatcagtgcaggccacaggtttggattcatggcacattgttttcttaaggacaagcggcaggcttttattaaactaacgcagtcaacacaaagacagatagagaaattatcgcagctaataccttgatttcacaaaatgaaaaaataaagtcgaccaccgcatatatgctgttaatgagacattgtttattttttgttgaaatgtatgaaatctggcctctacatccaaagcgaatgtacagagctaagttaattgagacaacacatatgatgcagttaatgagttatgacaagttagtttttttaatgaaaaagtactatcaggtcttgcctagaagttatatattaaaaatataatatttggagacaggagtaccagtttatccaaatattacaaatgttgtaaccaatcaaaaactgctaaactaatacactcgttcaccctacactgaactgaagtgaattgaacaagagcctacaatctctaaaatcctctggctggccatcagtgttctactatcagaagtaaatagcatgccgggccagccatttactcttggaacttaagactgggctgcagatcattcaaatggactatgattatctttgatttctattgtggatgatcaataaggaccaactaaaactatgtttgctgcagtaccaggccttcgtaaacatactgtccagtgaagtcgacaggttattggattctcaaagagtgtggcatccctgatgtcgctcattccaatttgtgaccgtgttttctctattgatttaacaagaaagaaagtattgtttcagaggaatcttgtagatgaaggatacatgcagaggagatgaaggtgtatatatataggcctttatagttgactgtctattgatttattacatgtgaatatggccatgtttagttccaaagtttttcttcaaacttccaactttttccatcacatcaaaactttcctacacacacaaacttccaatttttctgtcacaccgttccaatttcaaccaaacttccaattttggtgtgaactaaacacagccataaagcttccaaacaaccgaatttaataactgaaactcaaatagctttgtagctagctagtaaattttatacagacttctcctccggcctatctgtaccaggatgatcttcaatgtgctataatggagaatcatgatcaggagtacaacagtgccttcttggaactggaagatacgcacgaggagagatgataacctcataaaatgactagaattcccaatagcgagcgtactcgcttgttcgtcgtctccagcatgctctgaccctcccattttacttacagtgagaggataacttcatggctagggttgctgccgcgaccggtagttcggaaattcaagtggtcaccagctcgctgcaagaattacacaagtataagctggttcatttcctttaattgagaaacacaatactagaggggcctaataagcaaaatatcactctctacggctacccaaggaccaatcttgtttgtgaccattcaaagtgacctgaagtcttggagatcctgaccgttttttcgtacaaatagggggtttccatacaaaagatccatcccactcttggcatggacatatctctttgttcaccataagagctgttatttggttcatatggggcgtttccacgaaaaaaaaacgcacggaccaatctaagacacgtgcggtgatccgacaagcaaatatgagaaattttatggtccttgaaaaagtatctcaaggtacctaaattttacactaaaatttttggtaccttgagatacttggtagctgcaggtatgaaattttacactagaaaatatggtaccttccagtactttttcaagaagagcaattctacggtctttgatgagataccatgaggtatcaaaaatttagtataaattttggtacctcatagtatctaggtaccaagaggtaccaaatttacaatagaaaaagtggtacctcctcaaggattgtaaaattgctcatactggaaggaaaaagatatgcgtcgtcgccggcgttcgtcgccaagaaatataatgaattcagcatatacttgtctatgaattcagcgaaggtactgcaaaagtatttgaagtgccaaaattactgcacaaaaaatttatttagtttgcaaactaggaacaaaaaatttgattcaagaggccaccaaattaaatcctctagcctcactgtgataacaattaagcatcttaatgttagctctgaatagctgagcatgtatactttgatgtaatagaacgtcatactagcatgcacacattattacttctctcttttctggctttaccactgttttttaagtccatatatctgtcgatgcagcactgatttgtgtagacttttcactaccattctcttaattattcgcaagttcaacctcagggattcaaatggaaatgcatggcggtatgagcatcacaatcggaatgagtggcatcagcaatataacactttacttgactcaaagaaaacgcccaacaattctacaataatatgcatcaatgttggctcttggatatggcagaactgcatcaagccatcagcgtgttaccaatatccaatcgctcttaacaagaactgtgcacgctaattatgttcatgtaaggcgtgagtgcctaggaaacctcagtgtgatccctcagcctcaccctcacatgactgacatagcgtgaaaataggagttggattaatacaacttagtgcttctcattcctcaagtatcaataaaattgttgtaaacaaactctctaaaaacaatttacaccaacgatataataagcagttgtcatctggcaaaatttagtccaaatttaaactacacaaggagaaaagaaataaccaaattcagtaatgaatattacttgcgtgcatttttttttgtgagactagtgccgtgcttgtgtgttgcaatgggattggaagaaatatggacgaatggttttatggggttcacttttttctggtcggtcaatttcctgaccagttagatccaacaatcggaaacgatttggtaccgtggggtactggtacctcgagatactttttattggaccagagcaaatctcttttctagctgcttttcctctcttctacatatttgtcaataagatagcagttcatcttgattatttcagcctctcttctccattcctaacaatttttcgattatgctgatattgcctaacctgatgctagtggggatgagtggcactaggaattgtgatatgtcgtttctgatgtgtgtaggttgtctctgacggcctgctactgaagtcctcatagctacttgaaccttagttctctagcagagcttggttgtactgtatgattgtgtcgtgtgtccctcatgtgcttaggagcaatgtctatagatcaagaacaataagtgatttaggctgaggagaattaagtgtaattatgtcttccttaaaatatggagaaagagaagtagctaggtactggcctgtttacttacaaagaatatggaacattggcatgcatatatgagcatgcacaacaccatttttattactcaaagatgatgacaacaatttgatgcggtatatctgttgcatttcatgctaatagagaactaagaacatatatttcaattagtagtacatcatgatactttccaacaacggtaaaaaaaatagctgtttagaattattgaaaataggtaatgtctgcagattgtagtctgagaggtgctaaaaattattacctctcttttctttctggcttcttttgctcctctcccctagtctatatagttatcaacaagattgtttatctaggctattgcagctagctaagtagcctctcgttttctccattcctcacaatttcattccgattatagactgatattggttaatctgatgttattattgaggatgagcggcatgaggaattgtgatatgtcctttggtctaagtcctgctggtgcatatgtactctcaagtcgccacgatttcacagtgtaattgttcgatccacacgtagaacatgtttatgatggcaattaactagagtattgcacatgtttatgatgtcctattaacatgacattttaggtgttccaggtatcgaattgctgctcataattaactaggacatcgttttagtattttctaccattgtcctcacatgtccatatattcttcctagatggtaattctctacttcccatttaccttgcttctttattttccttctcatttcctagtctaccataaagcaatcagtatcacatgaatgtaagccatccacaatagaattgagcggcaccaggaatacaatgctccaactcaactgatctgaatgtccttcactttcatcccctcagttgtttggctgaataaaacattaaaggcttgttgctaactcccaagcccagtgtaaccaggcgagattatttgatctattgcataacaacggctatctatgcagcttctcaaaacagatggaagcttgtgttcctgatgatagtgcattggcatgttcttactggccagaatggaacatggcctgcaagtgagtagtgactatagttcagaaaagtaactcgacttctctgtttgggaatgtcttttccaatatttattacatcgaaaagaattacaatttcctcacaaaaaagaaagtacaattagaactacatcttgagaatttccaatgaattaaaatataactctttagaattattggagattaaagtctgatgcattttacaacagtgtagagaacactatgcctattgtcctgttgacaattattagttcttttttctggcttcttttcctcctctctccaagtttatatatttgtcgacaagagacagacatgatctaagaaaagtgcttaccaactaatgaggcacattgcattgtagcttacacaagccatttgagttgtaatttttttccccttattactttcaacaagaccgtcctagtaacttgttgccatgatcaatggagaagaatgttaatgtgtgcatatatatattattagtctagtccctgttgagattgaacaccattgaaactcttgaggctaaaaaaaaaacaggaaatcatttcaaatgctgaaggctggtaggcgatatccctttgtctaggctccaccaatgaaacattgttaatgtgtgaccatgaaaacatctcaggctaccagtagccttaacatgttctatatatttcttcctacattgttttagggaaatatttcttcctacatatggttctatgttttccttcatctcccagtttaccataaaacaagtaggccatatgtttcagtaggattgcatggcatcaggaatacagtgcttcaacataactgatccaaatgtccttcttatcatcaacgatccctctactgtttagcctaagttaaaaatcaaaggtttgctgctaagtgccatctggctcctgagcccactgtaacctggaacctcatgaacgcttcaccagagcagaagggacagatcagaggagatggttcatctgttttccgggcaacactagcagctctgtcgtgtcaatgagtcaatgactgaaatcttttccattattaatttggtacctccaaaagagaagaatgtattatctcctcatagaaaatgtcttttacaatattgggtaactctcttcatgacaaaaaacttaaaaagaaagaaagtagtacatctttctaagagatgtaaaacagcaactcaatagaattattgaaatgtactcagggtttttattacaggtgacaaaaaagaatatgagagtagtggtaatcgggatttatcagaattatatcgccatagacaaaataagcaaaatttgaaaaaaaaaattggacaaaattatgtattacacctacccctgttgcatttctcactagtagaattaaaacactacacctacctcctgattgctggctcttttctctaacttctctcctagcaccaatacaacacaccgcgcatctaccatccttcttacttgctctaccaagtctatattttgatgacaagaaagttcatctagatttctttgtaatatcttgtcttctcgatccattgttcataatttccccgattctacgattatattgatgtttgccaatgttagtgggcatgaggggcacaaaggaaatatgatctgctatatgctaagcctctcaaaaggcctgctactcatgtctcaccatgatatgatgatggatcaagtgttgtcatcagactcgcagcggaatccaaggttatcgtagcgagttgcatggctgtgtgagtgtgtctgactcgatggcaaattcagaaattttctaccagaaataacatgtttggacaatttgctggaacaatttcttttcgagtcaaatcaaaagcataaggacacatatgagtatccgacacatagttctgcatcaatctctggcctactaaagaaagctccaactaacatggaaaactcgatgtaaactgcaaacttgtaggaaatagaattagcattgcaactttcatgtttatccgtcatattgctcttcagcaaatgcgttcggttgtgttttgtgactacttgttgagcatatgaaaactaatggtcaacaactggacggctgcaacaaagggaagaagctactaagtctaggatcttagctttcaaatacatagaaatggagagatagcagtgaacttgatcgtccttcaattcataatgtgcaggttgaaccaaatcaattttgtgcaatatgaccgaaagatgtgttgtaccaaaagtagaacgcacgatcaatcaacttattggctcctatgattacttacacatcatatctgcaatgtcaatgttttcccttcctttccatggagtagcaaagtatatagattattgtcaatttgtcatgcatgatcatttgaggaacatcgatgtgtgttcatataatcattggagatgattttttttttggaattgctaaacttctgtcagcagaaaatacaacctcaaatcttgtaaatttcggatcattggatgtgcttcacgattcgttctcttcttcttcaactccggcgaccacctcttcttctctggcattggcgaacccaaactccggcagagggccaacgaattagggtcccagggtggggtgggggtaggaggggggaggggagggggaagaggggggagttcgccggctttagagggatggccatgggaggtggcagcctggcggtgggcggcgaggcggcgcagcgtcgccgaagccgcgggatcgggagcgggtggcgggccggtgtagccggcaggggcaaagcggaaagagtggtaggaggagacggccggtggtggcgccccgccgctagcgacggggaagacgatggcacgggacaggtcgccgccaccggcttgaggcaaaggaaaggagagggagggggagagggaaggggagggggagggggctggtcggggggggggggtctcgatggcgcc

SEQ ID NO: 9897 - DNA, 23859 bp, Oryza sativa
cacctatcatacacactgcgtcttggagtccgtgctacagctggctacaaatctgtagcccgctacccttctctctcctcatttatcttcttaaaatatgtttgcagctggtttatagcctgctattgtacctgccctaagaaaaaacacagagatcaaaaacaactaaatcattatgtaattaattcacatcggttaagatactacactagtaatgtatcccatggattgcattaaatttttaatattgcatgtagttgtaccaccaatagtaattaatcttggttagttgtatgcagcgcattcaatgatgctaatttactctttatataaataaataaagatatatttgttaaatgatgatcattttggaaagatctcaaaaatcttagctgatgatcaaactggaataggaggagtataagttacagacaatatatatatatttatatggaaaagagataacaaaaattgagaagtgttggttctcatgtactacctccgttccatattgatcatcatatataagggtgtgttcggatggaggtatttgggtggataggacatggcggcccattttttgtggttgtttagttggtgggcgggagtgggataggacggcacggaggggaattttcctcccagatgccagatggagggatccggccgatttgcccagatgcagccacccaagtacccaggcgagcggggcgagtgagtatcgtaggtcgtgtcacccctctcaccatgcgagctcggcggtcagcgtggaaagaaggaagctgcggcgagcccaaaggcaagaggcggcagcgagcccgagagccagaggcggcggcagctagaagagggtgcgtcgttgccgctgccgatgacgacgatgaccaggacgatgacaactggatctggaggagatggggtgtgccgacgaccggttgggtaggagacaatgatgatgacgacgaggatgaccaaatctagaggagacaggacagcagccggcgagagaggaggcagggcggcggcggtgagagaggaggcgaggggcggccgacgaagaggacatttttttttatttttttttccgtttttctcctttcctccttttatttcattctaatttttagtttctatttagatttttttagtagattggtattattttgggttcattgaatttcaagggggtatacttaccactactaatgaaagggtgattgcaaccactcatccatcctactcccccaactaaaaaaaatggatcaccaaatccacattcatccttacaaccaattggatcgccatattcactccaccaaacaaaaaaaccggattgccatatccaataaagtatggaccgccatattccatccaaccttgaccgggaaccaaacacacagtaagctttcttaccaaggcagaaaaaaaacttaaactgccatgtattttatttaatacatgagtatgtggtggggaagaattaagaaacatgcatacttttaactccccatttgcacaagaaacaagggtttaactacttctaaatgtctatatgcatacatgcgcgcatactaaatttgcatgcatagatacaataatgttgcacgtcaaatgagtagaccatggtcatatgatgatcaatttagaatatccaatttttggttatataatgatcaatgaaatggaggaactagctgtacacattctttacgaaaatgcatagtgagggaaagagagagcagagaaaaaatagagttaatcttataggtagcatatcatatatgttagctctacaataaatttataacttatagtgagctctactattaaatttgctctaaataaataaatccatctagattcataatgatagaatatgctaaattcagtactatggctgtatttagtgcacaccaaaatttgaagtttagttgaaatttgaacgatgtgatggaaaagttgaaagtttgtatgtgtaggaaagttttgatgtaatggaaaagttagaaatttgaaggaaaaacttttgaactaaacacggtgtatgtttatttatcttaggacggagcaagttctgtcgactaacctttaattattttttttttaaaaaaagaaaccactggccaacttgctttgccagctaatcgttgtctcattgccactggccaacttgctttgccagctaatcgttgtctcattgccgggctccagtagtgcggctggccgcacgactatagtatgtcgtagatctgggttggtgtgcgtttctctcctaaaataggacgtggtcctcgcagtcctgcagatatactatagcgacatcccgtgaaatgtacgatctatgcgtttaaaaaaaattagaattatatccgtgaaacgtacgatctatgcgtttaaaaaaacaaatttaggattatatgttatttaaattagtataacaaatctagaaaaccattatatatttgtttattaaagaatggaaggagtattccatggtgcaacgcaaatagcattgccgattctcaacttcttagaactcataagagaccagcgtttgagtctactcaagattaagattaagagcagacacacaaaacaagaaaggtaatagcacatagttaattcagttttaattatttgaaacataaaagatggatttatttaatattctaaagcaactcctgcatagaaagtttttgaaaaaaaaaactatttagcagtttgaaatgtgtgctaatgaaaactgaagcaaattttgtatcttaattaggccgagtttagttacaaatttttcttcaaacttccaacttttccatcacatcaaaactttcctacacacacaaacttccaacttttccgttatatcgttctaatttcaacaaaactttcaattttgacgtgaactaaacacacccttagaaaaaaatggaacctagatctctaaagaatggaacctagatctctagggtacgagtaccactagtctacattaaatgctctctctgtttgttatttgacgccatactatcttttccatctctactagttcacattaaggctccgttcttttttatttgacaccttaggccgagtttggttctaaactttttcttcgaacttctaacttttccatcacatcaaaactttcctacacacacaaacttccaacttttccatcatatcgttccaatttcaatcaaactttcaattttagcgtgaactaaacacacccttactgtcttttccatctctactagtctacattaaggctctgttcgtaagaggggagttcacaactctcctctctcgttttccgtgcgcacgcttttcaaactgctaaacagtgtattttttgtaaaaagtttctatacgaaaggttcttaaaaaaatcatagtgatccatttttggaaaaaaaatagctaaaacttacttaatcacgtgataatggaccgttctattttccgtgcgtagacaatgagttcccaaccgccacttacattaagtaccacactccaggcctcatcttctactcccaccgtcccataaaaaccaacctaatcaagattagatatacctagaacaacaaatgccaaatccccacctaggttaaaagatacggaaactgcatgagaacatatgtaagcttgtgcaattacataagctagaccttgaaggatgtcactatcttgtcacgttgcctacaaagaagagtaaaatgaaggagcttcagtacctaaatgttctcaattgctactcactcacagcaatgcctcatgctatgggccaacttacacatcttcacacattgcttggttactttgtccccaacattggtagtagtgcaatgtcagagcttcaatcactgctagacctcaatagactatggctgtatttagatccaaagtttggatctaaacttccgtccttttccatcacatcaacgtgtcatacacacacaacttttcagtcacatcatctctaattttagtcatttttcaaactttgcgctgaactaaacacagcctatcactagtgaaccttgaaaaggtttcagacactgaagatgcaagaatggcaaaacttcaagagaaagaaaagctcgagacattgatgttgaggtggaatatggatgctggaaatgccagtagaatagatcatgaagtacttgaaaccctccaacctaaccagtgcctgaaaactttggagattgttgcgtatgaaggacatgcatttccatcttggataacaagcactgagccatatctcacatctctggttgagataaggttggttaatctgagatcatgtgaaaatgctttacctccacttgggctactgccatgtctgaagattgtggagataagccgagtttttttttttttgcgaggaagtggagataagccgagttgagaatatcagttgtattgacgataatttctatggtcagaacggtacatttccttcattggagaagctgattctctcattcatgactagccttgaagtctgggaacagtcatctaggatgaatctgtttcctcgtcttgcagaacttgtcatcattcagtgcccaaaattgagagcactgcatatggagtttccatcgattgaaaaattgattttgtggatgaataataagatgttgtacagctcgaaggaaggtctgagaggtgtagagaagagcctcgaaaatctttcaatttctttctgtgaagagttgcatgcttcttcaggctgtgagggtctacaggctcttgatcgcctcaagaagttggagatatgtggttgtcatgaattgtcatgcctcccacagggtttgcagcatctttcctctctcgccagcttgaaaattgataactgcaacaaattggagattttgccagaatggttggagaacctaccttttctacagataatgtgtttgtctggctgtccaattctgcactccattcctgaaggcctaacatgtagcgacattattgttgaatattgccccaattttaaagaaccatcaggtatgtcatcagtgctctgttcatggaaagccatgtttctgattttcattgagctattcttaaagcaattgaactagctttgatagattaaataaacaattagttatccttgctatttctttttgatgttcaagtgaatgaactcatgttcagttattaatacatatcctcttgagttgaattggcacgatatgaagttgtttctttcaacacttgtgacttattattgtgtgaaaaacagctgcacgagggcaaacgaatagtcgtcatggaagattagttttacattagttcagcgatttaagggaaggccaattttccaccgctgatcttaaaacattggtcaagacaaaaacagtggtgaactggtgatcagaagcagagatttcatgatcaacctgttgatctgtttctgcaactggagattatttttaaaattgaactagatttctcattgtggatgtggttagaagagaggaatagtaaatgggaactcatgaatttaatgcttgtgaagtgtaacttgtgaaattctcaagctactgtatcttcagaaatgcatgagaataagaatgatttaggtagcaatttagaaactatcaatttgctcctctgaaattcccagctatattgtgaggcatcagcaacattattaacctgaacacaataggttggtcacctgtgtaacaaaatgcctctgacattatttggttaagccaggattatcttacaaaggggcggtaccatgcataagaaaaaaaaactagttaatactctgatatttgcatatttataacacacaatatccacatataaataacattcaaggtgcttcaagctatcacagattaagagcaggtggtgacaaattcattagttagacaacacctggcagttctcacatctcagaactcacaagagacctagaggctagaaatggaacaactagcagtaatacaccatcatatacaaagttacaattaatcacgttcagtattaacatgtcatggaagattaaacaggtgccgcttccccttctgatgatgattttgacataaaggccagatcaagggaacatgccttcaaggaactcctcgaagccttcatcattgttgctcgattttcttgatgatcgtttgcgatctgcaggattttgcatagaataatttttcttgttaataatatacaaaagttttgacagtttaaattccgacgaaaataaagtaaactactacatactggtagtgtttgacttcataaacacgaaaaaagatccactgttccaggtaataatgcaatcatttttacctttttttcttctactatatttctcagttgattcatcctccgatgtatcttcagtttcttcacttccctcacgttctctacagtttcaacagaaatgtaaaagaaagtcaggtaacaaaaatcctggggtaaaaggtttgaacagaaatgtccaagaaagttaggaaaaagaactattggggaaaagaggtaccttttcctcttgtccctttcttttaactccatttccttttcacgagaaatctctttttccttctctctttccttctccttttgcctcttataagcaagcttttctgcacatctttcataatgtacaacaatcaataatcaattgaatatttggttgaacaaaaatggcaagagaagactagagagaggatgggccagagcaaaatagttgggatgcaaaatgtatgaataccaagatcagcaagataaatacaagaaaagaaatagtggatcaactgggttacataatcccaaaatgaagtagtggattaactaacctctggcaagctaccagtttcactagtgcttgtttctgctcccctgcttcaatataagaaaagttcacctgaaaacaagggggagagttatctatagcagaaaaggagttctttaatgaacaaaaggatctatgcattgtagcatcagtgacaagatagaaaggaccaagagcatacctcataactaccaagtccatttttctcatcacaaatcctgttgccacagagaaactgccctgcaaaagacaacatgtaatgaatatcacatctaccaataagaaaattagtaaaacagagcacacatttgaaaaaaaaaatgtatagactacatttagcattttgcgacagtttagtgcacctgaaaacacatggaattataaagggaaataccttttccagatatcacctccttttcagttctccatctcaatccaatctgaaataaatgagatccttagaatgtgcactcaacttccaagaataaaaccgatggttttatcaattaaaaaaaacctctaatatctatgagcagcatatccttgttagtgctgttctaaattctaaaggatacttagatattattcagtaacgaaccaagtaaataggatttcttagcgtccccactatcaagtgtgtgcctgtcagacattaacatatataaaagtatggttgtgctagtgattttgctgctctgtgcaacaataattgatactataatgcaactccatgaccaaaaacaagaatgatcactttgtcgatgctgctcacgcaaacttaatattacggatacgaaatcaacaattcgtattattcttttctttcttttaattgaaatcctcaatgttacagatataaatcatactaggagcatttttcgtcttttctattgcattaatagcaatgaggagaaaaaacagcaagaatatcattcaagagatcattgtatccagtaaatgacacaaataaatactgtaacaactattggcttattgctatagaattgtatcaccataccttgcctcttttgtactgggacatatcagcaatgcagtatctgtatcaaattaaggatcctaggcacaataaatttaagtttcaagaacattacaagaacagtaaaacagccagcaaaacaagttcaaggtgcaaggactacatctcttggttaatatagatagattataaagataggagcagaacttaagtgcttcaaatcaaacatagcaatcctggttctctctcatccttcatgttcccatcttctaaaataggtactacagaacttcaaaacatgctgtttctataggagactgactgacagataatattggcccaactatttaaggcataaatacaagaaactttatgcatatcatgtaaatagtttctcttaggaaataacccgttaagcactatatttgtttggaacgaacttgcaatattctctcaaagacatatactgatgcagcggacaacagtaaatacgagttatgcctatgagaataaccatatacatatgcgttatgtctacctctttgatgagaaaatttcactcatagtatcttacaatttatactgcaactcttatcttttcagacacgctaatgagtttgtgagataatatctacagttcatacccaattagtctattatatcaagctcttcagtcttcaatacatttgcagtattgctcagaataaaatgggatgaacttgccaaatcacctcagctccacaaatcagaacatgttacagaaaatttctgaagaaatatacactgtacccttaatgaaaagaatgtaaggaacacaccaccaaaaaggatactctttaaaaagcttgtcatagtaacgtttgaccagcctcttctcccaagtagaatccacatcgtcttcctcagaaagtatgaacctttatatggataaataattaaagaaaaggatttaggagtatttcataaagcatggacacacattccaccataaataaataacaaagggtattggacttgtttcttacctatatccttctcgcagtgtatctttatcagtcttgatgggtgcacgattatccacattcttgtcatggccataaaactgaactgttcacagcacattgttttttcagtgggaacttataatatcaagaaaagagggagataccaataaaatgccagagccaatcaatgaaacaataattttgtaaacatgaacatgatctccaatccacaattatttatacatccacgataaaggatgctgtggtgaggctacattctggttcttcatttatcatagtagtttccacttacatatctaaaacaaaagcttccttgtactttactaacacaagcaatagaatccaagtcacttgacttttataatgattttaaactgatctataatattcatagtatagttggaagatgaactgctagtcaatgacagcattgttcaacagattgggtcactggtatggcatatcagaccatcaactcccatatggaaaagatgcatacccagaataagtttcatccaaagctaggtgggaagttatatatcaataagcatagcccatgtatggatgaaggtagcccccaattctttctacagtagaggggactgttcgtcatccagttgcttttggaaactgagacagagcaaataattaactcgttatatgccagcgtctcaatttcctttacactgtgaaaggacaactttctgatccatccgttccatgcattggcatcaggaatcaaaaatcaaattgaactgggataacgggagttgtgccagaatatcggagtgcaagctaaccaccatttgtctgactattgtgaagaaaggcagaagcaaaactttaaaatgtgccattttcctaaaacagtgctattaactgtaatatattatcatgacattaccattccactatcattatattttgttccaatgaaatctgaactgaaagtagccctagatctcccaataaaattttaaaacaatcaagaaatgcttaagaggtggaaaagaagccagcaaagaatcataccataatccttcatgaacttcttgtgtcgatcatacgcattaagcccccgaatgtgcgattggtattgcctgcatccacaaccaatccatatccatcagatgaaaaataaagcgagcgaactaacaaaaagcagtgcatctatctaatattccattgcccttgagtggcaaatcagcctaacttaactcctatctcgaagcaaagattgcaaccaacaaagttagggttcatcgacatcatcacttcccctattcgcactgacccccaacacataacggagcacagaaataccccttcaaaatcacactttgacagcatcagcgtcaagaaatgtgaagctagaaaaaacaaaggtttctaatcgattcgtgccacacacaaatccgaaagaaagggggaaactttggtgcaggaacagaatgagatgggacggggattgggcagaaaagcaaatacatcttcctctcctccttgtcaaagatggaggatttgagcctccccagcgacgacgccatcgagctctcgcctcctctacctctcctcccctctctctcctctcctctcctctctctccccagccgccgccaccgtcgtctcctctggttcttgttgcttcaggtgtggatcgtataggccaaattgggccttcgtttgtagcccatgggcagttttgggcttgggcccatacagttgttgaagagagcaacagaaggcccatagatgaatgggttttcatgtaattttgcagaattcattcatatcgaaccgaatttcacagtttacaatctggttcgagtaatgaatctactgagatagtagggtttttttttcgcgaacgcgcaaaaaaattgcacgttaatatattagaagaaaaagagttttagttacaccacgcaatcaaccagactggcttatgctaggggaaggaagaaaaagcaaaataagaaaaaaaaacttaagcatagagaaactacggcggctaaaaacagactccaagcagcgagaaggggctaaaaacagagttttttttttctccgtccatacattcagaggtataaaatccttcgaatatttttgtttatcccatgttagtccctacatttctctaatatattatggacacaaaagtataatcatataaaagtacttttgaaaattaatccaatcacatcaattttgcttcacaaaaaatatgttataatagaataattgttggtcaaagttttgtcgtaatgaaatttaatggtgtcccaatgattgcataaaatttcacaattggacataagctaacatatggcatatggaatttctgaaccgaatatgttttacagacgaatgctgccatctttcatgcaaggactatcagtccatgatttccttttcacgttaggtaacacatgaatgctgacctatcaaaaacaacatggatgctgaaattttagacattatgtacttcattgtaggaaaaaaaagagcaatcactaatttcttttgaggcaaaaggagtaatcactaataaattttggctgtcatttgtcaagcagacacaaacaaaatgagaaatcctacagatcagcaaacctgcaggtgaacattatatgatgcagaaagccccaaaagcgacaacgctttcattcagatgggagaaaaagaagatgacaaagcttactagaaagaatttgtcctggtcagcagctcaacatgctccgagataagcatatccagttaatatgacacgtgtccggaccctactggctagcaaataaatcattgtcagtgatggaaccagaaaaaaattacagagaagtctgagtaagttaaaaaaaacatataatagcatgttccaaatgattgatttcaacagactttaatcataaatcatgtcctctctccgtactcgtaaagaaaatcgtttatgacaatgtttaagtcaaaccttgaaaatataaatcatgaataactctcgagttattgagtttgaaaatgtaaaaattatatgaatagatttgtcttgaaaaatactttcataaaagtatatatatatcacttttcaataaatatatttatagaaacaagaagtcaaaattgtgttttggagaccgtgtcgctgtccaaaacgacttcatttatgagtacagagggagtatacaattagtatgctacatggagcactcagccactaaattaattgggacatatccttcattcttttgcatcattggcagtttgacatcgtgtggtttaggtagctacaattcgtgtgatgtgttcatcagccttttccccatgaaagcgaaagaacgattagaaccagaagctgtattatgcacatgtctacaacaacattgaatcccatgatttaatggttatctaccagacagctttacattgaatccatattattctggatttttgggcatcctgtctctcaagcaaaggctggtgaggctcttgattgcttccataaagaggcattttttgtagagcttttttagtataagctcatactatgattgatgtaccatggaatgtgtgaattttgatccatatgtttggtcatatgtacagtcatatagctgaagggctcaataaattaataattttatgattattattcaagagtagaaataaatgaattttaactattataaagttgaaaaatggatttaaaacattttttaagaaattcatatgtagaaagtttttgcgaaaattcaagagtagaaattcattctttttcattcatttaaaaagtacacgccctgagaaaaattgcacattttaagagcaactgaaattggggagaaaatccaaaagaagctgaagaatgatatggcaaatgttgatcaatccaatgcacctggactagtttcttcgtgaccatcttttggtgaatgattgcgtacattgagatatgatatatttctgtataatttaaaggtactttttagatcagaggccttcaggcctggcttttatagaaagccaaacacataatttaaaggttgaaaggtaaaaggtgagctaagctaaagtaaatacgcattgcttgttctgttatgaaacactgtcatatatttccctctgttgttattgttcttccaatgattttctgcatcctgcagagattactttgtcgagtctcgactatggagatggtgaattggtgacagatgattcttgttaaacttgcttcttacattaaggatgtgtttagttctcgttaaaattggaagtttaattgaaattggaacgatgtgatggaaaagttagaagtttatgtgtgtagaaaagtttcgatgtgatgaaagagttggaagtttgaataaaaagttgggaactaaaccagacctaactttgttgcccgcataagttcagccttttcagaaatatgttctttgttgtttgttcaattgcaacctgcacgcaaaaataatttgtccgtcttttttccgaggacactgggccttaatgtgaactcagttaacaaaaatgtgatgaattggagttagtgtgacccaagaagccattatgaatgatattaccgctgtacttgcagacttgcacctgaattttggatttgagataggcagagctcctgccattttcctttaaaaaagataaaaggatttgagttgatcgagctgtcagcttcaggcatagttcaaggggaagtaacttttataagttgcttgttcagttctcactaggatttattttttttgttttgaaaataaaaaccgttcttactggtttaccgaaaaccaataaaactagtaaaaaaacgacgactttctatcaacacattatgaaaaccaactaacggtttccatgaaaacggatcggttttctaaagccatcttttcagataatgggaatagttttcgatccctatttaatagcagtagtttcttttgccttatgaccaaggtttactgatacctagttaatagttaattgaccgtactaaccttttatccgtctgtgattcccttcgctataaatcagggcagtaagatattttggccttttttttcaactgtcattttcttcagaccagtaatcaggatcaaatgatcattgtttactagaaacagtccagcatgtcacacacatggttgcctggatttcttgcaagatctttccatgaaaaaaaatgttgatattgcaaggctaatatagaaaaaggcacatagtagaataggctttcagcgtcagtgcatctccatgtgggaccctttctctgccgacatcttgcttttggcaaaatggatagataggaggctcatggttgtcatcaaacctgaagctgtaccttgaaatcaagaatttggattacttacgccgtgtttagttccaaaataattttttaaacttttatcttttccatcacatcaaaactttcgtatacacacaaacttctaacttttttatcacatcgttccaattttagtttgaactaaacatagccttacatgaatacaagtttttttttttactgaattcttactaactctgacgaggcatgtgtgagttcatctagatttggtataacttccatctaaataaatcaaacgactgatatcgttgtttgtagaaattttgtaaagaaaatttacatgtagcttaaaaaaacccatgtgtatttgaagtattcccttctctgcagtcactatcaagtgcaatctgtcatgtaggattatttattcacaaataaaatgggttgtgctataatttttctaggttagtttgtttttgcttgggtcaggatgacagtgactgcagatacagacaatgggagcatgaagattaagagtttaaaaccacatgtgagactcatcatccaatcatgcatatagctgtcaatactgagaaaaatactgtagaaaaatacataaaaattcgcatacgtcaacacctctcaatttgtttctcaaaaaaggagtacaaattgcagccgcctttggagaaaaattctaacaaacaaaacactttaaaaagaaaactctgcaataaggtctagtttgattttctaattttctgatgacatctgagggctacaaaacgatgaatgaactacttcaaacttaaaaagctgttttaaaaatactctaatcacttttaaatctttttcataaaaaaaacatcccgtttacaagtttcgaaagcgtgcccacaataatttataatctataagaggaaaatatttggccctaaatctgcccaaattatttaaccacctgtaacaacttcacatacacactagctcacactaatgctaatttgttaatcattaccagccaaagtttttaaaacgttaattattccttgtaaagagatactccctccgtttcaggttatacgacgttctgactttggtcaaattcaaactactctaagtttgattaattttgtagaaaaaaatagtaatatttacaacactagcagagtttcattaaatatataattgaataaatttttataatatatttatcttaggttaaaaatactattacatttagagtaatttgattttgtccaaagtcaaaacgtcgtaaaccgtaaaatggagggagtacaaaataatgaaatatttactccacgtggcgttatcccattggcttagggcttccaacccaagccaatttctttctcaatctctccctctataaaaataccaaccaaagaggaaaaaatcgctcgaaaaatacaaaaaaaaaagaggagaaataaatcaaacacctctcgcccaccctcccccaccagatgccggccacggcgagcggcggtgcgcggccggaggaggcggcggcctcggcctcgccgccgtcgccgaccgcgtcctactgcatgggcacgaggccggaggagctgacggcgaggctggccgccgccgccggggggcgacccgtcggtggcggcggccgcggccgcggcggaggcggcggaggaggggaggaggagggggagcacgagcgggtgcgcacgctgcgggagatcaagaaccagatcatcgggaaccggaccaagaagctccagtacctccgcctcggcgccgtgcccgccgtcgtggcggcgctcgcggggcccggggcctcccccgccgcgctcgtgcaggccgccgccgccgttgggagcttcgcgtgcggcgtcgacgacggcgtgcgggccgtgctcgccgccggggccgtggcccacctgacgcggctcctcgcccaccccgacgagaaggtagccggtctcttgcttcgcttgcttgctcacttctatggatttccgatttgtatcgggcgtgaaatcttttgttctcgcctagcagaaatttgttttccttttttgtggattaattattcgtctgggagaagatctgttgcgtagaggagacttgctcggaactaagcagacagcaagcaactggttcttgcttgatttcttgggaatcatatggtgtagaatttgggttatgtttgcaatttgggaacaggaaaagttggatggcaactgaattgatactatgaagaattagtgattagattggttaacgatttttctttactgctgatattgtaatttagggtgagaaaaatttactggtgcgatgtgaagagtatttgcttactagtccaatttgccatgaatgcatttttttttactgtgtcatcaatgtgtttggtaaataaggtttagaggtgagtaagaatatgaaaataaatgtggtaattcgatagttgctttgtgaattggttggaaagaaatttgtactagggggatcatgattggtggtttgggttttgcttggaatgaggggaattatttgatctgaactataggctaatctgtcggtttagctaagatgagaggtactggtggttgtcatttctttttccttttcttttttaatgtccttttctctctattttattttaatttttttgattaaagtactgaaggtattgttcaatttatgcttgaaatgtgcagagtttggtagtgggtcaatggttaggtgtagtggtggggatgaatgtgctggaaagttgtctgtttcgtgttagtttcatgatgaatttgtctgaactgataactgaattggctttacagatgtaagcatgaaataagatgtttaaatagcttcctctgggtcatggtaaaactgtagctcatactatatgcttgaactaagagtttggcagtagtgtgatgttttgtgcaatggtttcttggtagggaaattttgtgctgaaatccttattggtttgctgtgtaactggaagttcttgattgccaggtaggatgtgggtgccctttttatttgagatttgaaattgacagttgaaggaaactttaaggaagaaatcttaacactaaacaaagtcatgaggcaattcaaacttgtgattcttccataacaccgaatatcctgaatcactaaagccttctttgtatgagctagaaaagatagttgtatcatcctaacacaatccacatggacttaactcgtaacttgcataggttgtagctcaaaatttggttacccaggtatatctcctagcaactttactggtatagaagtacatggtatagaagtacatattgcataaggatatggtgacaagtcaatgtacaacttcggggaggtatacttacattgttgtcagctactcccagatcagctccagtattttgaagatacagccatgcatacctcaaaccatatgctcattgtgcctttatgccccaattactagttatagctctacctcttccatccctccctattcaattcttactgaccaaacaaggtagccactattaccaccacatcccacatcccactgcctccttccccatgttgcttgtcgcctcccttcagtctctccctttgttgcatcttcaaggtggaggaagtgatgatgaggcatagggcagctgtttgtgttacagaagtgacaattagaaagggggcaaaacatggtagatgggttgaaacaagaaaaagagatgaaacaagtcaagctactttggtagctctctattgtcccatctctaacatccttccctaaccactcttgtcgagttgtcaggcattaattctttcaagatttgctatagcactgttctaaaaggcgttaggcatatacatgcagcagggtggtgtctagttcctacactgactagtcaggctaaacaaatattaggtgctaaccagtatggtgatgcctggggccttttagaacagtgatagtgggatgccaatttatctgaaaaaatgatttgccagttgttattttgctccttatcttgtctagtattgatatttgaaaaaagattgcacattcatattaaggacataaataaccaggaaaggccacaatatacagttattcaaagcagggatactcgctgctttggattaaccagctagcttctgggcttcgctttaacattctgttttggaaacatttataataactaaatgctatcttaagcatctagtttgtacagttgaacttgtaacaatacatgaatgcataagagttcatatccaagcaccctcttcattgaaacatggtgttttggtgctatctgatattctgattattttcatgttatattgaattgtttataaccattaatgcatactatgaataataataataataatatgatctgacccgaggttatattctgattacaggttgttgatgctagtgcacgtgctctgagaatgatttatcaatcgaaactagctccaaagtttgatgtcaacaataatgagaaaaacatggaatttcttcttacccttttgaacagcgagaatgaaaatgtcacagagcttgctgccaatattatatctcactcttgtgatagcactacagaacaattagcactatgtgctgctggagttccgcagagacttgttaaccattttggaggctccatgaatctacgggatgcttgcttagattctttgactgcaatcataagaaataactgggaagttgcttcaagatttgcactgctggaccatggaaaagctttgcgctcaatagttgcattaatacatgatcggagcccacgcacaagactacttgcttgtttgtgcttgattgcgcttagccatgcttctccctgtcactttcaagacagacaaattaaaaccaagttgatcctggtcttacttgagctcatcgaggaacctggtcatgtaggagatgatgctccattggcattgacaaccttgatcaaagacagtgtggaactgcagaagcaagcactctcaacaaacgcagttcagaagttaagcaaccatcttatagcaaattcgttggagtcaaggcgtgcagtgaccatattgcttgctttagctgaactttgctcaaaattggaagaatcaagatctcaacttatgtcagttcaggtacgtgcaggactttgaatggtatattgatcattgctgctctttgccctttgagtaaaattttgtagagttcatctactgttattgttaagcaacttgtgacaagaaaatatactgactccatgggctcctggcgtgtagtagcatgaaaaaggtggattttatgattgtcagttgatcaaacatttgtgactaacaaattaattatgtaacaggcatctaccttaatccttgatgcactgaagcatgcttctgttgatatccgtgttgcagcatgttcatgtcttaagaatatctctaggtcatccaaggtaagacacatactccttatgtatattcagcgttatgtgttcatcttacatgatttgagttgatatgtttaatttcaggtacttagtgctgggaaattatcctgtgatacatttattgccccactagtccagcttttgtatgactcgtctatgtcagttcaggtaatgtaaaattgtgaagcaaccttcagtatcatttttaaggggcaatgaatctgtaattgaaagcatggtttcagaaaccacaaggaactggccagctcctgctggacagcgcatgattctaatagattagggcttctttttttacatgatctggcaagtacttggtggtatatgttgtttggaataaaaaggtcttgagcaattcaatcaagtcgagttatagttctaacttggtcagatttgaccagtaagcgactatctgtccatgtccaagaaattttcaaaaaacaaattttgaaacactgcttggaattgccttccttctttgtagagggttggtcaatgggtttttgaaaggaaaatcttggaagcatggcagcttcctcctttcctgatttctctgcaattttaccttctttctgcccatcatgggctctactgtaattcttctaaagcatcatgttgtactaactgttttcgtgttagattgtaaacctacatatcactaagtaatcaactgtattagtgacttaaaaagtaagatgttaacttaggagaaactcttttggtcgttcatacctaccatggactcattttatttgagcaacctttccacttaagggacactacattagctatattatgattgtgaaacgtcattattttaggtctttaatcccttgggactttgtagaatatctactaaatgtctgtgttcacaaaatggtattacaggttgctgcccttggtgctatttgcaatattgctgtgaatttaacacccaggaaatcgattcttcttcaatctggggctgtctcccagcttgttcatttgtccaagtctatggatccaacattgagattaaaagctgtgtgggctcttaggaatattatgttccttttgaatccaaaggataaagactttattctcaaggaactaactttatctactctttcaagcctcatatgtggtaagtctaaatgtgcagctatgatattaggtcattgctgaatcagccacactgctaatgcaacatttcttgcagattctgaacattttgtccaggaacaaactttggcactggtgcacaatcttgttgatggatatgtgaactcttttaattatgtcattggtgaagatggcatgattttaaatgctatttcaagacaactgaataatgcacctgccccaggagtatgcatacaggtcagtatttcctaaactacattatactgagttaccttatttaaaattgggcaaaaggaacatcttgtctgacaaaaccgtgtaattttagtttcacattctttatcgggatactatttattatcatagttaatcattggcatttctgttacctctcttcagggtatgtttgtgcttgcaaatgttgcagctgggggcgaattaaacaaggaggctgtgatgaatattcttgtacctcgtcgagcagatcgtgtcaaacaatcttttatagttaactttctgctgagcaaggacaaacaattgagagttgcaaccttgtggtgtgttctgaacttgatttatccaaaatgtgaggcctcttctgttcgagttgtcagactccaaaatgctggggtaatttcacaagtaaaaggcatgataaatgatccctgcttggattgcaaggtacctctttgttcttttatttattgagcttgaaaaaacacacgattgtcaatcagcgtcatgattacttcattgctgctgttagatatttatggtccacccatccttgctgctcctgtcacattagcatgcatgagtacttttgttgtcggttcgtagctttatctagcctagcctgatgttgcccactaaattgtatattcttgattgggcaaagaaaatgtcattttacctttgctatgaacaagcatttgacattagcaaatttacacatattgaaatactctataggaaaacaaatagttaaaatctactcctgcaaaattctaagcacacaagcactcgatggcctcaaatgggtttatatataaggatgttgattaaaaccaataaaacaaaaataatgcaagatgacaaacatgtctggtagttggttagcatttgtcggcatatgttcttgaaccttacaaaccttggtttgtgcttaaactaacatcccaaggtgtcccttgtgcagcttagagtacgcatggtgcttgaacactgcttggacaatgccgacgatggtttcatgtgagcagccgccattgcacctcgggccattgaagcttgcagaatcaaacactgcttgagcaaagagaagatggaagattgatctcttcgcatcagcaatccgcgccatgaactgtgaacaatgatcatccagtaaaaaaaagccttcaccgacatcttctcgtcgcctccaagcctgtcattgtaaatttggtgaactccatgaggaccatgactggtttctcttgcagaaacaagcaagaaaccttgttgtaaccatgccacgtcagaaaacctgagctgatttcctccgaaacggaaaaaggttttaggtgctagctctggagaaatttcattccttagcatgaccaaaaacctagtgcttgtgctgtgacgatgagtggtgagtgtataattgagggagatatgctactgctgctgtaaattgtactactctcttgggctatgtttttcacgttcggccatgggacggtgcccagcaagcagtgtgtaatggttttgccgcttgcttttgcttctcaataaagatactactcttgacatgcttctgggtattcctgatcacaatcttgctctcgtcgtgtggccttataagtaaccaaaatttagtttctgaaagttgatagtagtacctatatttttcagccttagcctaattatacatactcctattttactccctccatccacaaaagtttcacctatttcacatttgagtttttccaaataagttgttcctatttatagtttttatgcatttaagacttaaatgaagagataaattaaatgttttattagaactcaagaagtcatctaaatactcattggttgcatgcttttatttacttcttgattttgtagcatccaaggtaatttaatttctccttggtcttggtgtcaaaagtaatatgtgtaatttttgtggatgaagggagtatgttataagtcgctttgactttttctgattaacaaagagattaaactttgttaagtttgactaagtttaatgaaaaataagtaacattttaagaatatattttattattctagcaatcagcattgaatatatttcgatgatatgtttgttttgtgttaaaaatactactatattttttataaacttagttaaatgtaaagaagtttgattaggaaaataattaaaaagacttataatataacacgaagaagtatgtatgtgtatatatatatatatacatatatatatatatatatatgtatgtatatatatatgtatgtatatatatatgtatgtatatatatatgtatatatatatatatatatatatatatatatatatatatatatatatatatatatatatatatatatatatatgtatgtatatatatatatatatatgtatgtatgtatgtatgtatgcgtatgcgcgcgcgcttttttggtaaattattttatgcacgtcgacgaaaaaaaatcttattgctcacgacatgcatgcttgacccaaagattctaaagccacaacgtgccatgtcaagccaaattttgtcaagtcaaatttggtcagagatctagtggcattacccaaagatttaatttatggcattgtcaaaatttaattttcttacacaaaaaataatttagtaaataccaggggtttcttttttttttttgcgtatgctagttatatgatcctgtacgttccgattgccattggttagagcaagtttaatagtatagccaactgcgggctccaaatcatctatagtcaacttaatagccaactcatataacagttacctataaacatatagttcctccgtttcatattataagactttctagcattgcacacattcatatatatgttaat

SEQ ID NO: 9898 - DNA, 17034 bp, Oryza sativa
ccggtagtgggctacactattaaacttgctgacgataaagaactcatttattttcactatttactaaatattattttatttactagtcctttatattggaatgagtcactagtcaaatgttttggcaattcctcgtgggcggatgatgcaatagaattttgaatcagctttttgatctttggttatccttcatgctcagcaagtttaatagtatagcctactaccggctccaattcatctatagccaatctaatagccaattcatacaatagttacttactatactattaatatatggtcccacctgtcatacacacattgcgtcttggagtccgtgttgcagctggctatagatctatagcctgttgctcttctctcttattgtttatcttattaaaatatatttatagctggctaatagcatgttattgtacctgctctatgtgattagtcaaaatgggatggatggagtgttattatctttcctcctagtgatggaaggagcaaccttgaattaaatgctccaataacaatcactgtccggttcgctttatttaggttcacccggtttttcgaatatggtgctgccataaagttacggttgtttagcataagagcaagtttaatagtatacgccaactactggtttcaatttatctatagctaatctaatagcttatttatagaactaggaaggtggcccgcgcggatgcgcgggcattatattattgaaagataagattattgtttgttcgttataaattaagggcaaactaatgtttggataatgttattttataataatttaagggttctatttttcttaaagtatcttaaaaaaccattcacaaacttttgaataggagatggattaagtacttatgacttttaaatcatgttttttttctcaagtaaataagaaactattggaagttaattattatacaatccatttatagagcaagatacttaaaattcttatgattaaatcatctcatgaagacgcatgatatagtaagaacgggaggaaaacgcatgcatggaaaaaaaagaaagggaaaaatgaaaaaaagggagaggaagcatacgtactcacgtacgtaggtgcgtacctatgccaaggcggagaggtggaacctcgtagtatttcgtttgttctaagatcaatttaatctaatggtttataatattggacacaccgatttaagtgaaaatcaaataatagatattttgctttttttcttagaatttttaatagttgctttaatttattagagcaccacgtggcagtttgagagcattttaagaaattttaaaggacttaacacatgtaattagaatattaactacataatatatatatgcatggggcatatggtattatttattccagcttcgtccatgtttatatacatgtagagagaaattaattatgtggctaattatgtggctagcaagccattagatgtctaattaatagcaattaattttgacacctatttacagttatatagtagctcttacatatttatcttacgactttgattatccgttgatccccaatttactgatcactatgactcgcatgaaaaaaacatgtactacttaggatttagaatagcttatttatatgatagttatttgagggtacaaatgaatgaattgacttctaaaaagctaaaatgttgtttaaaaaagacatcatttagaaacttggaaagcgtgcaaacgaaaacccaaactatggaattgggaaaaaaagagggttaaactctcttatagtatgcttgtcttagtaaaagttctattgatattcgttaatattatgcccatatttataacataatgatttctttcacctgtacgaacaaatagtacaaaatccaaatatgacataacacaatacattataattattctataatcaactcttagtttcaggttaaacagagctaagtgttggaaaaaattcaacccgcggtgcttaattcttctctcacggcatcacacctttaattttctttacatgttattaataaaattaatcaactccatatatgacttgatatgtggcaaagtggtagcgtagcggcggtcgtaatcaccttagatgccttagacacgacgctttgtcacgcgtgcaaaaggcaaaaagtgcagacgtgcattgtgtagcgggccaaaaaagagaacttcgaacgctttatttataagaaaacaatagatccgatgatttaaataatgggtccaccggttctagtgtaagtataaattagttattatagattttaaatttttaatttaatgggtacataatataatagtgtagactttattttgaaacaatgcattattggagaataatagtccaatgtaataaaaaataaatccagtgatttaaataatgagtccatcagcttaaatgcacgtataaattagttaatatagatcttaaattgtttatttgataggtacacaatataattgtgtaaactttatttttaaatagtgcattattggaaaataatagcacaaagtaatgagtacaccggtttaagtggaaattatcttacattattaattttatgggtaacatataatggtctaaattttattttttaaaattgtagagctaatttagttacatgcaagttgtacgatggtagattctctatttgtaaaattatgattatttaaaaaatatatatccattatataaatagaaaaaagaagaaaaaaaaggaaaaaataagcgaaagaagcgtacgtacacatacgtatgtatacaatataatgtgtgaactttattttaaaatagtgcattatttaaaaataatagtacaaagtaatgagtacaccggtttaaatggaaattatattacattattaatttaatgggtaacatataatggtgtaaattttattttcaaaaattgtagagataatttagttacctctaagttgtatgatggtagattctttgtttgtaaaatataattatttaaaaaatatatatctattatataaatagaaaaagaaaaaaaggaaaaaaagaattgaaagaagaagcgtacgcatgaattatgattatttaaatatatatatatatatatatatatatatatatatatatatatatatatatatatatatatatatatatatctattatataaatggaaaaaagaagaaaaaataaaaaataaaagagaaaggaaagaagaagcgtacgtacttatataaatggaaaaaagaagaaaaaatgaaaaaaaaagagaaaggaaagaagaagcgtacgttcatggtacgtatatatgatatatctagggaggaggaggacttttagtatataactaggaaggtggcccgcgcggatgcgcgggcattatattattgaaagataagattattgtttgtttgaaaattttgtctcataaattaagggcaaactaatgtttggataatgttattttataataatttaagggttctatttttcttaaagtatgttaaaaaaaccattcacaaacttttgagtaggagatggattaaatacttatgacttttgaatcatgttttttttttctcgagtaaataagaaactattggaagttaattattatacaatccatttatagagcaagatacttaaaattcttatgattaaatcatcacatgaagatgaatgatatagtaagaacgggaggaaagcgcatgcatggaaaaaaaagaaaggcaaaaatgaaaaaaagggagaggaagcatacgtacccacgtacgtaggtgcgtacctatgccctgggaggagaggtggaacctcgtagtatttcgtttgttctaagatcaatttaatctaatggtttataatattggacacaccgatttaagtgaaaatcaaataatagatatttttcttttttttcttagaatttttaatagttgctttaatttattagagcaccacgtggcagtttgagagcattttaagaaattttaaaggacttaacacatgtaattagaatattgaccacataatatatatatgcatggggcaaatggtattatttattccagcttcgtccatgtttatatacatgtagagagaaattaattatgtggctagcaagccattagatgtctaattaatagcaattaattttgacacctatttacagttattcatagtatctcttacatatttatcttacgactttgattatctgttgatccccaatttactgatcaccatgactcgcatgaaaaaaacatgtactacttaggatttagaatagcttatttatatgatagttatttgagagtacaaacaaatgaattgacttctaaaaagctaaactgttgtttaaaaaagatactatttagaaacttggaaagcatgcaaacgaaaacccaaactatggaattgggaaaaaaagagggttaaactctcttatagcatgcttgtcttagtaaaagttctattgatattcgttaatattatacccacatttataacataatgatttctttcacctggacgaacaaatagtacaaaatccaaatatgacataacacaatacattataattattctataatcaactcttagtttcaggttaaacagagctaagtgttggaaaaaattcaacccgcggtgcttaattcttccctcacggcatcacacctttaattttctttacatgttatctattatatactaaaagtatatgaagcttccttaaaacgctctcaaaccgccacgtggcgctctaataaattagagaaaattctagaaaatctgaaaaaaaagaaaaacatctatccctcgattttcacttaaatcggtgggtccaatattataaaccgttagattagatttatctcaaaacaactcctctgttccattccatatataggtacgttactgcttgcatgcgatctgttaaagggggtgcatgcacgtacataacctttttttccaaggtacgtgactattctttctctttttttccggtatataattgagataataataataatagtactaataataataatactactaataataataattagtgataataaattttgaataaaagtcactttacaaatatagaatataccagcatacaaatctttacaagtgaacataaataaattagctctacaatatttgaaaataaagtttacaccattatattatattatgtacccattattttagattattttgtaacaaaaatatttgtccatcgatattcacttaaatcggtcctaagtcgctacatgccacccctacaaatgctcctaagctaccatgtggcgctctgataaataaataatagaaattctacaaaagcaaaatatctaacccttaaaatattcacttaaattagtgggtccgatattataaacccttggattaacgtacaacggccccagctctcccataagtccgtacatatgaagtaagtacgtacgcacgtgcgaaaccgctcacccttatcacgtccatatttctctcctttccttttataatttctaaggataattgaaataacattcattattaaaaacaaacaattataactttgcaaacctagactgcatcatcataaacgtatataatgtttgaagaaagtttactgcattatattctttacacatctatctatatattatatactgaaaatccattaaacaaaataattcaacaccaattaataaaattaatcaactccatatatgacttgatatgtggcaaagtggtagcgtagcggcggtcgtaatcaccttagatgccttagacacgacgctttgtcacgcgtgcaaatggcaaaaagtgcagacgtgcattgtgtagcgggccaaaaaagagaacttcgaacgctttatttataagaaaacaatagatccggtgatttaaataataggtccactggttctagtgtaagtgtaaattagttaatatagattttaaatttttaatttaatgggtatataatataatagtgtagactttattttgaaactatgcattattggagactaatagtccaatgtaataaaaaataaatccagtgatttaaataatgagtccatcagcttaaatgcacgtataaattagttaatatagatcttaaattgtttatttgataggtacacaatataattgtgtaaactttatttttaaataatgcattattggaaaataatagcacaaagtaatgagtacaccggtttaagtggaaattatcttacattataaattttatgggtaacatataatggtctaaattttattctttaaaattgtagagctaatttagttacatgcaagttgtacgatggtagattctctatttgtaaaattatgattatttaaaaaatatatatccaatatataaatagaaaaaagaagaaaaaaagggaaaaaataagcgaaagaagcgtacgtacacatacgtatacgtatgtatacaatataatgtgtgaactttattttaaaatagtgtattatttaaaaataatagtataaagtaatgagtacaccggtttaaatggaaattatattacattattaatttaatggtgtaaattttattttcaaaaattgtagagctaatttaattatctatgagttgtatgatggtagattctctgtttgtaaaattatgattatttaaaaaatatatatccattatataaatggaaaaaagaaaaaaataagcgaaagaagcgtacgtataactgtgtaaactttattttaaaatagtgtattatttaaacataacagtacaaagtaacaaagtaatgagtacaccagtttaaatcaaaattatcttacattattattaatttaatgggtaacagataatggtgtaaattttattttcaaaaattgtagagataatttagttacctctaagttgcatgatggtagattctttgtttgtaaaatataattatttaaaaaatatatatctattatataaatggaaaaagaaaaaaaggaaaaaaagaattgaaagaagaagcgtacgcatgaattatgattatttaaaaaaatatatatatctattatataaatggaaaaaagaagaaaaaatgaaaaaaaaaaagagaaaggaaagaagaagcgtacgttcatggtcgtatatatctagggaggaggagaggtggggcccatagtatttggtttggtttatgttaagatcaatttcatctaacggtgtataatattggacccaccaatttaagtgaaaattaaggggtagatgttttgcttttttcttagaatttctaggattttctctaatttattagagcgccacgtggcgacttgagagcgtttgtaggaagtttaatggacttttagtatataatagatagatagatagatagatagttacatactacactattaatatctggtcgcacatgtcatacacacaatgtgtcttgcagttcgtgctacagttggctgcaaatctgtaacccgctgctctcctctctttttatttatcttcttaaaatatatttggagctgacttatagcctgctgttatacatgctctaagagaaactatagattatccccgatgatggacagaatcacaggaggttcactagcagcttagcttgggagattgaagcccacaaggtggatagaggatttttttggaggcggagatgaacctgaggcggctatgggaggtgtggggggagtgggagatccgcgtgctcgtcctgtccagcctgtccctgcaggtcttcctcctcttcaccggcggcctgcgcaagcgcaaagccgcttggtggctgcgcatgccgctctggctcgcctacctcctcgccgactacatcgccatctacgcgctgggcaacctttccaagaagcagaagctctgcgacggctcattcgatggcgagatgcacctcctcgtcttctgggcccctttcctcatccttcatctcggggggcaggacaccatcaccgccttcgccgtggaggacaacgagctctggctgcgtcacttcctgagcctgctgtcgcaggtcgcgttagccgggtacgtctactggaagtcgcggcccagcatgcggctcatgtccccggcgataatcatgttcgtcgccggcgtcaccaagtacggcgagcggacgctggcgctcagggcggcgagcatggactgccttcgcagctccatggtcacgcagccggatccgggcccgaactacgccaaattcgtggaggagtgccagtcgaggacggagtccggactggtcgccaagatcgtcatcgtgcaggagcggcctccagatgacgaggaccatgtcgaagtcaagcgagaggagtacggcgacctggtgtacagtgcgcacaggttctttcacaccttccgccgcctcttcgtcgacctcatcctcagcttccaggaccgcatcgacagcctcgccttcttccggaggttggagatggagcaggcgtacaaggtggtggagatcgagctggtgctcatgtacgagtgcctccactccaaggcactcgtgattcatggtcttctcggccgcagcctacgcttgttcagcctcgccgcgccggtcgtgtcgctcgtgctcttcacccgcgcgttgggcgacatgcgagaaggctacaaccaggttgacatcaacatctccttcgtcctcctgggaggagccatcttcttggagacatacgcgatcctactgatcttcatctcctcctggacctacaccgacatgcgcggcagagaagcgctccggcccgtggcggcggcggtgttttggctgatcgccctattccagccggagaagaggcctaggtggtcgaacaagatatctcagtacaacctgatcagctattgtgtcaaggacaagtcccgtcggtacaagaaacccatggagtggctggagtggaggtggaacttccgcgtgaagacgatgtgggacagctggaggtacaagacgagcatcggcgtgtcggagctgctgaagagccacatcttcgaacagctcaagagcaaagcaagcagcatcagcaaggaccccaagagctaccggaaggctggcgagcaccgtggccagtgggcgctccagcgcaagggcctctaccagaagctgggctggagcgtcgactgcgagtttgacgagagcatcctcctctggcacatcgccacagacctctgcttctacgccaatcatccggcggacaaagatgatgacggatgctgcagctgctcctcgtcgtccaagtgtctccgttgcctctgcagctccagctcgggctatcctgatgccgaggctcgagggcgtgactcgaataagctggcgacgatgagcagggagatatcaaactacatgctgttcctgcttgtcatgcgcccgttcatgatgacggccagcatcgggcagatccgcttcggcgacacctgctcggaggccaagaacttcttccggcgagacgacgaggagatcggggacgaggagcggtgtgccaagaggctcacgaaggtggacacgtcgattgcagagccgcgggacgtgaagggggacaggagcaagtcggtgctcttccaggcgtgcaaactcgtgagacagctcaacgagctggagggcatcacggaggagaggaggtggaggctcattgctggcgtgtgggtggagatgctatgctacgcggccggcaagtgcagcggcaatgcccacgcgaggcagctcagccagggaggcgagatgctcaccgtggtgtggctgctcatggcgcatttcggaatgggagaccagtatagggtggagtctggccacgccagggccaagcttattgttcatcataatcatagtaccatgtaggcctgtttggtccattttctctgttcagccatccaccatggccagcagccgcaggatatgctttgagattcgaacgtacacgtaactgccccgctcgtatcactttctgctggcgccccagaatacatgccgtgggtcccaccgaactctgtataggttttttttttttttgagaagactgtatagggtcttggttttttgtttcttccccaatccccaacccccggatccaccgcctccggctagcaggttgaggtggggcgcatcgatctgtccgcgtgttggcggacgccagcgagccgaggagaaacaatctactttgtcccgccaggagcaccatttgttggcgtaagcacgacattgcattatattttcgcccgtgttgcctggaacatgtgtaattctcagaaaagaaaataccaagttcgaggaaatatttaaacacggctaattgcaacttaattcatgtggagcaaccaagacaaaagcgccaagtatatatcagtgtccactaggctgtgttccttggtcaaggtttccaatgatgcgttcaatgagtcgtgtttatatgtataaatctaatgatgcattcaatctagtttatatctgcaatgtcatgatttatttatggaataaattaaatcattatgtacttataatttcaacaggaaaaatgtaggattctaatagaaatgcaagtgcaaaacagatgattgcaaaacaaatgaaaaacccagaaatgaccatctgattaaaccaccggaaaaccaagaatcagatgagataaactcaaaggaaagtttccaagaagctgaagcgcttactaaattttcttcaaaatctctgtggttttatttagaaaatagggtaggaaaaataatatcccacctttcaaagggtaatattgtatcctaactatccattcttcacacttcatttaatcctagccattcatctatttttctttcctaatccaattgccaaacacaccttataggattgtctattttacaggaattttaaaaggtacgataggattcaatcatttgttttaaggggtttcatagaaatttttttctataggattagaattcttcaaatttcttatgtttttccttcatatcaaatgaccctacttgttgaagggtttcgtctgtgttgtaagttgtaattaaattccatcgggatttcgtaggtccgtgcaaacagagtaaaaggggataaaagcttttcagcagcttcgccgctgcagccgctttcctccggccgcattcgcttctctcttttccgccagccgccaccagaaaagcttcgtccacgagatcatgacgatcactgtcttcgtgggcggacgggaggggcatcggctcggtaaccggcgtgacggacgtggtcaaataacagatcatatgcatatgtggttaattacattgatgcatgcaattgggataattaaattaatgtaaaacacctaaacattcacgcatgcatgttatgggtttaattaccgagaatgctgcaaatctctatatacgatttcagggtccgatcccgagcctcagatagggccacgtggcatcaagcgttgcgctccattcgaattctcgatggagaatgtgccacgtattcccaccaatcccaggaccgttagatggtacatcaacggtgaaaaatcgtctggatgagttatttacaaaacgtaagatctaatcatctggaagattggaagagtccggagtattggacatgaatccagaaaaaaaaaatcgcaagaaaaatataaattcctatctcctactcaccgtgcctccgccctgcctctatccacatcgccagcacctgcatcggctgatgagcagggggtgatggcggctcgatctacacagcctgctttgcctagacatgcgtcgccttaggggggaggcgagaagcggcggtcgcggcggtgcaggagctcctgcggcacgtcggcgacggcgacgacgatggcgttctcaatcacgtcgtagattctgcgtggagtcagcggcccctcagaaaagctcgcgccaccgttccagctggttggccagagtcgcctcggccacggccacgcccacccgctcccctttgcccccaactccgatttcttgcgcttgcgccgccggaggccgctcccgttgggcaccggacccgccacgcgcgcgctcctcctgatggccgccgtattctcctctccgctcgcatggtggtggcctcgtgggaatcgaatggataatggagtaatacagggattagtttgcctcttcttcctacggtagtagtagacgaatagcagcatactccctccgtcaaaaaaaaaaaaaaaaaaaaccctggtttccatgcctaacgtttgaccgtctgtcttatttaaaaaaaattaaaaaaaaaattaaaaagacaagtcacacataaaatattaatcatgttttatcatctaacaataataaaaatatgaattataaaaaaatttcatataagatgaacagttaaagttggacacgtaaatccagggtttgccatttttttatacggagggagtatggtctgcatttttttaagcctatcccttctcaaacgctgccttcagcatctggctggcaggtggcaggtagatacgctttaatcgatcggtgccgtgcggtgcgcgacttgtggggtaacctatcagtttgacgcaggtaaaaataaaaaataaaaaataaaataacgaatgcagacttttatgtagcgttaggagttcccataaaaaaattttataccttgtcataccgaacatttagatacatgtatgaagtattgaacataaaaaaactaattatgcagtttgcgtgtaaattgcgatatgcattttttaagcctaattagtccatcatttgacgatgtagtgctacagtaaacatttgctaataacagattaattagacttaataaatttatctcacagtttataggcggaatctataatttgttttattattagtctacatttaatattttaaatatgtgtctgtatatccgatacgacgtaccaaccctttacaaccgagatataaacacccctttaattaccgcggcgtgataggttcacgaacacaagaagcgcaaaaatcttgccatcttacgtgcatcatagatagatcgaaaacaagcaataaagcacaatgtggtgaacgagtcatgttggatggattatttttatttctcttttttactaattcctccgtttcacaatataagactttttattattgtccacatatatatagatgttaataatctatacacatacatgtgtctagattcattaacatatagatacatatgttttacattgtgaaacggagggagtaatttaactgctcgttgtaaggctacattaaaacgagacaaatacataaaataaaagtcaaatatgagatatccctatatgactagatatgcgttcgatagtgtcaaaaggccagaaaaaaaatcccacgttttctatgcacatgctatccgaactgataaacaatatgttatttttataaaattctgttaaaaatttactctaaaaaaatattaatccatttttagttcaaataactactatctccatcccatattagttatcgctttgagtttttattcgtaatgtttaatcattcgtcttatttaaaaaaaatttggaattactatttattttatttgtgacttgttttattataaaaatgctttaaatataacttatccttttttatatttttactaatgtgaagtgggccctcagggtgtctacgtagttaattttctcatcaatggtttctaaggtaaaaaaaaatcagagaaatattaattaagaaaataaaaggactgaaatagaaagctgaaatacaaaatctaccataggtacaataaggctactgttaattactgtggcttgtacaaccttattctatatgttctatatctagaacaaggactaaaatagagagctgaaacatatgttctatatgtagcttattctacatggaatttttttttatttggccactcgtaaaagttacttccgttggaacatactagctacaaagagagcacaccaaccaacatgtttattttttccgaagagccggttcatgcgttcttgaagaattattaattatatcaacgacttgcacataaatgtttacataattgctctactaaaacattcaacatactagaattaatattttctacttgtcccattatgtagaaaagttctcttttgagatattattttgagacggctcttgcctactcgaagaatcgttaattatatcgaagagcactgcatgtgaaacatttacataattggcccattaaaacgttcatcaagctggagctttttttttagtttccatttatatgtttgtcgggaaataaacattttcagaattgtttccaaatagaagtatcacaaataccagctattatcgttgcttggttcatttaggatataagaaattaaaattctttcaaataactctacaacatttataaatcctaaatgaaaaatataaatattcataggttattgttaagttgttgcgccaaaggcgcgtctattttctagtcggacatctatggatgggtacgcctaataggcgatcgatagccatggggatggggtagcaatcagattcgctccccgcctcccccctccctccacctggtttcctttttttttcaccgcattatttttctattttagtaaatttatacaactaaagtttatacttctaaagtttacacatctaaagtttagagaccaaaagtttataagtcaaaagtttatatatccgattcaaatttgaatttgaattcaaatatttttttatatatagtatttctgtacatttaaagtttatacacctaaagtttatagacctaaagtttataagtcaaaagtttatatacccgtttcatatttgaatttgaattcgaattcaaatatccgattcaaatttgaatttgaattgaaatatttttcatatgtagtatttctatacatctaaagtttatagatctaaagtttatagacttaaagtttatagactcgattcaaatttaaatttgaattcaaatattttctatatatagtatttatatacatctaaagtttatacacctaaagtttatagacccaaagtttataagtcaaaagctgattcaaatttaaatttgaatttaaattttttatatatagtatttctatacataaatttttctaacttttgtttttcaaaaaaatttgtgtggtctactatagtagaaagaggagaaggagaggaggaagggggagaagagggaggagcgatcgctgggcgggtgggggagcgatcacccgtccattagcctttccgtctatggatcggactgatggatgtatgcgagtaagcagctaaatgtttcttctcattcctttcttctctctctaaatatttttctcctaaattacttatccgatcataccatgttgatgcgaaaaacacacactgggctggaagatctgctcagctccagtgcaggaccaaaagttgatgagatacggacataccagtaagtttgaccctacaactgacaagatatataaatagtagatcaatgagccgataggctgataagccgatagattaattccaaccgatgccgataccaaccgatagcgatagggttttgagctatcggctataattctgatgtagattctgacgcttgatgtaaataataatataaagacaatcggctgatgataatgcaagaaatcaacaatataatctgaaggttaaagcatatatcgactagaggtccgatatcataaaatccacagaatagattaaagcggtgaacggctaaatccaacttatatgcaatccttgtaagccgatgcaacgtccagatactttatcggctgaaacccagatgaaacctttattggcggtcaaaaaacaggctagggattatggttctaaacatgacttagtagatcaaacttgacttatgcagcactaagtataaaaagaaacacaatatctagataatcaagccgttgactgatttttagggtggtagatgccttatctaatctaatatagtaaaacaatttagccaataccggcagtaaccctaaagcgagagacaaccgataaagctaaattaagatactaagactagattaagacatatgataaatagccagacaaatatatcaaccaaaccagagcaatccaagaggtcgaatgtaccgatgcagccttgaacaacgccgacgtagacgatacaattgcctgggccagtggaacattggacttaccccttcgttagagatcgaaaacccccgcattaggtgccaagtcccgccggacgataaaataaagtagaaaaggtaaaaggtggcgatacgctgaattgtaattgatcgtggagatagtttacaataaccccgggtgtacatatttatactcatagggatatactagtccttgtaggacaagaaagaaactttcctaaaaataaaaagaaaactaacaaactattcctaattaatagataacttgccatgctgtatcctccttgaacttggtcacttctagataagcttcctttaatagattaatttccttaaccaaatatagcagaaatccgactattggcgatgtgataattctcttagggcttaccaaatttcaatcttaacacacggttgtattcgttttttattaaatctttacaatattatgttaaaagaaaaacatgtgtttcaaacctttaaaactcaatgtttcatactgttgatgcgaaaaacacacactggcctgaaagatctacttaacttctgtgcaggtccaaaatcttgcttttagatttgtgagcgtgccaattgatttgatcctacaatcaacaagaaagaaagacaagaaaaccgcggttaaatccataaacgatagccgatcggctaattgccgatgacatatcatttatcatcaagccgatgtcatattgggatcgattgacagtcatgaataaataagattagactaaatctactcgatcggctatagatattaacgacatataaccaggggcggacgtgcccattaggcggcatggggc

SEQ ID NO: 9899 - DNA, 53364 bp, Oryza sativa
  unsure (1)..(53364): unsure at all n locations
gaccgcctccgcgagtacttctacaagtacggcgaggtggtggacgccgtcatcatgcgccaccgcgccaccggccgcgcccggggattcggctacatcgtcttcgctgaccctgccgtcgccgagcgggtcattatggagaagcacatgatcgatggccgcatggtaattaaaatcaactttgtttgcttacatcaacatgtttgtgttaagattcatgatgatgatgatggtgtgctagatccatccatggtggtatgtaatggtggtttgtaggtgttactgattgttgtcgtttcgaggaattcagaatgttttttgggattttttgttttgttttgttttaggtggaggcgaagaaagctgttcccagggacgatcagcacgctcttagcaagagcggcgggagcgctcatggatcgccggggcccagccgcaccaagaagatattcgttggggggctagcgtccaccgtgacggaggcggacttcaggaagtactttgagcagttcgggacgatcaccgatgtcgtggtgatgtatgatcacaacacgcagcgtcccagaggttttgggttcattacgtacgattcggaggatgctgtggacaaggcattgttcaagaccttccatgaactgaacggtaagatggttgaggtcaagcgcgcggttcctaaggaactatcacctgggcctagcatgcgttctcctgtcggtggattcaactatgccgtgaacagagccaataacttcctcaatggatacacccagggttataatccgagcccagtcggtggctatggaatgaggatggatgcaaggtttgggcttctatcgggtggccgtagtagttatccttcttttggtggtggttatggagtcggtatgaattttgatccagggatgaaccctgctattgggggaagctcaagcttcaacaacagtctccagtatggaaggcagcttaatccatactacagtggaaattctggtagatacaatagcaatgttagctatggtggagtcaatgacagtactgggtcagtgttcaactcgctggctcgtaatttatggggtaattcaggtcttagttactcttccaactctgcaagctctaattccttcatgtcatctgccaatgggggccttggtggaattgggaacaacaatgtgaattggggaaaccctcctgtgcctgcacaaggtgctaatgctggcccaggctatggcagtgggaacttcggttatggatccagtgaaaccaactttggtctcggtaccaatgcttatggaaggaatgctggatctggtgttgttaatacattcaatcaatcaaccaatgggtatggaaggaactttggagattcatcaggaggaggtggcggtggtggcggtggctccatctatggagacacaacttggagatccggatcttctgagcttgatggaaccagcccatttggctatgggcttgggaatgcagcttcagatgttacagcaaagaactcagcaggttacatggggcattaacaaatagaggttagatatattcttaatgcttatgttctgtttatctaaagttccattttgttgctggctagtgtttcaaccattaccttcatgtggtgccgctatgatggtagcaatgtgaaaacagtgtctttaaatattgaatattcattctgctgaaacaatatcgctagatgaacccatgcatattcaatgcttatataggaaatgtttttaccattgcaaatataatgctagtgttagttgtcctaggaaaatactggatgacactgatcattcaagcgtggtaacaccacttggcagtttggccttttatagaaaaacaagtgtgtgttttttactgcttctggagtatgttagatatttactcaatgttgcaactgttacgttaaaatgcgtatgatgattctctgaatatttcattctttggttggttattgcattatttatgaactagacatcaatttgtttggatgattcacccatcaacgtttaggcatgctgtccaagtagtacaacaattaaatttgtagctgtgaaaacagaagctatgcgtccagttttgacctgtggttcgtaatagatagtaacacttgcttggtgtagaaactttattcccttctccaattattgaactttttgtcagtgcttaatgtgttatgtgtgtagcgtcccatcaagctggagattctagttaacatattcatgacggtgttatatttagacattaatatgcctgtgatatatccaatatatagttcaaaagtatacatttgttccatgtttggctaccacctaggtatactagggtcatgggttcagctagctgtttagtctttttggatgttcttagctttctagttgttaggttatgtcaccaactcaccaaacttaaagtatctgctaagaattataaggtacttaggaaaactgtgtccctttaataactagttttttcattgattccagtctcaaagctggaaatcattaactcgacaaactaatcttatttatgattagcttctgaaatatggtgcaaacatatattttagattcagaataattctgaagtgcttcaataacttgaaatttcgttgcaaatgatatgtttcagttcttatcagaaattcagtattctgaattcattgctcttaccacaactaaccatgacataacattttgcttgtttacgcaatgcaaatattaattgtggtagtccttggatgtttggtagcttgagtcttcagtcatacggtagacaactttgcatcttagataaatataaatggcctaataagattttggaaacttaagcctgacctgagtattttattttagagaatgaacttcttaggggcactggtgtaataatttttttgtcaaagcattcttcaagttgatttttgttaaaaaaaaagatcaattattacaacatgcttgtactcatcttattttgaatgtatgcttttcatcttcgttatattacactgctaaggacattactgaaactaaaccttattttttgtgctctttgtttttctgcatgcattgcacaacactatatatactctctaacttttatgttctcctgtgcagcaatgtcgccgcctaggaatctttttcacatacaacatttgtcaaaataggttgaggagagaaccacaggtgcatcaggtgcaaattttgaacctcacatgatttacagaaatgggttagttaatagagctaaccaccagggatttggtcaatgagatcagatatatatcctcagagaaccatttaaacgtatttccattttatgtaaggtttgagattgtggtttcggatttctacagcgagtttaggttttggcaaccttgtgttttttcttggttgagatgtgaagtaagattgcgggatatatatatctgaagagtgttcagttgtacggcggcgctgcccccatataggcccccctttttgggtttttgttcttatagtagaaactgctctagcgttttgcaaattgtgtgctagctgttgttatcaggatgataatttttttccccttcttggtttttatcttactgaagtgtatgtaccagagatcttgctggtctgtgtttttcctagtggaacttttaagggatgccccttctgggtctcaaagaataataatgctacattatattctaattcattttgaggctttctaaggctatatattatttgtatgtaccctgctggaacatctgtacattctgatgctctttgcaatttgcctttgtgctgcttttgcatcttctcttctgggtctgtctagtggtcagtgggtgatgcctggttcttctaccatgcataatttaccttgtataatgttgctattgtaccatctcttcatgtgccttttgatggctgggctacatggatgatggctctgcaggctgcagccatgcttgaggattgtgatgttaacatataataatatcttcatcttgtgatgtacagtaaattaccagctttttttttaaaaaccccaaatgcaagggattcggtaattgatatgtcaatcactattccttctgataagctccagaattttgtaggagagtcatagacagttgagtttgtgatttgtgaatagattagaaattaagtagttgaagttattaatagattagaaaatcagcaacctgtcatgagaattaggaactactcccctcgtctcaaaatataagcattttttactctaacacggtctccgagatgctactttgaccaacaatatctataaaactaagatgttttaaataaaaaaagttgcatattatgatattttgtttaatgataaatctagtaaaatcaattttacatgattgatcttttttataattttgttattaatagttaaaattaaaaatgtttgacttgtcactatgctaaaaatgcttatattttggaatagatggagtacctgtttactccgtatgtgataggtgcctgatcttttaactcttaattattgattttcatatgcagcccaacctaatttttcatgcttaatcaacggtttggtatcagctttcaattcttctagtgttaatgaagttgcttcaactgatgagcagttaaaaaaaattatgaacaatttcttacagcagaattctccatagatcgcttactgaatgtagcttgtcagaatgaaaacagtcacttagctcttgcatgatgtgaaacagcgtgctcgccaaagaagttttacaaattcagagtgaagcagttgaaaagaagttatgccccaatgcaagtttcctttttttttaaaaaaaaaaatcatggcccattagagaactacatcttttccataattccaaccaacttgaaaaggcattttgcaaattcaattgctccatttgaaaaggaagattaccccaagtttttttaaacaaaaatacatgacccaagacagaattgtgtcgtcataattcatttgcccatagaggtagagaattaggtggtagatttttttttttggggtgtagaaatcgatccatgcaagcaaaacaaaggtgctttcctaactggaccactgctattaatagacaattctttagaaattatatagcaatctgatttttaatagttgatgctattgatttttcgatatacattttgaccactcatcttattaaaaaaaattactacctccgtctcaaaacatattgtgccaaaacataacatggggcagaggcagcatgtaattgtcatttattttattgtgacttgatttatcattaaaactactttaaccataacttgcattttacatatttgtataaatttttaaataagataaataatcaaatgtatagataaccgtcaataacatcttctattaaagcaaaggaagtaattgttatgatgggaagaaactgtcacttagggtcctttgaatcaaacaatttatgaaggaatttgataagatttaaattttattaaaaaatatatttggtcctttgatataaaggattggagctttccaaatcctataaaatcctattgaatggctcatcacatctagattttggtgaaaaattagcaaaaactccaacatcttagaaaacttcctttgaggcttatctctttcatcctattctttttttccccttatccgatcaaacaattattcatgtattctctttttacagaatcatatgtcttttctacgttttttctattctgtttttccattcaggttagaaaagggccaagcaagtaatcattttcatgtctcgatcccaatgcctttatgattctactctggttccataattcgtgacgttttagacattgacacagtctccaaaatatatctgactatgtttttctattataatatatgcaataaataatttttcattttattataatacttagtaaaacgaatctatatacgttgttctagtgtctttaaattaaaaattagattaaattagaaattatttatagttaaagttataaaagtttggcctcaacgttatccgaagcatctagaattatagaaccgaccgaaccaaagaattgaattatgaatccaaagggagttcagttaaattgaaccacctaaccctttcatacttaaagggaactaactaaatctgtttaggtctgacagataaagtgctaaatttgtttagctctgacagataaaggaagacatgatcatggcattctttctaccgtgaatgatcatggttgtgactttttgagaaatcatgcaaatggtggagacaggatataagtttcactgatacataaatcactaaaggtcttctgaacaaatccagactgatgtagaagttccaataaatacaagtagtacaattcctgttctgccaaaaaaaaacattctctgaaaatacagcacaacagagctcagagttgctagttcaccaaatctcctagaatctctctattcaggcattcagttctgtaagaacccttttggtgcattatacaggaaagattaggccctcaattttgttgcctacatgaattcaatacccaattaattggtagctcccattgataagctgcagactctatcttcatctctttcaatctttcttgacacggttccgagccgccttggctgagctcgatcgctctgactgcgagaacatgatgaagacatgcatgaccgccgtcaccagtgcgagcccaaggcccgtaaacccgactcctttccatgtcgacaggagttgagtccataggaagagcttgacggcgccatataaaaggagacatgaccaaaacaaagtcacctgttacataagcagaattagaaagtcagtaactaaccaaacactagtagcatatacatacaagacgtcctatggaagttgctacagtaattgtattggaccaaacaaggaacagttctatgcaggcttgcagcaagtacttgagttttgcatttctatcaccaacagtgtgttcttacggtagtcccagcaaaacacctcccctgatcctctgacttggccctgacaaaggaaggggcttcgacccaagttttcagtttcagaccagacaaaccccaaacagcctgatttcgaattttaaaaaagatgttttctataaaattaaactgtttttttttattttgacttgttgagcatggaccaacagactttgagctaacccaaaaatattcacagttggtacagctgcaaatactgccactagctagccatgctcactgaaatttgtcttctgctcactccaaattgcccctcacactatgcatctccagttgtgagcaaatatatcacaaccatggtcaaaagggccatttctatgtttttatttgcctgttcacactcagaccgtactggtatgtctgcacactgccattagccctaggttctaacctagagactatcttttatgcaattaagtaaaatgctccggtattgagattttaccagcaatgattttactgggcggccaattggtctaatctcctcatcaaaagtgcctgtcgccaaatgcttatccagtaatgcatcctgtagttaagaataaaggaacatacaacatttacttcagaattaattgatcgaccaatgcatttggcattttaactgtaagatgtctaaataaaaaatatatatagctcagcacctttgctacaaagatgtctttgcaccattttgaaacatcgtcttctgactttggcatctcactcattgcatgacgtttcatgcgaacatgtacctagagaaacagtggagtggaaatttgtttcaaatcaaatcaatttattatgactatgtatctatatttatttgcaagacttcaacagtgaaaagaaacccatcaaatttcaatatttagttctgcaacactctcttgattggtctgccattagatatccaagaagttagcaaacataccactgaagattgccctttcaaaatccgcagcattgttggttgaggtgaatcttttggaataattactgttgtatcataaatagctggaacaaaatcccgcataatagttacagctgatacaaatccctggaaattttcatttttttcacaagaggtatcagtaaatagatttaatgctgcaatacgaaataactacatggccaaatgcatgacataaccatgtattcttaataactgtaaggagctgatcactcagccactccataaacagattaaagaagtaactgttgtactgaaagtattacagtcatatattataaaaaaatgctgtttcaaattgtcattttagaacttcaattaagctttaattttactggaagtattacagttatatctttcagttagttgcttttgtttatttctttaaaacaatttgtgaatgtccaattgaccagtaaaaatctttttcatataagttcaagaatttatcttgaaatttagcgtattaggtattctttttcaggaaggtaataaacaggcaggcatcatcatattactatgttgaaacacctgtacacatgtttatttcggaatagaaaccatcagccagtacaaaagaattttcagagttcccctatttctcttttgtactcttatccataatccatcaatattacgagtagtagtgtctgacatctcagtcttcaatgcatgattttggctatggtggttttcatcattatgaaattactcattgtctcgttctataaactacattttaactatcaaagtttgaaaaggttgacctcatgtcaatcaaaatctaaaaacataacactgcataccggatagcaactataggtacaaattaggcaggcaacagacattacatgtaaattttggcagtagagcacaggacccacattgttacacgaggcaagttgttacacatgtatcttacattcgagtgtttcgaccttctttgtattgttctaagagatttcaaacacaagtaacatttatctacgtttgaaggacagattctgcatcctaatcacctatgaagttgcgtatgtttaatagatacacactgtgaacatatgcaacagaaatactctaatttaaccgtagcacagaatatgcagttctcgatatgtgaagattattacatttagaattacccatctgaaatctgtagtttactagtgtctagtgtatataatatgatgttttcatttctttcatatcagaactattacaagggtaaaacttgggagaagagatttatatttgtgaattctgatgcaagaatacaggaataccagatacaagaaatcatttcagctagaaaaaataacatacctttgtacgtggaatcaatacatttctgggtgctggcaaaccctgtgaaacagcatactcctgagctgctagaagctttgctggagtaaagcgagtgccctcaacaaaaagggctagccaaaatggtctggggaagtccttcaacctttggaggccccactataagcatagcaagaccactaagttaaagaacaaacaatagaattatgtgtgtactgtgtagatgaggtaaaaaagttactttcaatgtcttttcatcctttgcccagctcctttccaaaaagaggtattctgcaaaccacatggaccagccaataacctgcaaaatgcaatcacaacattgagcatgtctgcatgcaatcaaaaccgctaagtactatatcagaagatagataactgaatgcttcgcatgtctgtgtgtctgcatcactgagatactagtgcacattacattaggttatggatctccagtaattacaaagaactgaacccgataggctgcttctccatcagatttctagcaaaagcagaacacatcttttctgatcttagttgatggacatcaaattttcttcaagattgcttcataccattccattccacattgtacagcttccataaaagttggttgcacgcatattttcatgtgtaacagagagtttgaacaactatagctatgttaccagaaacacaatgtatgttctactactagttcttagacattttgggtactgaacatttaactgccaacctactctgctacttattgctacaacctgaatgacatccacttgactgaatacaaagttcaagcatatcaattttagccacccttagattaatatacttagcggttggagtggtggaatctcaagtgtaacatatcatctaacggtattatatcaaatttgcttcaaacaaattcaccatcaacaatcatagagctctgatgagaaggaacatatgacataataatgcaatatgttatcttatcataattttagtcccaagagcaagtttaatattttattaccttctttacattttttttcaataatagctttatgcacataacttaaaagtcagcggcactagtctataagggactgaactgcaaaacaaatgttccagtaaaatgtacatgagctagctaactcactggaaggaatttcgatgatttcttcataacagcaagtgtacttccaaggcatcctgagcgctgaccacatgacaaaaaaaagttttggatgatttattatatattacagacaaatctgtatatactgaacttctaacaaaatattgcagtgtaactgatgtttcaacaactagagaatgagacctgtgccaaaatccacccaataagccaatcgatatcgctccgatgatttgatatgacaagtgcatgctcattccctacaaagattcttcagataagtttgtaacaaaataaatgacatggtgaacattgtaagcactatcaactgtgctataaaactgattcctcacccattgccttgtaagtttcgtcatcagcatgcagttgtatctgcagaacatgggttgaaattattttaggggaaaggcgaaatggcaaaaattaaaattgtttgcttcattaacatcaaatcaaacatttaatcttaagcagaatgctcaagtggcaagccggtaaattctattgtaatctgaattgctgtacacatggatcattcgcataatgtacagttagttaattagccaccagaatttgattgattatgctgtactctaattttactgccataatgaagagaaaaatgcagttggatttcaattttagctccacgggccaaattcaatcacaacagtggcagtattaacatggctgtttttccagactcacagcatatgcagctaaaccctataaaaaaaatgtccaggcatgaggcgtccagaaccatcaaaagagagagtccacattcaaacttttctcactgctcacaactcaaataatgagctctattaaattgtaacatgcacggcatacacataaatgcaataacagttaatttctgatctgaaggttctggttgccgattcggttatactgtcctaatgtgacaaaaggaagctatttcacacggatgatttgcattgcacaacggttccaaaataaactttagaacattgcgtgtacatcaaatgtgggtattttaacattttagcagaacaggtaaatcttgatacgaagtgcatatcagaaagatgctttgtcactgaccatatcaacataccttaactcctgcccaccaatccacaagccagaccagctgaagccacagcagctcggccaagaacctgttgatccgccggtacaagctcttcgagaacggccttatcgagagaaacaggacggcctgcagtttttcacgagcatacgagcagatcaggtaatgccgcatgctgatcttgctgcgtagttgcgcgcagattagcagatcaaatgaagcaaagtttgatgattctcgttacagtttcgcgcagtgacagacaatttttttttaaagtgaaaataatttagtaatcctaaatctttgcctaaaacagtacaaaattaacccagaaatcctagctacaataatttagtaatccaagaaagaggctacaaacaatcgacgaaatgatttgcgcaaacagaatacaaaaaaaagaaaaagaaaccaaatctcgcgccacggccgcatcagatcgcctgagatacacaagggaagaacagaaaagaaaagatttcgccaccaatctagctgaggattcgggcgcacctggatggcgttgatgatgaggccggagaggaggaagaggaggccgagcgggagcacgacgagcacgagtgggaccgccatggcccctgccgccctgccctgccctcacttccaatctcgcggggccgagatgcgaagaggaggcaacgggccgaggtggctggatgctcacccccgagggagcgccctctcctcgtcctcctcctccggcggcggcggcggaggcggcggcgaatccaccggcgacgagaagagacgagacgaggaggaagaggtgaggtggggtgttggatttggagattttatagggggttggatggaaaaagacgcagtgaagcgtgtgcgcccatggttccccctcaccaggagaagaagaggatggatggtgtgacacctcggataatgattgctttttttcttcccaattttttcgaagctactcttacaatggtgtttgagatagatttaacttaatatgatgattgatgatgaaataaaggtatgaaaaactagaaaccctattagtataattaattatgttttcgttattaaaaaaaattaaaattagatttatacggtattccctccatttcaggttataagacattttaagtttggtcaaaattaaattatttcaagtttgactaagtttatagataaatatagtaatatttagagtgaatttcagaaaccccgggttttggggcacctataacacaaaacctcaggtattacgatttgttttaaagaaccctaagttttgggtcaaaatgtttcaagaaaccacatgtttaagcttatatcatcgtttttggctaatatatttatgcataataattacaaaaataataatacgagatatttttgagtatatataaatgttagcctcattttaatgaatataggtcattggtagtatgtttgtttatacctgtaaataataggttaatgtgttattattaatgaggttatgttgcgtttttatcatttgtgcaactcaagagtgagaaaaagataaattacataggatgggatgtgtttttgaaacctactaatgtaaacatatactaaataatcatatataatatttaaattatgagtatttgagtaaatatggggtctcttgaaatattttgctccaaaacatggggtttcttgaaacaaatagtagaacttggggttttgtgttacgagcacctcaaaacctggggttttgtgaaattcactttaatatttatactactaaattagtttcatcaaattaataatagaatatattttcataacaaatttgtcttgggttgaaaatgttattacttttttctacaaacttatcaaacttaaaacagtttgactttaaccaaaatcaaaatgtcttataacctaaaacggagggagtattttaaattaacttctatataaaaagattttgcacgaaatacaccatttagcaattaaaaaatatgctaacggaaccgaggtataatttatatatgaatttatatcttaatcagaaacggatggggaaatatgcaccagtaaataaaatcatacatcttgtgtatattgtgcatcttcggttataaatcatatcgtgcatcttgtgtattcagaaaatattgcaattgtaaataatagagtgcatctcgtatatttaaataagggtttacaatatcgtttggccagtaaaattcgagacccggcaagacatcgatttttcttcagtaacccttgggcatagttcgatacattttgaaagaaaatcaacaaattttgaaccaatagcccgaaatgcactgcaagacctgaatttcgagcaatatctcgtgaaattgtgaacctgaatcaaaccaatttatttaattaaatactatccagaaaaagtgggcgagtggtatgagaacatgagaaactttgtggtagcaagtgtgagaaacatgttacgttacactcgttgtatggttggaaaaaggaaagcagcaaatggattagtgtttcccacaatttggtcaaacaattctcagatgagacgtctaaaactctcaaatttgcgggcatcgttcgtttaggggtgatgggggagattggctctcgtttttcgcgcgcacgcttttcaaactactaaacggtgtgttttttgcaaaaaatttctataggaaagttgctttaaaaaatcatattaatccatttttaaaatttaaaatagttaatactcaattaatcatgagctaatggctcacctcgttttacgtatcttcccaatctcctcaatccccttctcctcaaacactccgctgcgttctttcggggagatagggggattgtccctcgttttccgcgcgcacgcttttcaaactactatacggtgcgtttttcgcaaaaattttctataggaaagttactttaaaaaatcatattaatccatttttgaagtttaaaatagttaatactcaattaatcatgcgctaatggctcacctcgttttacgtatctttccaatcttctctatttccttctcctcaaacacagccttagtaatcaaagacaccgttacgtgttatgctaatcattgggtttccaagcaaacttacgtgtaagctgatctacgatgtgaaaacgacactaacagaaagcaaaatacaagcaacatatatactgcagtttctcaactttactagttcacctttttaaacgttatttgcatgatgtcagtatttttagttttgcctcgcaaaaaaaaagtttctttagttttgttttagttatacatatgttacatttagttgtgagtaagatataaaagtggcattacaatggacaagaagaccacatgatacgcttggatcataataaaaaacaatattaacttgagctcacatgaagaacacctctagaatgtgttccctgttgacagtgagtctttttctccgattcatatgcatatactccctccgtttatttaatatatgatgccttaacttttatcctaacatttgactattcgttttactaaaataaagtatataggtattatttattttgttatgacttatgttatcatcaaataaatttcaatatgactgtttttttatacatacacgtttaaataagataaatgatctaatgccatgctaaaaactaacgtcgtcgtctgtaaaaataataatagtatatatcattggttaaaacagttcatatgaagtacattttctcacatcagtaacatgctagaggatttcagattcttttttttaccaagataaaagaaaaacagttgtcaaagtacatgaatgcccaagggggaacaatgctattagtcatcacctatgtagaggacaaaaaggttgcttttagatgtgagtgaatttaatgtcgcttttatctctccataaattaggtgtaggtatttgttggtgagcccaaaaattgagctgctaggagtatctactttggcatctcacattaaaatcacacaaggtgaattaaacaaggttctttgtgcaaatgttccttgaatgtggcatttgcaaaagggctctcatgcacgtttgttgctatcaatcagtatcaggtggttcaactaagagcttactgattgtgtcaaccaaggtcatattccaagacatgacctaccaaagatgttccattaatcagtgaatcactatttgatggtgtcatagaactgaggtttaaccaccactttgacttttacgatatgtttgatggcaacggaaactagagaaatacaaagaatgttttgtaggtttggcttttattttcttttttttattggaggcttttttttctagaacatggtttcttttttttttaaggttgttcttttactttgaaaagtgcgatgatggaggaggataactgtacctttacattactactatttcagtatgtaccaatatattataatgggccaggtccatatgggctaagaaatggtgattaataaggatataaagtattcgatatgatggttatgttacacggagcgtagtgtacaaatgcgttgtgcgcggtgagaggagggttgaaaggagaacgaaggtctgacacagagataatcatcatttgatggtaccatacactatatcataattgtggatggatccataattaacccaaatctcaaaccaactgaaaagaattaatccctagtacatagtaaagaaaaaatattcatcctaatgagcctctggtcatatactttatgcaacgatccaaatagccttgaggttcgggtccacccctagtcatagcagcatagtttttgggttcaaagttcaaatgttggggccgtgtttagttgcaaaagttttcttcgaacttccatcttttccatcacatcaaaacttttctacacacaaaatttcaatttttccatcacattgtttcaatttcaacccaactttcaattttgatgtgaactaaacacacctccaatctcctaacttcaagcacatcaatcttgaaatgctgcatacttgcattgacaaatttgtttatctttaaacatgtgcgaaataatcaaacacaacggacctcatcttttcgcatatacttgtgtttatcaaccaaaatttaaatttttaaccttaaatttgaagctgattttatctttttatcaaggcttattttttagcttttatttttatatcgctaaggacgcgtaaataaaaattttattctctcacctgaccggtggggtcccacctgtcagcctcacatccctccaggccgttactacccccatcatcaccaccaccaccactccactcctctcccctccttatccccttcgtctcccgcctccgctcccccgcgcggccacggcggccatggccaccacctccacctcgtcgctgctgcctctcctcccctccaggaccccgaccccgacccctcgccgccgcctcccgttcgccgccgccgccgccgccgcagcggcgccacctcgccccttcctcgtctcctcccctccgcctccgcccgcgccccgcgcccgcctcgcccgccgcgccgcagcggggggcctgtacggtggtggtggtggggaggaagagggagacggggaggatggggagatggaggaggagtattatgatgatggggacgaggagggggattgggaggatgatgatgcggaggagggggaggagatggacgtcgaggcgatggaggaggaggccctcggcgccgtcgccgacctctccgagcggctcagccgcgagctccgcatcggtgagtggggggtttcagcttcgattcgctacctccgacatggccaggaaagtaggaaactagttagtgcttgtgaagagatagtagcatttagcctaaagtgcataatctagtgtagtagaacaatcctgtgtggaattttgagtcaatccgtagttccgtactctggtcgtggcggggatgttcgtataagatcagatggatatgctgcttgttgatgatgaactgattgttgtgccgagaatcatgatgatgcagatcaattgatactttgccttggagcatgatgtatgagtttgggaattgcagttccctgtatttctatatttgaaagtttagttgttagtgcctagcgtcgcaaagtttttcaagtacagtatttcttcggttttctcctttagaagcctgttacatacttacattgactttgtttagttcatgggctaaatgcgttgtgtcttcagatgacgatgttcgggataaaagaagaatcatcagggataagacatcagcatctaaacatgtaattatatcttcgtattcttgtaaattgtaaccctagttgacaggctggttaagaaagtgcaaatgtaaacaacttctattttctttactattgggtccgtgattcagataccggataatcttcttccaagggtggcaataattggaaggcccaatgttggtaaatctgcattattcaatcgtcttgttggggtaagctatttacagctacaaatattacttgagcgaagagtcagcattgtgtgtaatttttagctgaatgcagaggctgctatggtgtattgaattctggtgtctcacagggcaacagggctattgttgttgatgaacctggtgtgactagagatcgtttgtatggacgatcttactggggggatcgagagtttatggttattgacactgggggagtgattactctatcaaaatctcaagcaggtgtgatggaagagcttgctattacaactactgttggtatggatgggattcctcttgcctctagagaagctgctattgctaggatgccatcaatgattgaaaagcaagcagttgctgctgttgacgaagcagctgtgatactattcatcgtggatggtcaggcaggttcagacaattaccctttttttaatttgatcatttcattttctggattcttctgttatatttggtagttctgatttttagcaacactttctactgcaatagttttttcaggaatacacaaaagttttgcgtatcattgcctttctactgtaatatgaaggaatcaattttagcacctggtcctgccaagtgatggactgttgattacatactaaaatccaccacatttacaattgctccaataatgtcttgtagtatggtagtttttgtacatgtggtaaacaaaggcatctagagaaaaatattagatattcctgttagcatgtttcttgtctcattctctttgtgtgatttctgtctgaatcttctattgggtattgaagcattccttttccaacttctgcatgctgatctattaaactttttaagcttctggttattttctacctggaagcagacttacgtatatggattcttatttaacctagctcatacgtagaaagattgaatgtgtgtttatagttgctagatttgataaacctcctggtgctgaaatttttgttttgtctagtgcctttgttgcttcatgcccctgactaagttcattcttacatggatttgcattacttgtagctgtaattccctattgttgtttttcggtactgttgattgaattagtgttatgtagtgtcttatctaacggaatgggtatcaaaaatctttcaggatggccttgtggcagctgatatagaaattgctgattggttacgtcgcaactactctgacaagcatattatacttgctgtaaacaagtgcgagtctccacggaaagggcaaatgcaagctttagatttttggtcattagggtaagttcaacacgcagtgaccccttgctgtaattacacaacactcagttcatttgcaattaataaatattaaatgatgttctgttgatttttctttttttacattttacgtacagtttgtattaggtctgacatattcttgtgctgattaaatgtgagaggccacagacttgatgatattaggtaaaaacgttactaaagcccattgttagatgcgaaatataaataatggacaactagtttctgagcttttagtggttccacatgcaagatctctaaactcatttcactagcatcgctacaagttaaatgtgcttttagtatacataatctgcattctgcaatgctttacttgtgctctgactctgaaacaacccaatttgttaacgattacctcatttcttttattgttcaccactcaacttcataagaacagaatgcctattggctgctcaactcatcgttctgttgcttccttctagattttctcctctgccaatatctgccattactggcactggaactggagagctccttgatatggtgtgttcagagctaagtaattttgaggtactgaacttgcttagtttgcccagaggccagggaatgtttaattgtgtatgtctatatgcatgcttgatacccttttctgtttatggttggtaatggaatcattattataattttttgttgcaacactaaaatgttactcttggctgcggaaacaactcaagtattgcttctgacaaatggatatgctaacttagtggaatatttcactctctttcctccagtcctacaaacctagatgaatactgctagaaacacgtggtgtggtgacaccttgttatatccagcctacccattgagcttctagatccagaaccttgaatcataagttgtggtgtttgtcttttcagtagttctttaaaatagccttctcctttccaattttgattcatatatggaaatattttgtccattacctcacaaaatgttttacaggaactggatggagttgaagaagatggaaactatattcctgctattgccattgtcggaagacctaatgtcgggaaaagtagtattctcaatgctttagttggagaagatagaactattgtgagccctgttagtgggacaacccgtgatgccatagataccgagttcaccacagaagatgggcaggtttgttcagaatgcttatgaaagtttaagtgaccaagagcagcatcattatttcattattgaccctagctatgtccacttttcatgcatctttcatctttgtagcaaaacacaatttgaattggaagaaagaaatttacatctcataggaaagtaattctaatttgctgatattgcaatatgctgcagaagtacaaactcattgacaccgctggcatccgacgaagggcagcagttgcttctgctggcagcacaacggaaacactttcagtaaaacgtgcatttcgtgcaatccgccggtctgatgtggttgcccttgttgttgaagcaatggcctgcattacggagcaggtatctctaccccatcacatgcacatgtgcacccccaaacaattcaaagagatgttgtcttaccaatcttttctaacatggtgaatttctgtggtaccaaggactataaaatagcagaaagaattgagaaagaaggaaaagcatgtgtaattgttgtgaacaaatgggacacaatcccaaacaagaaccatcagagtacaacatattatgagcaagatgtaagagagaagcttcgcatactcgactgggctcctattgtttattgttctgcaacacatggcagcagcgttgacaagttaatcccttaactttattttttactccgcaataagcatttggtacttcactactatagcatttgatggtttaagctaggctatttgtagcttgtcggtgttattgtctattttcctgcataccagacctgaaatttaagctgatgtcattaaggcattaactaatgtttcatgctgaatcttcatgttcctctgttatctcccaatttcttgtaatccaactaattgcattgcatgtaggagattgttaacttcactagatatgtttttctgtattggcattgtaattattctttatacacaaatattcctcaggataatttctgctgctgcactagttgaaaaggaaaggtctagaagacttggtacgtctattcttaatcaagttgttagagaagctatagcattcaaaccaccaccacgaacaagaggtggtaaaagaggtcgtgtttattacacaacacaggtagcttctaacttcttattgaaccattctgtttattcctcttaagccaacaagtttatggtctcacctttcaagtaagtcgtaaaggtcactagcgttctcttgatctctactacaactaaattttcacttccttgtatgtcaagtgaagtccttaaatcaaatacagctccttaattcatttttaagtatctgaagatatatgattgattgaaactggatcccttaaagaagtatttcaaagtcagcaaaggatccactggttacccacttcaaagtatatttgatacactcactgtcctaagatagagtagtaatatgcattctgcaatattatcagggccctttgaaatccgtactgcttttagatttgtaaagttcaccttggggaaatgttttcatgctttccttttattttcgcaccaaaggaagcttattcttaacctgcaggctgccattcgtccgccaacgtttgttttctttgttaacgatgcaaaacttttccccgagacattccgtcgttacatggaaaagaagcttcgctctgatgctggattcccaggaacccctattcgtttattgtggcgtagcaggaagagaccagataaaaaaggtgagtcgatatcaaagtgcccacttgcataatctcaatgattttaactgaataatttttctactatcatacctgcatgcatagaattagaaaagattattttgtgattgaatcattgaaacagacagaacgacaatgctagataagtgaaaaaacacagaaggaacaaatattgtgctatcagcaagagagatttttgcagtcccattatatttgatttcaccaatttctatgatatatgtaggtgtaccgtgcacatgataggttaaggaccttggtccttgtattagaacaaatataatgctaatatctgctgaggcttgtagcatcaaggtagttgaccaaagtaataagaatacaaaatatcatgtgatgatagaacatatagaaaaactatttaattgatctgggtatatccaacaccgctatgaatttcatattaggagtaatgttttgtgctctaccatacctgctgttataagtcatatgatgatgaggttaaatagaattgtcatactaattactccatctgttcttggcaggtaaatctgcagacaacagcttgcagagctcagtaatcccaagcagaatggcgttagccacatgagttacacatgcttttcctttcttgagagcggaaaaagggagagaatacagaatgctttgcctgcattttttcccaagaggtcaagactgccggtaaaaaaagagtacaaattgtatatgtagtggacgagtactaggactggaggtcatctactaggtgttgtgactacatggtgctagtataagttctgtatccttggatgtctaggannnnnnnnnnnnnnnnnnnnnnnnnnntctgacatttgcttgtgccttggacgaatactgaatagtactctctccgtttcaatttcaggttataagaagttttgactttgatcaaaatcaaactacttgactaaatttatatacaaatatagtaatatttataataccaaattagttttattaaataataattgaatatattttcataataaatttttcttgggttgaaaatgttattatcttttactacaaaattagtcaaacgtaaagcagtttaactttgaccaaagtcaaaatgttttgtaacctaaaatggagatagtagtatattgcgtaccggaatttgccacatcggtgcctccacatttttttaacgtctcgcaacaatgcaaagttcatattcatattgatagagtaagaaaaaaagaaaaataacccacacccatgcaccgacagctccaacccaacaaacctaggagaaaaggctagcaccgaactggttgtcgctatgcatgaccagtcgctgctaggccaacaaaggaactatatccgagaatgtccaaaatctaaccctaacaactgacaccaagcccactctagccacctcttgagattgagggagagagggggtgagagagaatgttggaatgctttcccccctagcccttcgtcatgtccaccttgcataagctagagcgccgacacaaggggacatgcatctagagcaagcttacaccagttgtctggaaggattcggcaaggggctgcctagataatgtctccaaggagaggagcaaaggatacaccgctgtcgtcgtccattaaagtctcaaagagagccgagactgggttttcactcggcagccccactggaggtgaaggggcggcacgataacgccctcaaaaggtagagacgttagggtttagaaattcatttcaattgatttaatttacctttttatttggaaatatttaaatattcacctcgaatactccagtgaccgcttcgtgcaccataccgaccgcctcgacatctcgaacgatccagctcagctcaatctcccgaggtaacgcatggcgcctcgttctccccgaaattacgcctactcgtattagagcaaggtcaatagtgcagcccactactagctccaaatcgtctatagccaatgtaatagccaattcatataatagttgcttactgtactattaatatctggtcccacatgtcatacacacattacgtcttggagtccgtgctgcagctggctacaaatctgtagcccgctcctcttctctctcttcctttatctctttaaaatatgtttatagctggcttatagcctgctattgtacctgctcttactactcctacgattcttttgaccaaatattttccaccgtccgttggaattgcagtcactgacaccctgaccccacacgcacccttacccctcctgtatatataccccctctcgatttcaccatacgttcccctccccctccctttcactttccccatctcctaacaccacggcgaagatgcaccgtctccgccgccggccgaccggagagcacggcaccttctccgccgcgcttgcccgccggtggctgccgcggaagacctgttcctttctccggcggacggcgggcgggccttccgcgccgtcgacccgtccatagctccgcctccgtgatggcttgtcgtgtcgccggcggcggcggcggcggcgggggtggggtttcctccgccgcttcgtctcggtggcgaggccgacggcccattggggcccaatggggaaggcccatcccccgtggcggcttcccggccacgccaacgccttcttcttctgatgaactctccctggcaactggggcccgcaccgactcgcccaacggtctcccccaattttcgcctctcccgcctctcctctcttccaactccgacgagcggggccaacgccgatcgccgcgccggagcagggctagggttccggccaccgccaccgccagaacggtgcgtcgcgtcccgtccccatccttcttctgcttgctttccccccgttgtgttgcgctgtgtttttgattccgttgttcttgttgattttcttgcaggaatggggggttcgttcggatggttggagtttctcttatcgacctcgcacccgtgcgaggatgatgcggcggaggagcttcccgtcgagccgccggtggcggcgatggatgccgcccatgacggccgcgatgaggtgcggggagaagtcccctccgagccgtcggaagtactcgctggagaggaggaggcggcgatggatgccgcccatgacggccgaggcgaggtccggggagaggtcaccttcgagcgggcgatcggtgcctcctcccgtgcgggttacgaaggcatcaagctgggggaggagccctccctcaaaccggcgatggtgggcgcgcccgagattaagatgatcgagatagcagaggcctcctctgttgcccagtgggacttgttggcggggacggaggattgcagccctgagattaacccgaagattgtcgacctccagcagcagcagcaggaggcctctctccttcctgatgaggtcatctctgaggcagacgcgtcaatcttggcgcagtattcatcggtgacaaagaaagacgatgatgctgagttcttgatttgtcggccaaactttggttttgttacacgaccacagcaacacactcccaagaaacggcaccccaagaacaagcgggctatggggattaacttggtaagatgtttaaagccaacactatttgtatctgtctgccttctttttggacatggaatttatactgatttcattattgatgtttcaggctaagtcttcttgttcttactgttttcacttatatcttgtattccagataatttttcttgatggagattgttgtatttagtagatatatgttattctgtcttgatggagattgtcaactttcatagacatgttattctgttttgatggagattgtcaacattaatagacatgttattatgtctagatggttattattaactttaatatacatgttatttagtgtaggcattttttttaatatttatttttgttttctctgttttcttaggttactctacaatctacatgtctaacagccattgataatttatattgtcattgtgttttaattaaattgatattttgtggtattgtgttttgtagtggttaatctttaattgttaattcatttctttcttcatctctgatctagtatgaattatcaatggtgtaagcaagatttgtgctgtaagcctaattgattttttccttaacaccagacttaactaagatattagctttatatttttcaatgcgattcgtgtttttgctctatatcttaactaatatagatggtggctctgaaataaaactaacacaagacaatcttgtaacaaatatagttcgtgcatgctttgccatattattgtagggattaaattccatcagagcttttactggttgattaatactgtcaatagtattgtatataaacagtgaagattaaggcaagtaggcaactgattttgttgatttaaattcactgagctttgcttttctgatgtttatatgtgctgccttgtgcccatgtctttttgctagtcctggacactgcttgctttggcacaatgcattcatacggcccaatggtgcagtcatacctttcccttgttgttaggcttagttcttaatccctcaacgtttgttgtacaggtttcgagccaaataaatgtttgcttgttgaatatgccttgaataattttgtactattattaaataatgagtcatcttttggttaatctgcgtttgtttgtattagatgtgtttgtacatattattgatattcagttattgcgtccaaaaacatgatattcagttaatctgaatttatttggttcatctgttttactatgggattgattaccattcatcgtgaaactaatgtttgatcttttgtttttcagttggatcgagagggaaatatctgcagtgatgataagcttccaagtcagggttgcttggttggtgaatacaataatcttttgctgcagttgtatcagctgctgttcgatttaaaagagctaatggagctttgtggccaagctgataagatccagagtgaggtgttccttaaaaaggcaatgaaaaaagcttgcagagattctgatgatgctgttgcagacatagtgtttcaggccctaaaggtagatggtttcattctgaggctattaaggtatctgaagagccaattcaatttttgccggacccaggcatggaagataaggaatgagatattgagaattggtggtacacccatcaatgatccactttccaaagattctccttgaactttttgcttctgggcccttgaaccacctccaatatgggacgttgttctagaatcattgagacatatgctcctgattaccacatattttgcactttggcttgtggtggtcgtaattgttttgtgctaaatgtaatcctctaacaggctgaatgtgaaacggtcagctgtggtactgtatatagacatgtatccaatctgaaatgctttgtatggttgtatacctggatggacatatgcatcctatggatagctggtgcccagctgtggcaatatgctcgttgtatatgaattagcacagagagtggtgaatatgaaacttcctgttcttgttgatatttcactttatgttttaaattctcggcatcactgcttgtgaaattgttgaaattgtcctggttattcttggattataaatatctgatgacttttttgtttctgtttctatttttctataattttgaaatgtaataagccttcggatatttttttaagggccctcttaatttgtaaagtcttctgtattttgtgatcataacaaatttcttgttcgcggatcggacaagttgtccaatctttttcaactcgatgcattgatgtcagtatgtttggttgtggacagacaccgtttcggattggatatcatccgacaaccttggtcttcagtgcccgtgtctcgtttgctttatttgtttcggacgtccctgtcgcttcgactccgattctgttaacttcaagcgtgaaggccctatataatgaatgcacttgttcgcttctctctctccctctctgtcaaaccaagatcgacgctctggttgctttgttaagtctgcacagggaagagaaaattgtacgagttaactgatttgggcaatggaaacctcaggctctgacgagatgcagcagggcgtaaaggttgatacgactcgggtcatagagaacactgctagcaccgtcgacagcgagacgcccgtagagcaaaagaggagaaagaaggtggaaacggagtatgtcctcggtgggaaggatctagagtttatcttgtcatacgaggacgatgaacttgagacatttgatgaggatatgctcaaggaccaggcaatggtccggcaacagattgagaattttggctatggtttcctccatagctggagggaagttatctgcactgatagtgaagaagaagatgaccccgtgtccgatgatgatgatgatgatgaacaagatgacttcttcaccaatgatgatgatgatgaccagcaaaatgtcgaccaaatggataagaacatgtatgctgaggcctgaggggctaaaaagctaaaaacgatcacaatttgtacttttcttacaatatatattgcatgtcttaacttagttattcaattgattcatacctaaaaaaaataaattgatttattgtcgtatatataactagatctgatttatttctagatatattttgttcttcatattattaaaacttggtgattctttactttttctcctaatttataacaatattggatatttatctgttggataaattctcctgccatcttcccctgaaaaaaaatatatgttggataaattagtttatagcatctactaatcctaatttgctatagatagcatcgaaaggtttggctcactttaatagtaccaaaagttggaggcgcctataaatcgggcgcccgatttttttatcaaaagtttcgaaaccctagctccccgatagcgacggcggcgccgggcatgcctcctcgtcggttgcggctccacccacttcaggaggagaggagagagaagagagggggtgaaaataatattaggagagtagaggaggtgaaaaaaaattgaagtgctaagagggaaaagagagaggaaggaagaaaaaaatgtggataattggggtattttcgtaagtgaaaatatgctcatttttacatgtggcctcttaagaggtccgtttgcgaaaataaattttaaatacgggtctcttaaggagtcgtttatgaaaatagagatcattatttagacccgatcaattacggttcgcttgcaacttattagggtttatgtacggaaaaatcgtttctacaatagtgaatttttaattttaaaaataaagcatacttattttaaatctaaacggtaacagtacggtttgaaaattccagctcacgtcgactgtatatctgcgtttactcggtctcacatccgacggaattgattccgatcacaaatcaattgtttaatcctgttctattgagctaatcagattctggtttggttaggtatcctgattctgttaagttaagccaacctgattctgttttgtttagatctaaagatggtctaatatatactacctgcataatcagttcctgctaatctcaaaagcaagaaccgtgactactccagactccagcctagcgagaagagagaaagagagagacagactcagaacagtgacaatttcagatttgcaagaagagacagcaggagtaagccaaccgattaatcgatggaaacattcagctgctccgaaaaattgcagcttgatgcagacgttgatactttggttgtcgaaatcacagccaccgtcgtacacaacgggctagccacgaaggtgatcgagaaagaagaggagaacttgaaaaagaaaagaaaatgtgtgaagaagatgcatggtggagtttgtcattgatggtgatgacttggagtttaccttatcatatgaggaagatgaacttagcttccttttcgagaaaagcaatgagctcatgctaaaggatcaagaaatgttccagcggcagatcgagaattttggctatgcctttatccatggtgtgaaggaagtcatcctcaccgatgatcgatgaggacgaggaaggatgcgatatcttaagtgacgacgacgaagatatctccatcgccagacaccctaactaggacgatttaaacaccatggatgtgacaactgacaaatactcattgatgaatacaagttagttctgcatgagaatgcagctagtgatctgtttctaatatactactccgtttagttccactgatttggtattttgcatcggttcttcgtttaatgtgcttcctgctcccacctcatcgcctcaggatgcagctagtttaggctgtgcttagttcctcggtcaaaaattttttaagtacacaaacacacatttgaaatattaaacgtagactaataacaaaacaaattatagattccgtatgtaaactgcgagatgaatttattaagtctaattaatttatcattagcgaatgtttactatagcatcatattgtcaaatcatgacgtaattaggctcaaaagattaatctcgcaatttatatgcaaactgtgcaattggttttttttatccacatttaatgctctatccatgtatcaaacatttgatgtgacggagtttttggaagttttgaaataaactaaacactgccttagtatattttcttaatttgtaccactaaacctattagtattatttaatttggagataattaattaagacggacaaaaacaattcggggaacaattgttggtatataaaaatagtaaagcaaaaggtgttattaagccctactgattggtggggccgtaaaaaatgtgggggggggtccaaaaataacaattttttatacagatgcttatatcatccacacgtaaaaataaaaaaaaaattccctggaacagaagagccttatctggaaaaatagtgctatacggatattctgctcttttctgtttatggttgctgatgaaattgtttcaataaataggtattataaggatatcatgataatttaatttttttttgagaattacacagtataacgcagacactcacaacgcgcgcacttagatcacccctatgaacacacgcacgcaaaccctacccctatgagcatcttcgaagactgggccgggaaatcctggagagattaacgaagtcaccgcaggcgcctcgctgtcgacgggtacgtcgcctaccactgaaagcacaacgcctctttgaagactgggccggcaaatcctggagagattaacaaagtcaccacagacgcctcgctgtcgacgggtacgtcgcctaccactgaaagcacaacgccgatatatatatcctagaaaattcactcccatggtgagtcgaaaccaggacctcaggtgctactaagactcttgtaaccactaggctatttttttaggttaactggacacatgccattacaaattgcctatttagaaaaacaccattactatccatcgaatcagtcggatgccactctgctcttctacaattggaaccgtaccactccgtcatgggttgacagaaaccgtgacggaatgacttggttccaattttagaatagtagagtagcatctaaccgattagtaatagtaatgatttgattttgcttttctccaatcctacaaaactgggaagcattgttctgcttagataatctacactgatgtgacaatttaacgccgtttgtgtaagttattaaaactggtcttttttttttcagttgggaaaagatggaaaggactgtagtcctgtgaaattcaaaaacaggatgactttgttaccgagttaaacaatcatttgataactgtttaccagacagcactcaagattagagaaatgattgaattgtgtgagttttacgcaaatatgtcaaactccaagaggaatgccattcctgcaaagatgctgaagaatgctcactgtcaggaagattttggtgtccttgatttaattgaccaggcgcagaaaaatgacaagtttttttttgctaacattgctgtgaaattgaagtgtttgctgggacgtctttgtactgcaggttacaaactccggctgataataatcaaaaacaatggcaggcctatcaatgatccaatgtcattagattctgctagctaggtagctccttatgattggaagtagtcctgggaatgctcttcagctttgatttggaatagaaaacaatgatagatgctcagtctccttccttaaagacctgtgagatcttcatattttctatttccctcttgtgtgtacaatcttctctttgtgttggtacttctgtttttaggtgcaacagatgtttgatgaccagtgcaatttgtattcgattttgtgtaaagctgcttttaggtgtagtgccattgtctattgttgcttgcctggtaccttgtgaattcttggtacagtatgatgatgagaaaataccagtataatcatttctggccttgaagatatatttgtttctgagtacttgtagtagtagaactctatgttgtgctgggatgtttggtgttcctaacttcgttgtgtagagctcgtgttaaattggtgtattctcctggtcatgtgttcagatcagtttgtggattcatattcaatcggtgaattgatataggcttcagactatatattcaaatcggattatgcttcggacttcgttttttctgttccactgttcctccgaattatgtcgtactggtgagaaagatcgattaaattagttagtagtggattaatttaattccgattctgttcaacccagtctcaagttctttatactactactacttattgctttctggtcgctgccccctgaaagcaagatcgacgcgagcgtacgtcacaaacgacttgcgagaagataaactgcaggagcttagctgctcgatcgatcaatgggagcatcgttctcctacggacaaacgcaacgggtcaccgagaataataatgccgctgcctccaccgtcgtcgccgtcgtcgatgcgccgggtaggggcggatccgatgtgagttccccctcccaatcaattctagatccgccccagacaccaggtctggagcggggcaggggcggatccaacgtgagttctccctcccaatcaattctagatccgccccaggcaccagatctggagcggaacaagaggaagaaggtgaagaagatggtggagcgtgttatcgatggtggggatctagacttggtcttatcgtacgagaacgacgaagaatgtttgttaaatgagagcatgctcgaggatcaggaaacattccgtcaccaaatcgagaatttgggctatgcgttcatccatgtcatgagggaagtcatcctaaccgatgatgaggatcaagaggaaggcgaaattgtcacctatgctgaggaggaagatgatattgttaccgatgatgatgatgaggatgattagtaattaagcaacgaggaaggggctaacaacatgattgaaaagggttcagaaggctaaaaaataacaagtgatcgagtaaagcatctatgcattttagttacacacttacactacccgtttcatattataagtcgttttgatttttttttctcgttaaatttatttaagtttgatcaagtttataatttttttaacaatatctataatgttaaattagtttcattagatgtaacattgaatataatttgctaatatatttattttgtgttaaaaatattactatttttttacaaacttatttaaactttagtttaaatagggaaaaaattcaaaatgatttataatataaaaaaatggattagtatattttcagttagttcttcaattgatttgctatatggtggtgtcgagtgtgatagtgaaatcatgggtgcaagattacttcattcatttatcagcgttcaaatcccgatattcatccccaggtaaaccccatatataagattactgtaggcattcttgattggtccataggttaaagttatgtactccctctgtttcaaaatatttgacaccgttgactttttagcacgtgtttgactgttcgtcttattaaaaaaaatcatgaaatatgtaaaactatatgtgtacatgaaagtatatttaacaatgaatcaaatgatatgaaaagaataaataattacttaatttttttaaataagacgaatggtcaaacacgtactaaaaagtcaacggtgtcaaaacattttgaaacggagggagtatatatacttctattcattatcttaaaaaaatatatacttgtgaaaaaggaaagattcagttattacggtatgcaaaattccccaccttgtcatttggcgtgctttctgctcccgccttcgacgtcacatatcacgatgcgcttgcgagactgaacaaattaagctggagtactatattatcatgttgtttgctgcacgagatcagatagatgcaccgcttcatcgatctgtttcgatgaatcgcgcgccgatcgagacgttgcccgatctccctcgtgtgcaaatttcagctcaagcactgcaaatccagtttgcgaattgcctgaaaaatttgcaaattgagctcaaacactccgtgtatagttcttcaaattgatttgcgctggcacgtaagatgtttatattccccagcccgcttccgtcgttcatttgacgtattccttgctcccgcctccgacgccaccgtacatcgcacggttgttgatgtaccggatgcatgaatggcttggtcgctctccctctctccatttcaacccaactgcgtgaactaaacttaatttgagcgcgtcagatatcaagctcctacttgatatcgagccggttagcggcaaggcgttggcgtggtggccgcgcgttgaaggtgtacagttagtggtggccactgttttcagaatgcaacggcaacacgagaaggcagattacaggcacaagtccaaccttgttgggccagcaacggcgatgcctacatacactgctttcccattggggcgtttttacgtgaactttctcaaccatgccacctggatacaagaacttctccgaggaattacttgcatgtttcctcgtcgatcggctggatgactacttcgctagaaagaacaagatacatgacaagcgcgtgaaaccaatcctggagttggtaaaaaaaaccaatcctggagttggtaaaaaaaaccaatcctggagttggtaaaaaaaaccaatcctggaggagcagagaggatttgcaaggagtacaaggaggaaggctatgccgagtactggatcaccgacgacgaggacgaagcagccactcgagctccggcgccgggacggaggaggggtcgacgaggggtcatgaataagaagcataccggaggaactaagaatctttaagtgaataatagaacaaagtttagagatatctgtgcactcgatgcaggtttgagagcttcttatgtagtactcccttgcattttaatgtatgatgtcattgatttttttatcaacatttgaccattcatcttatttaaaaattttatgtaattatcatttattttattgtgatttgatttattatcaaatgttctttaagcatgacataaatatttttatatttgcacaaaattttgaataaaacgaatggtcaaacgttggtaaaaaaatcaatggtgtcatatatcaaaatacggagggagtaacaaacatctggtgatcatctagttaaaaggtagcccgcatctcccaagtgttgttttcgttgtgctatgttggatggttagctagtataactaagtgcagtagttaagtgcttttacggttcttgagagttccgatactttatagtgtaaaatttggtatctaccgagagatactaaatttgcgctcaaaattttggcacttcttaatatctcttaggaactataaatatttcgcagtagttaattcaatttgcgctcaaaattttggcacttcttaatatctcctagtaactataaaatctttcgagtagttaaatctctaatcattgagaaaatttaatttgtgcccttaaaaatttgctcaatcccttatgtgtccatcaaattttgcctcatatcttacacgccatcgagttttcatcttgatcttctctgtactcattttgctggttgaccagcaatttttttttcaaaatgtaacatgatctaagttgaaaaaagtcattgtaaaaagcaaaggggatagaattatttaaccacaaatttgaaaaaaaacacaaaattgttaaataaatttcagatcaaccttgatgaacttcgttgaacattttcaacaaaatttaaacctaaataataaatttaaacttcgctgaaacaatttggtaccgtgaggtacggtatctcgagatactttttgatgtactggggcatatctcttccctacactaactaatgccaacacatcatgattaatcatcatatctttctaacgcttcctcctcctgacaggttcttcttcacggcgactccattgcggaaccttctccggctaggggagcagcaactcgagcaggaactttattgtctttgtcgtcgtcgtcgtcgtcgatgtcgacctcgtactcggcatagcctttggtgaagtactgcctgaggatcccctcccgttcaccccggatttcgttctgcatctttatccagaaagccttgtcctcttctcggctgtcgtcgatcgccttgagttcatcgatgtagtcttgaggacaattcgcgaggtcgtcgccgaggatctcaatgatactcggcatgttgtcgtagtcgggcatctcctcttccttgtacgtgatgcagttgttgatctgcgcttgggtaaaccgcaccatcttcgtcttcgccttcttcttcttcttcttcttctccatcaccggcgccttgccttcatcggaggtaaccggcgccggcgccggaatttgtccgtcactttttttccccgagggagcttcatcggaaggatccatcgttgtcgatggaatttggctttgatcacatgttcccttggatgtgctcgccattgtatttcacatgttcccttggatataggctcttaatttttatggaagcaccgggtcgatcagaaataggtaggattcgggatcacctcgtagttcaggttcagcaggagtccatgagatgcgcgactcatgttcgactctgactcttcttctttcatggtggatttgccgtacgtagttcgtgcgtacggatccggccctatggcagccagcacgcgcggccgtcgtggttgacgccagcggcgccgggacgctcgagctcgctcctaacggagatgactaacccatctctctcgtttttcgtgcgcacgcttttcaaatttctaaacggcgtgatttatacaaaaagtttatatatgaaagttgttttagaaaaacatattaatccaatttttttaaaaaagttaatgcttaattaatcatacaataatataagcttcgttctgcgtgtcgggaggagtcccgaaggtaatttgacatgctgccatgcatatgcaccaactacaaatttagctagtagatccgggtcctcctgtgcacgcgcgcttgtctaccgcgtcgtgcggtggtgtggcggcggtgcgacgcgcgcagccggaagcgcggcgatgcacgcggcgcgaatgtcgtcggtgccgtggtcggtgccgagcgcgcccgcctgcgccgagggccacttcacccatatcctacgccgataattgctcggctatttatagtgtagtcttaaaactactcaaagtgataaaatatttttaaaaacaacctattaagtagcattttattcttgtcattttaatgggtggcgttttgtcgaaaccacgtgaaaaaagagtgccatattgtcctttttctccaatgtttggtatgccgggcagccgggcacactcacagtcacagacggcatcgaatccggaacctattcggttcggagtcggatacaaaacaaacgggtccgacgattcgcggaagcgattccgaaaccgagttattgttggagttgcgcttgcgctgcctatatatattccggcatctacccgaacccgataactctatcgcaatcgggtcttgggcctcaatcgagaggagactcaggggaacaattcatcaggggcgcagctggccttgccttcgtgggcttaggattagatgccgcaccttttttcattcagatgttgtgatctgatgcgatgttgtatcattattatcatacaaatgacttagctctttcggttcggtttcaatggtgacggaatttcaggcgtcggggtgatggatttctccaagatagaatttagtgaggcgaagcggattttggcggcggcgctactaacctccgacgacgaagatagcaagcctccgacgacgatggagaagaggaagacgaagatggtgcgctttacccaacagcagatcaagaactgcatggcgttcagtgcggacatatccgacgacgacgacgaggaatccctgcccaagctctcggaggtgctcagcaaggatatcctcgatcgggtgccgcccgaggttcttgacagcttgatagagttcgagaacacccggggagagcgcaaggctagatgggagaagctacgggacgatcttcatgaggaacgggatgctatcctcaaacaatactacacgaaaggctacgccgagtacgaggtctatgatgacgaagatgatgatgaagatgaagataataaagttcctgctcgagttgctccccctggccgccgcagaaggttccgcaatggggtagccgtgaagaagaatcggtcaggaggaaacattagaaagatataaactgaatgatcatgttcagtgttggtccatatccatcttagttgtagtgtagggggaattatagtttctccttcatttatcagtataataataacagctgtgctactctgtggtttgactatagttctcttttagattcctgctatggtttgattctagtcgtgctatgtttttatcttggtcagcattgatctatcatcatggttcagggaacctgaaagtgacctagactgaagtcacagatcagtagttttgttgactgctctccctgagataatttcagtagtagttctgttgactgcttttttttggacacctgaaaaatgttaggttataatttggaaccccttgcaaaaagctcgcctgaaatatgttaggcctaatttaaagaagctaagctgatctctgttgacatgttttctcctacattattcagagttgcatgataaggattccaatggactaaactttttgacattgtcatatgagaatggcaccctgttaccatctgtttctccaaatgccaatgcaactaggatcaacaccggaaatgaatgagtcaggcaggcagtgtgcttgagacaatcagacataatattttcagtttagcttcgcatacattgagttggttcccccataattaatataccaggtcttagttggtccccatagagtagttatcacttactggtatggtgcccgtgcgttgcgatgggacaataaaaatatatgcacacggggtaaaattatgttaaatagtttgagagtacgtatattgtacacgatccctatcacatatctcccctataaatacattgccattgtcataaatcatcaccaattcacgacaaacaggatcgcgattgccctttttctttcctgttcacttccttttgaaagcaaaacacaaggaaccatgatcagctccaagaagcaagctcagtttcctaataagtggcactgaatgggtgccatcaactccattgctgactacttatgttcacttgtaacaatcttctggacaccataaaaaatcatgacatagtcaacaatcttctgttcaccaattcacgacaaacaggactttatcttatcatacgaggacgatgaacttgagacatttgacgaggatatgctcatgtaccaggcaatgatccggcaacagattgagaattttggctatggtttcctccatagctggagggaagttatccacactgatagtgaagatcgaagaagatgaccccgtgtccgatgatgatgaggaggaggaagatgacttcttcaccaatgatgatgatgaccagcaaaatgacgaccaaatggctaagagtatatatcattggttacttctatactataagtaaacaggtgggtgctttcatttgaatacgaataattagacatagctacattatctgcttctatcgttcgtgtcctccaaagaactgatcagaatagtagtagcacacgctgagttgcaggtaatttcaggaaggaaaaaaaaaaaccttgggtcagaccaccgttgtcactgtggggtaaactccagaagacagagaaagctaaagatatgtcctaggtatgttttctctaggaaactagtactttaaacatgaggtagacgtaggagataataacatcaaaaccaatagcacttattatattatttagttgtatctggtagaagaataacaaactattgctagagttgacaacttttttcttccttaggaacggatttaaccgatttgcatcctattaaatctttaggcttatagaaatgatatagccaagctatatcatgacaaacggtgataatctacggcttgaggcgcctgataaaacgtgtattttatattgaaaaggatgttttcgttcagatattgtgttagtattttaacagtgttgctgctaatgctgatctgttatgctaaacaagaaatattaaaccaaaaactgataattgagattgagttccataatccaacacaggaagatactacgacaactagtaggtaaatcttaaaaaaaaaaaaaaagaacgactcgactgctaatcagcgaagtgtatcagcacatcgcttagtagctaattcagcttgttaacttttcctccattgatggaaacacccggtcgaaaccttctttgaccaggatgaggagcagggaaatcttcagcgcctgcaggagaggattcttggtcgccagcaggtaaggtttcttctccatcagcttcaccagaaggtaaggttttttctccatctttacctgcagatcgattcttcatcttcacctgcagcttcgtagcctttctgataagcgtctttctccacatagcctttctcatagtactgtttcagaacattgtctctcgctctcatatgccttgattcaatccggtttatatcacggatgatcttagcaaagtattcatccatatgatccccaaccttaaccatcctcctcacgaaactccacggtttggtaccggatgtggctatcaatctcggcttgagacatcaactccttcttcgtcgccgtcgtcttcttctttttcccttccgacgaactgcctgccatggtcgtcggctttttcccttccttctctgctgctgatgccgccgttgctttcttcttgccttgatcggaagagcttgacatgatcgctggctcgcaaatccagatgacaggaagcgcaccctgcgatcgattgtcgtgtgatttggttatgaaaaaacctgacctcgatacatctgctgcatatttattggttggtagctccagttcacaatcggagtcggaacctgcccctgccgatattcccaaccggaatcggcagagcttcagctgcccaaatctagtttagtttagggtctggattaggcatgactaatttttaggaccaagtttgggtatcggttggagacttgttttaaacttaaaattccaaaattagatttttaggaacatgtttggatatctcttggagatctctaggtgacatcatttattattgtaaattaattttctagaccctaaaagtactcaaaattgtgtctcatccagcctagattcgaagaataaatgtctcatctaatcctaagttggtatatactcctattttggaacggagggaatatatatttaatttttgggtgtaatttatgttatcctcctggtcctagttttgaaataatgttttgatcaccttaatctttcaatgttctatactgtattattgctcaattgattggagcatttgtaatagtacaatctcaggcagcacggaaacatcctaatatgcgtgcctttgaacaaggtctaagcacgtcatgagcaagaaaaaaaattgtgagctagcaccttatattactcagaagcatgccatagaatcaagctgcaaaaatattacacaactagaagatgagaagatgtcagtgagggctttttactgattatcatcgtccacagatgtgattgcaatctccatcttctctttcctcaagctgtctgcaagcttcaatggccgaagttcaatggtggctgctctcacgaaaccatcctctgcattgtccaagctgcgttcaatcaccatgcttgaggtactcatagctaaaacaagggacagacatttgcacaaactcatagctaaatagatttgaggccaccgagtgcttctgtgctaaagaaatacgagtaactttatatggtatgtttgctaatatcaagtgtttgttaataggaaaaagtaagctacattctgtctctagcacaactaggatccattttattggaaaacatcagaccaggctagataaagctacgaactgagcaacatagtactcatgcatgctaatgtgacagaagcagtatgcatggaatgaggtgatcatgactaatgacactgattgacaagtatgtacttaaattgaaaaggtagtaccttgcaatccaagcagaggtcgtttatcaggccttttacttgtgaaattaccccagcaatttgaagtctgacaactcccgaacagaaaaggcctcaaattttggaccaatcaagttcagagcacacataaggttgcaactcacaattgttaatccttgctctgcagaaagttaaccacaaaagatggtttgacacgatctgctcgatgaggtacaagaacattcatcacagccttcttgtttaattcaccaccaactgcaacatttgtaagcacaaacataccctgaagagaggaaacagaaaggccaatgactaactatgatttttgcattctttttttcagataataaatagtatcacagttaagaagcatgcatccgtatgaaaacaaaaaaaaaaatacactgttttattggaaatatttccctttttgccctccatagtttaaaaacacatatgaaaaaaaaaagtatagataaggtaagtcagtatactgtagtttaaggaatactgacctgtatgcacactcctaaggcatatgtgcattactcagctgtcttgaaatagcatttaaaatcatgccatcttcaccaataacataattaatggtgtccacatatccttcaacaaaattttgctgctgctgctgcacctcttcaccctactatttcaccattcgctcaaacgctcatgtgaatctatctgaaagtgccaagacaacatccttgacctcatgtattttgcgacaagggcagtgacggtaacaagctcaccgccactgctgagctgcttgacatgagaatctgtgctgcattgttccccacagcagcacagcatctgtgcccacacctggcagatcatctctagcgtgccagtgccatcagcaggcgagtcttgccggtcgatgaggaatgcaccaagcgagcatcctcccctcaacatcttgtccccaagtctattagtatttgtacaagttaatttaaacttcggtttagagctattcgtcctcaatgcatctgcgttaagttgtagcaagtggagcacatcctcagctgtgctgtacctcaggtgacgagtgatagcatagcacagcacaagataatcattgcggctggcatcgggaggcagcatgtggggacgtgatgcaagcaggaaaagcatgtgattggacagcgcctgagccgtttccataaggtcagcagctgaacctgaaccatcgactacctctggttgctcctctccagcagctgaacttgagccattggcaacctctccttgctccccttcagcagctgaaactgaaccaccgacggcctttgcttgatcctcttcagcagttgaacttgaaccactggcagcctctgcttgcccttcttcagcagctgaacctgaaccaccggtggccgctgcttgctcctcttcagcagctgaacctgaaccactggtggcctctgcttgcttcttctcctgatccttgtaccagcacaggtagatctcagtggcgatgtgccagatgaggatcctctgctccatcttggactcagcaacccaggctgggtccctgtacaatcctctgctttcaaattcctcctgaccccattgcttcgccttcatggtctccagcagcagctgcttggtacacgccgagatggggatgggcaggcccgagtaagccaacctgttccaccagtcctcgactcccatccacctcgcaatcttgctgcatcggctggccctgctgtgcacgcacaactgaatcaggttgagctgccccatggagcgtgaccagctgcgcctcctcctccaatatgccgcacggaccagccggcggagacaggcgggtatgtgagcaagaaaattacacacattacttccttccgatcccttctttaccaggagtgcacatgtccagctcgagaacatggccctcaaaagtgacatagtctccaggatgacggctccaacaaagaggacatatgtaacaatgacatctgctctgctgtaaccattcagcttatgctgatgatgatttccccagactagtagtatattaaacagaaagaatgcaacggtggtggccagagacgaaagcactcggatgcaaaggccataccaagtgtgtgtaatctcagacttggtgtagaagacgtcgtggaggagggagagttgcatctcagccaccttgtacaactcgtcctccccttgcaatcgtgatccttcattcatggggccacacaaaaacagacgaggtaatggccccttaaacctatccttggcaaaatccaacaataggtgagcatttaatagcaaggtttctgctggatccaagcgacgtatgaatgactcaggcaccatttgagaaaatcttcttctcgctatatcactctcgtactttccagttgggctactaccggcacatctgagcgcccagacacgctccccatacttggcaacacctaccattaacatgaggatggtggctgacaggagaagcaaggtccggctgtcgccaacaatgactatggaggacccatagatgacataggcagctgcggccacctgcacaacaagcgtctgcaggtggcgcagccacagccggttgtcctcgatggcgtaggcagtgattttgtcctgcccaccaaggtgcagcagcaggaacggtgcccagagtgccaacagctcatgctctggtgacctgctggtaacagagaggtggccaagcacgtagatcgctgtcccgtcggccagcatgtatgcggaccatataaaggcccttagcacgccagagtcaatgtaccggcggaattctgccaagatgaggagtgtgacttggaccatgaggctgagaagcaccagtgcttggagagcccattctttccatgcagcgctcacagcctctgctcctgccatcgatttctccaccttaacatctgaaatgtatacaccaatcgattgacataagtcaaaactacataatatttctttttagtttatcaacactatcaaacctaattctgatggcaatctcaagttctaaactcagcatccaagcccaagcagaataatgacagctgagggggtgtgcttccattctgttggactttcccttgttccgtatcacatgttccgggttgttgtttctttaattgtggttgtgtacatctttattatgcagagaggttgtgagtaaacttttgtgtggttgtacttgtattagctagctgtaataatgagagtaataaagctcccttttccacaaaaaaaaaaaactactatcattataattgttgtaaaagcagactcataccctatttcagcctaagcattcacattgccatgagaacttctattagaatcattgtaattaaggctattgtgtacatccaaagaagccactgagaatgcatcagactctttaggggttgtgtgcttaaagaatttgtgattgacttcccaaacacttttctcttatacgtcagttgtttcattgctattatttcagttttcatttgcttcattcttaccatcacctgaggccctgagctggctcatggcatatatggcaagccaaatacatactgtattcaggatatataaacataataagtgatattagagccaaggcaatgtcaatctgatttacaaaagaattagcaatgcatcaggtgccacaaattcaggaacagccttaaacaatgtggccaagcagaaaaacttgatagcaatgaagtcgtattaagtgagagctacaaaaatctcccagtttttttggctactgatgtgataaatgaatcttgtgttgcatgtacttatgtgaagttgtatgttgatctagttgggaagcgcatgcggaaatctccgtcttttaacagcatgattattatctatgcaccacaattaaaatttatcggacatgcatttttctaacaagggtaatttggatgaaatacctcctgcagtaaacacatattacacagaagctagctatgtgaatagagaaacttacacacgataactgaatgggtggagaagtgatcgatgataatcttcagtttgacagacaagttatatatggtcagggattagccagtttgatatgtttgaggggatgaatgcaattcatgcatagttaagtgccacacacaaatatatcaacatgcatgcaaaatctgatgcaatgcctcccagagggttaaggaatcaagaaaagatgtcattcatctgatacctgcccagcagcaagtaaaggataaaagtaaactattctcctttttttccccaaaaagaaagtggagtataagagtcaaatcactaacgctgtatcactttataacgatgcctcattttccttttcatctacaataatatatggttaacatcacatcacaacccctctaaaagaggacctagaactgaactcgtataatctcattattttcccatctaattctccctaacctccattgctccacttacacatgggcccacaagtttttttctcaccaaacaacaaagaaaatagttgcatagattccaggaaacttggtcctgacatctcccgcggtcctgcggcatatgctaggttcaaaactccaggaaaaaaaaaacagacctccagtacatgttttgaagttgccatgggtagccataagcattaagatcccatagactgtgatgttaattgaatcatcaatctacagatatttaagacctcgctggaacccatgattctcaaggcatatgaatagaaaaggattagagtgctccaactcctacggagcgttgaaaacatagaagaactgcacaacaaatagctgtttgaatagagcacatgaaaaacacaagaatcatataagagaggccatcaacttacttctttggtcagatgaatcgggctatcgagctttgtttcgttggtagaatgaataccgatgggatgatctagtcttttttgtttggttggtagtatgaatatcggattgtaccaccccttcccacagttgttgagcttatgattaattatccatccatttgacagtgacacaagcaaattgcggtcatatcagaaacgaaattatgcaccgaggttggtgatcttatgacttattatccatccatttgacagtgacacaagcttcacattccagtcaatgaacatattagaaacatgttaaataagaaatcatccatttaacacaaggttcacagtcacagacaccctttttttttttttaccaaccatcgattcgtctacaagactacagcaacaaatgcaaccaatccttctcccatctatccattataccatccatccacgaaccaagtcagggccgcaaagggataatcgattaccttgggcggtcgtggggagaattttcagaatataacacccaatacgcactgcttataggatttgtcacctaattcatactactttcagaatacaccactagagtacgaattttcttcgttccgtaacactccgtccatccaaagacgcccgtcgtcagttcatccatctctcgccgtttgcccgcacgaatctggccgccggcgagctcgtcctcccccacgccggcgagctcgtcctccccacactagcgagctcctcctcccgcacgcatctggcgagctagctcgtgtcgtccccgagctcagccgccgccgcaccgggctgccgccaccgcgccccgagccggcgccggtccaacctccgccgccggagctcgaagccctctgccctccaccgctgctcccctctcctccggccctccaccgcgtgcgccgatggcggcgacggacgagcgacggcggggccgacgcgggtgacgacggacgagcaacggcggggctgacgcgggcagcgacggaccggcgacgccggagctgacacgggcacgagcggcggtggactgacaacggtggcgccgggaggacggaggactgacgctaggggacggagtgtcacggaacgaagaaaattcgcactctagtggtgtattctgaaagtagtgtgaattgggtgacaaatcctggaagcagtgtgtattgggtgttatattctgaaaattctcggtcgtgggagagcgaaggagggttcgccggcggccggagatgcgtcctccgatgccggcgcgcggaggtgcggcgtcgggcaggcggtgagtgaggacgatggccgggcgcgcctattggatctatcatctacgccgccgttttttccgaccttctccggcgagccgacgagataatgacagctctgctccattggtcaacgagtcaacggatttcggttgtgacttgtgagtactactatggtccatccataaaaaaaaatttggtatattttgactttccaatttaagctttgactaataattaaccgcaagtataatggcatactagtataaattaactataagcacacatagatgagataagaaaagaataaaaaagaaagtgggctgcagatttctatccagctacaatttcaaaatgttgtgtgtataagaggtgagaccatatattaataatatagtatatatttatatgcaactattgtatgaatgcgctattaaattagctatagatgattctcttagttaacgctatcgaaatttaaaataatgttaggatcgttcgttttatttaaaaaatttatgtaattaaaatatattttattggtagttgtttaatcataaaaatagtttaagcatgatttatatttcatatatttaaaaaataattgaataaaatgaataggcaaacgtgtatttaaaagtcaacagcgttaattattaaaataaaaaacggagggagtatttaggttttatcattattattggattcatgttagaaattacgttcttgtgactgattttgtaaatgtaggcaaaattaaaatacatcaaagcttttttacggtcaaatctttttacatcagaatacaaactatattaatgataagctttgttttctaaaagtcaaaatatgccctatatctttgaacagaaggagtacctccctttacaatatttgcacaagtactgcctatttatgaaatttgaccactcatcttctttataaaatattttataatcaactaaaagcgcagcattagagaagtgtgtttatatcgtaagtattataggttgcaataccctacccgcaccacaaccaacaccccaaagccatcgtccacgacatcgtcgtcctcgccgccgccaccatcatcgacatgcaccacctcgtcgtcctcctcttcctctctgcactcgtttttgtcgtcgatgtcgaccacctccccatcgtcttcgtcgtcatcatatacctcaacctcttctctgtcgtcgttgtgcacatggttaaggcggccaacatcatcggggtcaaggagaagggattgtccctcctcgtcttcttcggcgatgacactattcctttgttcacctgcgtcatcatgtcactggaatcctgtactctgacaggtggccacatgtatagctttgtcgggagttttacttttacctgttggactcaataatagtaggtacaatagtaggctataagccagctataaacacatttcgaggagataaaagaggagggagaaagccagcaggctacagatttatagtcttatagctagctgcagcacggactccaaggtgcatgtgtgtatgacaggtgagaccagatattaattatgaagtactgcctccgtttcaggttataagactttctagcattgcccacattcatatatatgttaatgaatctagacacacattcatatatatgtctagattcattaacatatatatgaatgtgtgcaatgctagaaagtcttataatatgaaacggaggaactatatgtttataggtaactgttatatgagttggctattaagttgactatagatgatttggagcccgcagttggctatactattaaacttgctctaaccaatggcaatcggaacgtacaggatcatataactagcatacgcaaaaaaaaaaaagaaacccctggtatttactaaattattttttgtgtaagaaaattaaattttgacaatgccataaattaaatctttgggtaatgccactagatctctgaccaaatttgacttgacaaaatttggcttgacatggcacgttgtggctttagaatctttgggtcaagcatgcatgtcgtgagcaataagattttttttcgtcgacgtgcataaaataatttaccaaaaaagcgcgcgcgcatacgcatacatacatacatacatacatatatatatatatatatacatacatatatatatatatatatatatatatatatatatatatatatacatatatatatacatacatatatatatacatacatatatatatacatacatatatatatatatatatatgtatatatatatatatacacatacatacttcttcgtgttatattataagtctttttaattattttcctaatcaaacttctttacatttaactaagtttataaaaaatatagtagtatttttaacacaaaacaaacatatcatcgaaatatattcaatgctgattgctagaataataaaatatattcttaaaatgttacttatttttcattaaacttagtcaaacttaacaaagtttaatctctttgttaatcagaaaaagtcaaagcgacttataacatactcccttcatccacaaaaattacacatattacttttgacaccaagaccaaggagaaattaaattaccttggatgctacanaatcaagaagtaaataaaagcatgcaaccaatgagtatttagatgacttcttgagttctaataaaacatttaatttatctcttcatttaagtcttaaatgcataaaaactataaataggaacaacttatttggaaaaactcaaatgtgaaataggtgaaacttttgtggatggagggagtaaaataggagtatgtatattaggctaaggctgaaaaatataggtactactatcaactttcagaaactaaattttggttacttataaggccacacgacgagagcaagattgtgatcaggaatacccagaagcatgtcaagagtagtatctttattgagaagcaaaagcaagcggcaaaaccattacacactgcttgctgggcaccgtcccatggccgaacgtgaaaaacatagcccaagagagtagtacaatttacagcagcagtagcatatctccctcaattatacactcaccactcatcgtcacagcacaagcactaggtttttggtcatgctaaggaatgaaatttctccagagctagcacctaaaacctttttccgtttcggaggaaatcagctcaggttttctgacgtggcatggttacaacaaggtttcttgcttgtttctgcaagagaaaccagtcatggtcctcatggagttcaccaaatttacaatgacaggcttggaggcgacgagaagatgtcggtgaaggcttttttttactggatgatcattgttcacagttcatggcgcggattgctgatgcgaagagatcaatcttccatcttctctttgctcaagcagtgtttgattctgcaagcttcaatggcccgaggtgcaatggcggctgctcacatgaaaccatcgtcggcattgtccaagcagtgttcaagcaccatgcgtactgtaagctgcacaagggacaccttgggatgttagtttaagcccaaaccaaggtttgtaaggttcaagaacatatgccgacaaatgctaaccaactaccagacatgtttgtcatcttgcattatttttgttttttggttttaatcaacatctttatatataaacccatttgaggccatcgagtgcttgtgtgcttagaattttgcaggagtagattttaactatttgttttcctatagagtatttcaatatgtgtaaatttgctaatgtcaaatgcttgttcatagcaaaggtaaaatgacattttctttgcccaatcaagaatatacaatttagtgggcaacatcaggctaggctagataaagctacgacccgagcaacaaaagtactcatgcatgttaatgtgacaggagcagcaaggatgggtggaccataaatatctaacagcagcaatgaagtaatcatgacgctgatacccaatcgtgtgttttttcgagctcaataaataaaagaacaaagaggtaccttgcaatccaagcagggatc

SEQ ID NO: 9900 - DNA, 54958 bp, Oryza sativa
cataccactacttcgccttctcgctaccgcatcgttgcgccaacgcttggtctccgcgaggaccgcgactccgcacgccgtcttgcactctcgctcgttaccgccgtcccgcactgccacaccggccaccggtgcacgcgacggtgacgcctagccaccgcccggcgcctagcgacgaccaacgactggcccgatgccgcttgcagccggcgcccagcaactcgcttctcctcgtctcctcctcgcctccagcctcctcctgctctgtgccaacgcaacgccgtcgctgtcagcccgtcaccgtcgtcgccttacgtttggtccggccgtcccgctccctggcctggccggtagtccgcagcacaggcacaacagcagctagcaggctgcaggctagcgcctagacgcctggcgccaacgagtcagcgacctcaggggtaagccggtaggggcagcagtagcagttggaccattttaatcaaatcatcctcttccttggaccattttattgtagtcaagtaacaagcaaatttgtttgttcctcttgcaaatgatctgttcttgctgtctagatcagttaatcatctgtttaggttaatggaaatagtaggtactcctagttaacactgttctactgtgaaaatggaaagcatgcgcagttacttgcatattatttatttgtcctactgcattttttggtgtatgatgaatttatatatgatgcaaatattatttctttgttataaaatggtttttttgcctcaaatatatttttatgcgattacggcataaatacggtctttataaagcgaacattttcgccccatcttatttttaatcctgcgtccgccattgatataacccttccttcgatgtatatttaaactaagtgattacgatagatcggtcgccatgccgagacagtataaatcacttaaatcgaaatatacattaaagcaggggttatatagacgatcagacagatctagcatgtatcggttaatactccgatactactttagactaagatattaaaataagcaaaatatattaaacaagaagcctaatataccttaatgcgacaagatcttaatataaatgacagatctagcatatcaattaaacatataaaacataaagtagctaaatcaggtaagatcggctgaaaacccgatgctatctctctcgataatcataaaacaagccagatatcacaattatggatattactcaacagatcgaacccaactgatgtaacattaagcataaagataaatataaaatctaggcaagatgatgaaaacctctaagagatgatagatacacgatataatctagattaataacgaaacataactctatcgactactttctaatagtacaaaccagccgatgacaagttatatagcgcaactaatagagattacaaaacgcatatgataactcgacgaattatataaacaagattagagtgtcataaagatggaagcactaatcctgagaacgcaagccgtcatgataagtttacctctagttgaagatcgtaatcgatgcagcttaacccgaaaagcaagaactcgtcgaaatagaacgaaagtgaaaagggtggtgatgcgccgaaagttttattgaactgttgttgtaaattgcatgggttcgggtgatatttatacccaagatacatgatatgtccttgccggacacgactcttatctctaacaaactctaagatacacataaggctttgcggctgactcttgcctaaacatatctctaaggaaactattcaaaatatcctaactaatagatacaattgactatctgagagcttatctccatcatgacaatccttgtgtagcacgttaaagcagtttcataactgcctctagcaaaatcggccttatcggctgtatcggccatatcggctgtcctctgtctgatccatctcagccgatgcagtatccagccgatgcacattccgttcttcgaatctaactctttgccgaatccactttgattccaatgccgaacctggttcatatcttaccaaatttggtcgttaacacatacgcgataatgatatgtttcaatgcatgtcttgagcgtgtttcacaaaattcctaaaactactgccactactctctctcctctctcttcacctcgtccatgcatacatgcatgtattttaacgagcttcaaaatgatttttctcttaaattaattatccgatcacaccgttgtattcattgtaattaaatctttacaacaagatatcgcatgactatattgcgatgaaagaaaaatatatgtttcaaaccattaacactagtttcatatgtgatagcggcatgtttcaacgtgtattcaccatgtttcataggatttttaaagatttcaattgctaattttttgtttcaccatatataacttgatgtttcactcgttggttaattgaaacatttgaccgaccgaattatttttttggcatctggcgcccgatgggaagattcttcctttaattacagtaaatcatgaattagggattgattacaatcatgcatgtttccgccgtgaccatgtttgcgcgacgacgacagacgacagctaggagcattgggtcggacatgattctgctctaccggtgtccaactaaacccattaccatccctaattaggatatcatttgtgttatataaaacgtaaaatctaaatcgagaacgctctcaatttagtcacagtgagcgaccctatcatccaatcagccgttgtccagatatgtctcgaagaatcttactttactatagtactaattgatcaagcaagtagaacaaatattcctatcatctatgcttcaaataaaattttcttttaaattactcattcgatttacaatccgattacaccgttgtgttcgtaacaattaaatctttacaacaagatctcacatgattatattttaataaaaaaccacaaattacttttataatatatctaaattacttttagatttcactaagttacttcttaaatatataaaagtaaattgaataaagttttaaagtaattaacatatattatatttttgttataagttacttttatattatatttttgttataagttttaaagtaattatttttaggttatattgaattacttttatatgtctaagaagtaacttagtgaaatctaaaagtaatttagatatattacaaaagtaatttatattttttcatcaaaatataatcatgtgagatcttgttataaagattaaattgttacgaacacaacggtgtaatcggattgtagatcggatgagtagtttaagagaaaattgtatttgaagtgtaagtggatagtgtttattatagatggagtggtagccagctaccactagcgctaaacaatagcgctaaacaacacgatgcacgctaaaaaacagagggagtatgcaaatagcagctgtgtagcgtagggcctgttttggggaggttatagcaggtgcagcttctcacgaaatcttcagctttcccaaacagtttagattatcacctagattctaagaatttgtaattgtagaatcttcagcttcaccaaatagtttagatagaattcagaaaataaaagttagaagcaaaaaaaaatccagccttttagattctcatagtctggctaccgaccaacaaattctcgtaaccttaaactttctaaacaagacggtaaactagtttcaaagcaaggctttgcttttttctaaagaaaaaaaaaggaaagaaaattgagaaacaattaaacaacacaaagttattacgattatttgatacaaatgatatcccatggtaagtgaaagtacaagcaagaaataacatacgcgacaacttgacgatcgaccgaatgtctgcaaataacaaaccagtaaacagtcgacgatcgaccgaatgtctgcaaataacaaaccagtaaaagtttatataggctcgtagcaatagaatccgtgctagctcctgccttcttgatgatgtgacaagctgttcatagacatgtagagttcgtaaggaacaattcacagtttgcaagtacatatataggtacaaagatacagcaatcgataggtaggcatatgaatacagaatacataagattttatttataccttgtgtaatgcttatgcctgtgaactgtgatatcatggcctcatggggcgtccagctggctgctactagctggcatttcgtttctctctggatagccataactgtggaaagtataggtccctgacggatatgattctctcctggtcatggatactgttcagctgacttatttttaccacatggagaacttgaagacttcccaacgaaccatttggaatctcaagttcatccactccatcaatttcatgtagtaaaagtgtcctcaagttggcaaaactgttaattgcttgaaataccagcttggagatgccactgatattatggaggcggagcgattcaaggttacacaaatttgtagatagtaggacgagcgaatcatcccttagcttgcacaagcttaactccagaactttaatctgtttagatttgaaaataggatattggaatgtctgctcagccaacccgcccctgataacaagtttttcaagactagtaggattcagggtttcaaagtcaagagactcctcgtccacacgacttgcactgacatgcaaactagaaagacaggaaagcttcgacaatgaagaaaacaatgttttgctggatcggccttctccaataacaacagatagagtagttaactgggtcagcttctccacatgcttctcaaaggtatcacttgcctgcactgtctcgagagtccgcaattctttcaggtagttcacagttttcggggctttcacagctcggtatatgtctgggccttggccatccaatgtgtcagcagaaagatgcctcaatcttatgagtttgcctatccaacttggcagttcatttattctgctccccctgaggtccaaagtttgcaggttgtagagattggccatggaagatggaaggcatcgtatttgtgattttcgcaagccaagatatcgcaaattaaacagctggtagccaatacctctgggcaattcttcaagtggagattcttgcagtttcagaacagtaagatacttaagtttggctgtcagtgatgccggtaaggacttcaaatttgcagcagcatttctgctggccataagagtccgaaggtacggaaaatctactaatgcaccaatatcttcagggttttccgagataaataggcagcggacattggtatccatctctgctagtttaccaccatggcagatagctccaaattcttccttttgagagatagatacagccagctcatgcaccacaataggcatcctgcaacttgctactctaccttgttcgtccacatctacaacctgcagaaatccccagtggattagctcctttatatagcgctcaccaatttcctccacttgcaatgatccctggttctcgatgaaaccctctgcagcccataaccggacaagactctcaggcaacaggagaaaaccagccggaaaagtactacaatacaaaaggcagttcttgagatgcattggaaggttcttgtaactgagatatagtactttttgcacattgttcaggcttgacttgcttttttgaatatcttcaatttgttgagccatttcactccagactgactctgttttttgctttgagctgagcaatgctccaatagaaacaattgcttggggaagaaaattgcacaagccaataatcttcaaagttacttcacggagttctatagggcagtcacttggtcttccaaaagcctttgtacagaagatatcaaaactgtcattaggatgtaaacaagtaagcttcatgaattccttggggactctcgccgagggtcttacaggttccagcgaactagatggtgtttgggactgtgactccactgaagattcacttcttacaaaagcaacctctggcatccgagcgattatgattatccggctgcccattttattatcagaagctgcacggtgtaccttgtgaaccatgtctggcacccatacatcgtcaaatacaaacaggaacttgctatcctgattttccgtcattactctcagtgaggtactctcagtggaagtgccaacttgccttcctagttcttccatcatcattcttttcaaagcatcagtgtcagcattgggacattgagcaatggaaatccacgcagaagtactgaaatacttcttctcactagcataaacatccttaacaagatgggttttccctgacccaggctgaccatacactgcaatcacagaaagagctccatctttcgtcatatctttactctttagcgattcaatcagttcttcctttctttcggcatatcgcttagtatctatgttgttgacatgaggaccaaacattgatgatgaagaagctaatgaggtttccttgtccacttgaacccatcgttttttcattttggaaagatgctccagctccacctcaatttctttcagctgagcagtgaagcgatgtgaggccagtataacctgtactctcttggtaagtcgatattgtttgctctgtacaatatagacaatatattcgtccattatttgttcaacaaggcatcctagtttccgtgcttccccaatccaactttgaagtacttgcttgttatcatatcttgtttctatttgagccaggaagcaaaggatcatgcgaagttcactttctattcgcctcaatctaccttgaagttctgcttgcctaagaactaatatatcattactattaataatctcagatattactctggtaagagatctaattagaaaggatcctccttcaaggccatgttccaaagctgatcttccttcaaggtcatgttccaaagcagtagcacttctctctcgtcctagggcaattcctatttttctgagagctaggtatattgcagtttctgccatttgccttctatcccttaatcttttgacattaaatggttcgtgaaaccaaaaaggatgcttccactacagtttggagtacaatacactgagtgtcacatttcctccctccctttttatcctgcatgcaacacatagtttggggtacatgttcttttcagtttcaaaaaaagaagaaaaaaattcagtaggagataatctaaagtaatgaaagaaacaacctttcttgaaaggacattgggctacgcaatgtgaaaaacaatgaccataagatgaatgtttcgatgaaagatggacatctgatcattaacatacatgcggtaaaaaaaaaaatgcactagacacttccctcccgatccttcgagtgtctcccctcagacatgtggcaagcaagaaaaagattactccatgaaaaatagataatgggctattggtttgcatggcaattaattggcatactttaatgggctgcactaattaagatcaattttgagatgtcaaataagtaaaataaacatgaacggttgttgtgaagaaaaataggaatacatattacggtagtactgtatgtaacttacgggctacttcagttgtaacaatcaggaaaaaataccactataactacaaggaaaaaaaacaatcttaagatctttcaacaaagatggcatctcatagtcgcgcgaacacgcgactccgagaggctaatctctatgtgaaatctaaaagtaagttataaaacaattatcaactagccaacagaagggcagtctttttatgactgatacaatagacttacaaagaatgacatcagaattctcacttgggaaaaaaatgataaaagtacgctgtttaaaatgtggtagctattagatgatccatctattacattatagggatttgctattcataactcaactgaaatttttttgcaagaaaaatcagattcctaacctttggatccggcagagattcgtgctccggcgagattcttgactctggcggccgtgcaacaacggcaagagcgccggattaggtttcaggtggggttggggttagggaagggggattttggggagagggtggatccccgggtttagcgggaggccagcgaggcggctgaccggcggtgcgtggaggcgccgccggagccgcgggctggaagcaggcggtgggcggagtaggcagcgggggcaacgagaagtcgagtggttaggaggcggcggccggatccggcggcgctatgctgcggagacaggggagggtcggcggcgcggaggcatcttgccggaactgtaggagacgacgaccggcttcgagcgataagaaaatcaatagggaggacggaggaggtagccagtggcggcggcggcgtcttcgaggcagctgctgcggcgcgtgtggcgacttgctactcgcgagcgaacagacgagggtgacgagagtgttgcagttgcctaaatatgtactccgtcgtatttttacattttgcttacatggtttaatcatttatttattttattaaaaatatttagaattattatttatttttttattcacttttttatccaacgtactttaaacacaattttttgttttttgtgttttatatttgagcaaattttttaataagacgagtgtttgttttttaaattttatatttgaacaatttttttctagtaagacgagtggtcaaacggtgtaaataaaatattaaaaaaatctcttatattttggagtagagagagtatgtactacctccctatcagaatataataatatgggatgggatgagactcatctcagaataatttatctggatatgtttagaataggcctcattttatcctacgtggttatattttgggacggagggagtaagctcgtttttcttgctgcttcttttagtgtgctctaactgctctctctttttcgtcgtcgtgacttttttaagtcaattagtttataggaaaatataggccgagtatatttccaatttttttaaaaaaaactttctacttttttatcacatcaaaactttcctacacacgtaaacgtctaacttttccatcacatcgttccaattttaactaaactttcaatttttgcgtaaactaaacacacccatagtagcttttttaacacaaaacaaatatattatcaaaatatattcaatagcatattagatgttagtaaatttatttacaaatttaatcaaacctaacaaagtttaaatagaaaaaaattaaaataacttataatatgaaacataggaagtagcttatagtctatattgtacttgttgtaattatgcctcgttcttttcagcaaattcaacatgcaactttctttttttaagcacgcttctcaaactattaaatatttgagtagaatttttctacatagaagttccttaaaatcaaataaaacaatttttcaaatctttagtaattaatactcacttaatcatgtgttaataacatgtctcatttcgtaagaaaaaaactaacaggatcaaatttataatggaggtgactaatatttatgtagtctatcaataaattaagaggggtctcgtatgtataataggttgtttctaatacataaccgttaactgctctaacactttcatatttttattgaaacttacgtagagattttcctttgtatgaggggtgtttttttctcttctccatcttaccgttcaggccacgttctaaactctaactattcaacttcctcgttttccataagcgcggttctcagaacgttaaacggtgtatttttttgaaaagaatttatataaaagtttctttaaaatatcaaatgaatctaattttcaaatatttaataattaataattaattaatcatgtgttaattgtttgctctggtttccgtgccggttaaaatctcaattcctatgcagaaacgaacgaagcctagtcctaaatgatacttcctccgtcccaaaatataaacatttttaacacagtgacaagtcaaacatttttaactttgactattaatagcaaaaagataaaaaacatcaatcattttatcattaaacaaactatcataatatacaactttttatttaaaacatattactatatatatatatatatatattgtatattgtattgatcaaagtagtatatcggaaactatgtcagggtctaaaactgcttatattttaggatgaaagaagcatcccgtatcttgtgtttacatgtatcactttatccagcatccacctcatgaactgccaggggcggagccaccgcctggctagcccaggcagcctgcctgagctcgctggcaaaaacttcattaaattttaatattgttgaataaattaatgatgtaatttttattaaaaatgatagttatagtgaagtttgctcgggctaaaaaatatttctacttgcgccactgcgacgcggcaaatttactgtcgtcagcgctgtaagtctgtaacacaactaaccatgtgttctagtagttttgaagtttcaactccctcgttttccagaaatttcaaaatttgccatcgaatacgcacggttttcaggacatgccatctaattcgcactactttcagaatacatcattgggacgcgaatcttcttcattctacgccactccgtccgccgacgtcagtcctcctcgtcgtccgtccgtctgccgccacctgcgccccgtccatccgccggcgccgccgcgttcttgttcgtccgccggcgccacccacgcgccaccgccctcctcatgctcggcgtcctctgccactcgctgtcgctcatgcagtcatgctcaggtacgcgtcacctccggcgagcacgccatcgtctccggcgacgccgccctcgacctgtcgtgtgcctgcagcatcgtcatgctcatcgcctacctcttcttccaactcaagacgcatcgccagctgtttgagccccaacaggttcgtgattgatcgatccgatgcatgtcctgtacgttcgatccatccaaccaaatggtaatcaggttgaggatgatttagtgatcgctcaagatgatgagccagtactgggatgatgacgatgatgcgcgcgggggcatacgaattggatgccggtgtcgttgaggatgctgacaccggcggaggcgaagttggcgcagacaagcaggttctcgcctcggaggtcggggctcaggtaaggcagcgcgggcatgtgagtcaggaagtcgatcccgtacggcggcgccgctcgcatccgtccgccggcgccgcccgcgtccccgtccgcccgccccgccatcgcccactacccctcttcaccgaatctcgcgcgtctcgccgaggagcaccatcgcgcctccacggggaagatggctgtgtcggcctcctcgacctactcgacgacgacctccaccacgagctcctcaactagggcgattttgtccaggcggcgtgtcgggtgttcgctcgcagtggccgcgttgagcaggccgtcgccgcggcggcggatggacggggactgacgcagctgtcgtcagaggtgccggcggacggacggggacgtgggtgcgcggcgctggcggatggacaggaacgcggcggcaccggcggatggacggggacgcgggcggcggcaaacggacggacgacgacgaggaccgacgtcggcggacggagtggcgtagaatgaagaaaattcgcgtcccaatggcgtattctgaaagtattgcgaattagatggcatatcctaaaaaccgtgcgtattcgatggcaaattctgaaaattctcctcgttttctatcaagcttccaaaactgctaataaaacgttttgttttcaaaaacctttcatataggcctggtttaattccccaaatttttttccccaaaatatcacatcgaatatttggacacatacatatagggcaaaaaaatatagattaaaaaactaattacaacgttaggggagaaatcacgaaacaaatcttttaagtctaattagtccatgattaggctcaaaagattcgtctcgtcgtttccaagcgagttatgaaattggtttttccattcgtgtccgaaatactctttcaacattcggtcaaacatccgatgtgacactcaaaagttttctttttacgaactaaacagggccatagaaatttcttaaaaatcaaataaacatatttttcaaatagcatccctacaaacactcatagatcgtcacatggtgttctaataaatcttagaaattctaagaaaaatttaagacatttagccatcggttatcatttaatttggtggatccattgttttcaactattagacctattaaaaagttgtgaattcaatttatctctaaacaacaagtacggtatgtatgtcgtcgctgatgtgatgcacgcacttggtattggaataattaactatttaccactcttacaagtggtaattaaatatttgccattagactcacatatcataaaactgcgagtagcaaatttttaattaccacattttaaaagtggaaaaaagttaaattaatgaccacttggtatcgtccccgacacgagcgtaagccacccaagtgactcaaaactgcaagcctagtctaatttgcaaatggatggtaaagatacatgttgcaaactgaaaatatatgcttaggttgggaacccttctcttcgacatgcaaaacgaaactcgtattattacatgattaactgttttttaacaatggattaatataattttttaaaacaacttacatatagaaagttttttataaatcacacaatttagtagtttgaaaagcgtgtgcgcggaaaacgaaagaggtgggttgagaaaagggggaagaacacagccttagtcttggggtctgtttggttggggactaatattgccacacattttttactaaggtagctaagcttagtcttgccacacttttgtggcaaataaaatgacaaattaagcttaggcaatgtttggcaagaaaatatagtgtatgatatgtgggccaggtggctaagagttaggcaaaatagacttgtgacaagaaccaaacactatctattaaaactttggcttgcctaaggttaggtgtagtaaatttagttgccaaccaaacaggcccttagtcttagttcaatgtatcactttggtcactttaaatgctcaaaaagtgaatgttactctaaagagtcttaaaaaaaatttgtccccaaaggagggccgtgctggggccaccccgtgtcagagcaggtacaatagcgggctattagccagctataaacatattttaatgagataaaagatgagagagaagagcagcgggctacagatctgtagccaactacagcacagactccaagacgcaatgtgtatatgacaggtgggaccatatgttaatagtatagtaagcaactattgtatgaattggctattagatcggctatagataatttggagctagtagtgggctatactattaaacttgttctcacgggagcatgacctcgccaaaagcaacttgctagacgtgcctccacggcgtaagagcaggtacaatagcaggctattagccagctgtaaacatattttagtgagataaaagatgagagagatgcgcaacggactacaaatctgtagccagctgcagcgcggactccaaaacgcaatatgtgtatgacaggtggggaaccatatattaatagtatagtaagcaactattatatgaattggctattagattaactataaatgaattagagctaatagtgggctatactattaaacttgctctaaggacatggccaacggtggccataccccatcttggaagtgggcccaaccacacgaggccctcaatcccctaagagcaggtacaatagcaggctataagccagctataaatacattttaagaagataaaagataagagagaaggacagcgagctatagatttgtagccagctatagtatggactccaaagtgcatatgtgtatgacagatgttatcagatattaactatgtagtatatgtttataggtaactattgtatgaattggctattaagttgactatagatgatttagagccggtggttggctacactattaaacttcactggtggagaaatgatctttgctgggtcgacccaaaaccacaataatcccagttccaaaaagaaccgggactaaaaatgatctttagtcccggttgaaaaccccagaggcattgtatgatctttagtcccggttagtaacaccaaccgggactaaaaattatctttagtcccggttcatcccctgtcagattgatgtcagggggccgagcatctttagttccggttggtaacaccaaccggaactaaagatcaccactttagttccggttgggaacaccaaccggacaaaagatcaaaccgatctttactcccggttgaaaacaccaaccggaactaaaattcgaagcgtggtatataatccatatcccttatcctctcctcaacagatcgaatctctcccttctttccctccctcctccgcttcctccatcctcatcccgatccatcccctccacctcctccccttcctcatccgaccccctcccctctcctccacctcctcctctccccttcctgcccatcctccccttcccctccacctcatcccctcccctctcctctacctcctcatctcccctttcctgcccatccacctccccttcccatccggcagccggcggggccgtggccggcggcgggtcggggcagcggggccgcgccgggcggcggcaacggctttattttctcttttttttaatttgtgattcacatgtataattttatgatttattggatgaatctgagatgacctgtgatgtatttgatttgtgtgtaattttttaggatttgtgatgtatttgacctatgatgtatttgatttgtgtataattttttaggatttgtgatatatttgatttgtgtgtatatgtaaatttaagatttgtgatgttactttatttttgatgtggatttgggatgttactttcatttggggatatgcttctcacttgatttgggagaaaatagatatgcttcctacttgatttgggagaaaattaaaaaaaaaaagaaaaaggaccgtctggaattgccgctattctctctttactcccggttggtgttaccaaccgggactaaaaagagggatctttagtcccggttggtaaagatccatctttagtcccggtaaaaatagcgatctttagtcccggattcgtagtcccggttgaaaaaccgggactatagggggttatgattcgggagtaaaaagtacttctctaccagtgcttgctctaacggggaagtaccctcagatgagccatactcaatccaaaacttgcactcccgaacaagttgaaggaaccacagccatcaagtcgaaggcccgatctctccaatgcatgccttgacttaggctatgtgtagttccccaaaaaaaatttacaccatatcacagaatatttgaacatctacatgaagtattatataaagactaaaaaaattactaattatacagattataagatgaatgttttgagcctaattacttcataatttgacaatatggtgctacagtaaacatttgctaatgatagattaattatgcttaataaattcgtctcgcggtttattggcggattctgtaattaattttattattattatccgaacaacctatgtaacaccttatataatacccgatatgacatgctaacattttacatgcgtgaataaacacccccttacaccctcgcctcgaagcagctcgtttcataggggtgagccgtgagcgattgttgcagaagaatcgcgccttcttgcatcttgcaaagtccgtccttgttcgctttttctgccggggttcgtatcctctgcctttgctacgtaatggcagggagtaacattctctctatcctagccctctatccaatatcaacggctgataatataggatgtactagttggcacaccacataatagtgattgtagttagcaaaacctcacgctggttggtttctatcctgggaaaaatattttatagataaaattttgatatggatgttcgtatagatttaaaatataaatgatgaaaaatataagtatagtaaaaaaaattaaaattagttgccagtcccatctttaagatacccaacccgtcgtatactgcaatattttacacttcatctttaggttgtgttcgtcccaggagattgagagaagatttatcttgtttttcgtatactttcgtatacttcatctttaggttatttatcttgtttattttttaagtttgaaatgattaatacccaattaattatatagtcataacttacctcattttgcgtattatctcaatattctcttttcccctctgattaaacactccctcagccttaagcttataagagtaagcgaaaatttaaattttaaatgctttacacttcatcgtttagtctacaccttatatgagtaggtgacattttaaattttttattatactttttttcatcatttatattttaaatcgttatgaatatctatataaaaaatttatctataaaatattttttccccggctagaaacctacaagcgtgaggttttgctaactgcaatcactattacgtggcataccaagtattacgtgagtatgttatcagccgttgatattggatagagggctagaatggagagaatgttactccctgccattatgtagcaatggcagaggatacgaacccggcctggagagggtacgtacgtgtggccaacattaactgatgtggtgttgcggctcccacatttcgagccgagactatatgcggtagttatgtaagtgggtagtctcgctatccgtatagtaacctacttgctagtttatttttcgtatgttagtacaaaacttaaaagaaaaaataataaaaaataaactagaagagagataagtgggaaaaaacccgcttacacgtcccgcttgcatgtctacttgcggcgttctgtgttgtgcatggtcttattttttctaatgcagtgaggagaaatatcatctactctaaaatataaagataaaaaaattatgttgtttagcaaataatatctcaggtcattacttttacttatttcagttatcaggttttaaactttgaatggcttagattctctttctaacttctaataattggctttcaaatcatggaaataatgggcatcatgtgaatcagtaaaaaaaatgcttatactattgtataaaattcaaatattgaaaatacttttattttaaaaggaaggaaaccgtctatcgagtacaatgagcatgggtagtagtgtatacccatacctaccagataattttatgtgcacagacatacccattgcacatgtgacgaccagagatgaccttgcccatgcccattagccgcaggcgtcacgtgccctagatctgcacatttacccattaattatacttacataacataaacaaagaaaaattatatagctaataaattcactcatgtattaactatataattgtgtttaagaggataggaggagaaaaggagaagaagatacgagaaacgagatgagcaactagctcataatatttgagtattgattatttcaaacttaaaaaacaaactaatataatttctaaaataactttcgtattttttctaaaaaacatatatagtttagcaattcgagcaatgtgctcacaaaaagacaaccttttctttttctgtcattcaaatgaccctaacaaactaaggctgtgttctccggcacgcaaaacgaagctcatattatcacatgattaattaagtatcaactaattttttttgaaaaatagattaatataattttttaaaacaactttcatatagaattttttttataaaacacaccatttagtagtttaaaaagcgtgcgtgtgaaaaatgaaagaggtgggttgggaaaatggaggaagaacgcagcctaagggtaagttgttctagtttaatagtagagctaactactactgcctctgttttcaaaataagtttatttttcattcatcttacacataccaatacaaatacaaaaatacctctactttatcagatactaatgcaactattactcactttatttacttccaacacaattattcgctactttcacaaactacgatacaatgattactttaaaatgaacttattttgagacaatgtaaggaactaaaaaataacttactatgggactagtgaagtagctattaaagcaagttttataatataaccaactactacctaaaaaaattaacatatcatctacacttgctaaggccattcccaactcaagatactatggcccgtttggcacagctctagctcccaactccaacttactagagccggagctgtgacaaatagtccagatcctccatttttgagagcggagttggcagagctgttccacaaaattgtactatgggggtggagctgggtttttctgctccacagctccactccaccccaaaagacacactaccctttaatttttttagtgtattttcaccaaaattccactgaactaccccttcctatccgatctcctcctgttctctctcctcctccgtcttcttggatagcccggcggccagcggcggcgtcgtcggcgtcggcagtggccggcggatggcgtggcgatgagggccacgggcggcggcggcggaggtaggcgcgcgggtggtggcgcggggtggcggtggcggcggcggccggcgagcagactgccagcagcggagcgggcggcgacgcgcgggcttagcagcggtagtggcggctgcgcacgggcggtggcgcgggttgacggcgcacggccggcgcgcgtgcggtggcggcggcggcccatgggatgagcggtggcagcgacgcctaccaggtgtttgacaaaatgccaacaagggacgtggtggagtagagctaaccaatctagccaaacactttctattccacttcagctcttataggaaccagctctaactggacttggagtttagagttgggagttggagtttggagccctaccaaacggggtctacacatagtttctataaactttacatcatcaagaaactaatagtagacactactctttcaatgcaaacaccacttttccatatttaaatttaatgctacttatcttacatgatgtcttggatgttgtgtagaaaccatgtctcatgcaagacctggtttccttctctttcctcatttattctcttgccacatcatctttcattctaagtgttatgtataccatcctagtaattgggtcgggaatggtctaactaaatagtccatcatacaatagttaactatcgatacatattacactattaatgcataccttacatttctctctcacataggttatcggatctcgtgctgtaacttgctacaaatatgtaccccctatttcctctctcatctcttttttccttcacgtacgcacaaatataacgtgacaacctatatagtccgcttccatcattttattatgtccattttctcctcctctctttttctcttaccatgaatcaaatacatatatattataaaaatgtgtagagttaactttgcacgagagtgaacactttacagatgtctattattattctagtcatttgcttaatgcagtcatacgtaagtttgtggagaagaaaagcacctcaacattattttgtccagatttattgtactaggaggtcgtattctcttaggttggcttttttttaatggatggagtaggttagatggttggaaccctggaaagctcctcgataccagtgatgtcacatggaacctcatgttggagtagatctgctttatagggagagatgcttcacatagggagagataatagtccggtgggttaggatgaaatagttttttactaccgtcctactatttcctccaacttaaaatataaaaagctaaaattagatcagatattctttttagtattataaatctagaaagattgtctgtcagtccaaattcgtactactgaaaatctgtccagattcgtagtactagaaaaatgtcatatcttataatacgaattcaatgccaaaaatcagaaggagaatggtgccacgtggcaacaccggttttgcaggctcgacgaaacgtgcgtccgcgcgtgcagggatcgatgaaatgctcttgcctgcgtgcgtgcgtgtgcaccggtcgtccagaaatttctccccaatccggcgcctttacgtggatgagacgagatactatgcatacagtgcaaacacgttaatttctcacattcccaccgtagggctggcaaagctcagtcaggcaggccgctatttcttgtggatcaaagaagtaataatacctactttagttagagattaaaatagggttagcaggatataattaaatcatccactaaaaattcctacgttccaaagatccatctttttaagttttctatggtttttattcatctgttttacacacgtatttatgtgttttatattccaaatattttctttcgtgtattttgtttttctgagttccaaacataccttagcctatgtttaagaggagagaaagatattaaggagataagtaaaactaggtgagccattatcgcataattaattgactaataattattttaaacatgaaaaatatagaaatatgattttttttataaaagggtaacttttctaaagattttttaatgtaaaaacacgccgacatgtgggtgaaaaatgatggacgtttcctttatttgtccctttgtcgaatgcaaccttagaacaagtacaatataaagcaataagctagctattgaacaaagaaggagagagaagaaaagtggactacatataaatatttaggtgcagtatgagctccaagatagtatgtgagaagtaaccacccctcatgcaagtggtaatttcttcacaaactctaagaaaagaatggtgtggtttggatgcaaattgaaaccaatatgctacatcttaattaattagttgatgatgtgaataaatttgaggtcgtaatcacccctgctataaaacttgcttataaaatttgctcttagagcaaagataatagactaatagtgggctataaacttatgtggagaatagagatttaaaaaaaacagtgttggctttcaagtaaaatctagctctacacatgcttcaaggtaaagaaatagagagacaatcttatagtcaacttataagctctaatataagcagctttagttatctctactattaatctctggctcttttatatatgtgtattaatttgttacaggcccaattggccaggctcagtataccatgcgtggcaaagccgcgcgctttttctagtccaatcttaagtttttatattttgggaaaaatgtactatatgaaataagaatggtctaaatatcttttatttaatggggtggactaaaagcataagtaggaaaaagattgaaagaaattctgaatggtgaatgattgtggagagaataataatactagtagtctacaaaatgtaattattctcagataagtttgagtgctaaataatacttatagtgagatgaaggtagtattaacgtggactcatgtttagagctctttaaatctaggattttatttatttattgagtggttgcacgtaggatacgaattattaaatttcaatcatatttttcatcaatccagtggttctcagtactcctatttttatttcttattatgggaattgctaactgtctgttgttgacagaaaattgatggttaaatcttgcacttgttaaaccgttggatgtgttcgggatcgtgctagccgttcgatacaccgtgatttctgagaaaaagagaaaagcaacgcacaaggagggatcgatcctgtgatctcatcctatttatacaagttacagtatatgctaggtacatatgtaattataatacaattatacaattatagtgtaattatgaaaattatattgtaattgtattgcagtaacatttgatagatttttaggatacttttcagtcccttttcttatataaaaggttgacagatattacaagaaataaacttactatttatacattacaaaattatatgaaaaaaatattcaaaccatgataaaaataaagaaaaaaggtatataccaacaaaattacatgtaaaataccacttcaattttaggtatatgaatatgcaatcttatgtgaataaaaatttacaaactttcgagcacataaagatttagcattgccccgagaagaaaagcacctctattcatgtgcagtcatatgggagctcgtgatcacatcgatacatgagctcgtgatcacatcgatacatgtgctgtgacatgtaagctcttgatctctgctttgcacaaaagggagaatattgtactattggttgatattgtacttctattcatgtgcagtcatgtgggagctcgtgatcacatcgatacatgtgctgtgacatgtgatctcttgacctgctttgcacgaaagggagtatattgtactatttgttgatattgtacctctattcatgtgcagtcacgtgggagctcgtgatcacatcgatatatgtgctgtgacatgtgagctcttgaactactttgcacggaagggagaatattgtactattggtttatattccatgctttgatggggaatgcatgagagcaagtataatagagggctataagagcaagtgccacattggattgagtaataagatggaggagagaagtgaggagagagatgatgaaccatccctaagtcaagaatcaacctccacacaaatttcaagaagagtgtgagagtattagtgacattgatatttatgtactagaggtgacatattgtatgtgttgcctcttaatttacgagtgaatgatatggataaatttggatatggtaatcacatttaccataacacttgccctaagaaggctgaatactgaggtgtaggctgaatactggctcggctcggcttgcagtggctcacaacaagctaggcttggcttggctcggctcagttagggaaacaagctaaaacttgagctcggctcgtttcctagctcgagccagctggagctggcttgcaagccttcctgttaaaacatctcttcatatatattttgtaattattaacaaaaaagcaagagcaaatcatcgacatgtaaaattaaataagtttatatattcaattcttcaaaatcttaatgataaatttaaagttgataaataataactccatgaaaagcaaaataatcgatataaacacatgatggtctaggttcgcgagccaaaataagcggctcgcgagccagctcgggctcggctcatttcaacaacgagctaaataagaggcttggacttggctcgtctggcttacgagccgagccaagccaaccaagctcgagccaagcccaagctgagctcatgaatccgagcttttttttccacccctattgaggtggccgaaatctgtgagacagacaggtggaccatatatttatactgaaaagttaaccactatatgagtaagcttagagataggctataaaaatctatacagtaagcagttggctgtattattggccttgctctgaataaacataggttagggcaagtactataagcctctacatgttgctcctaaagatgtcacataggattaggtgatgatatgaaggagagaagttagaagagagagaatgtgccagcctcatacaagaggcaacctccacacaatctttaagaaaatataagacgatgtgagaattaataaaccaatattgaagtttgtgtattagatgtgatatgttgtatttgttacctattaattaatagaacttgcccttaagtagtagtgctactatcaaaatgatagaaacatgcatgttaaaaatattgtacaaatgatgtgcagttgttgacgtaaaatctaaaagaacagacggaagcgtgtgagttctgcttagctttagtataggtcctatggatttcagaatgtgttagttagtttgatcatacaactaacaagataaaatacagatagattagattaaaatgacccgttggctatttcggtctatatggaattgtgggcctaaccgaaaccaataagattcaggtcaacggctatataactgatagagtttgttattcatactatatattttcctcatttctcttactcgttcaaaaatcgtacacacaactaaagaaaattttaatcatatatacaatttttcacacggttttatatattaataaaatttatgcatgtcttatgtataatgaaacataatactaaaaccattttatatttctactacattcatactataatatttcttgagtcctaacatacatagtacctaaaaattctaaacttctcacataactaaactatttatatgtaatatatgcacactacattaattattacttatccaacacttaatattttcatctaatacataaatcatcgctaaatctatacttcataataattaaagtactaaaatttacctctattttcttcgacttatatccctcttggcttggaccattacctcttcatttcttctctcttcctcaagctcttctcttctcttttttatggcatgagcacctcgtctggtgcaaactctcttctccttatatggcgtgaggtgagcaagaaagaggaacgaaaagagtgacgttttcaccgtgcttgattgctcaaagtttgagagcattgtattgacagcgcggattcctactctgtgcagcgcaactgtgctgcggtacgggcctagctcaattcaagagtattcagatgaatacccaagatttttagataaaaaatacaatatgaggtatatatttcgtatctgttttagatgaaactatcatcagaatggccagttttcagttagatcaatgtacttagctttaattaacaatggttacattgacagaaataagttaatttggaaacttaagatgccgcttaagatcaagatctttatgtggtatttgcttaagggagttgtgttaaccaaggataatttagcaagacgaaatttgaatggtaatttaagatgttgcttttgtacgaaaaatgagtatatccaacatttgttcattgaatgtcattttgcaaagtttatttggagagcagttcagttttcttttggtttatatattcctactagcatatctcatatttttgatgatcggctttagggagttgtaaacaaaaagagtaaactgatacttgttggagcttctgtcttgtgttgggctttgtggttgagtagaaatgatagggtttttgacaaatcacctacaattacttatatgcaggttattttcaaggcaatatattggcttcgtctgtgggcacagttacaaaagtatgatgaagatgaagaattcctaattgttgtgtgtcgtatgcttgaaacgacggttatacaactgtttgtcaatcatggatggagatttaccaatacactgaaataatgttattttatctttattggtttccttttaattttaattttggttggtgtgtttgctttcatttggactgcactcttacagagtgctagtttgtaataattggctgtaactcttttgagtaaaggtcgggatgttatttcattccattattaaaaaaatatattttgtatctgtgcagagaaataaagaaaataaatactattgatcaaaagaagcctaacaagaaagcctagcacactggctccctcatcccacctgtcttatcttctcattatgtaggcccaatagcccaaaagaaggggcaaagtcaacctagaccaccactggtcgctgttggttgttccaacttccaagtcgcaacatgtccctccgtcttgctcatcaacgcaacgccgcgctgccgtcgtgcacgcgcagatgtggagtagcccgcggcgtgccgacgcctatcgaggcctcaccctcaacaggtcgcggacgcccttccctcgctcggtcaaaccctctctctctctctctcgtcatatggcccgccccacgcctccggcaccgttggtcgcgctgccgcggccgcttccgcacaacgcgcggtgcaccactgcaccccctactgcccctaccaaatcgcctcgccgaacagttccgattcgattcaataggtaacccgttcaatctacattctcccaatgtgtttaatgtgaatatctgaacccaatttattttttagattgtactacatatgttttttcataaagtatatcccaataaatcaagaaaattgctgaaaatcttgacgcaagttctaattcaataagcagtactaaaatatcatactgttgatcatacataccaaatattatgcttgtgttgtaaaacttttttttttacccctttccatttcgaatacctaatttcaaaatcctaggtccgcccctggcggtaccgcatggatgccacgggaccgacatggtcccgccctccaccacgttgccgcacacccaggccgcagcattgacgcggtgccgcaattctggcctacgggaccaaagcggtgccgcacgctcatcttacgtgaacgacccagccgactgtctcgcgtggctacgccgcaattacgtagcgctcccgcgtgcccatcatgccgtaaagagatatatttgtgcaaatctttcccatacatatatataaatgcaaaatcttaaaaaaagttatattttcaatctattatattattaaacagctttaaaatgaggcaccacgttcgctgtgggggactaaaatttcccatattaaccagagaaaaagaaaatgagagttcaagtaaaaatacaatttaaaaatagctgaaattcagaattaaaaataagcaatattgagagaagagtcaatataaaaacccgatacgagattaatcaaaatttagaataaaaataaaataaaatccaaaattagaaaagaaaaggagagtccatgtaggaatacaatttaaaaataactgaaattcggaattaaaaatcaggaatattaagagaagagtcgatataagaacctaatacgagattaattaatattcagaatctctatctctatctctactacttaaaataagaggttcttccgtcgtccgtaaaaaaaaaggggcgaaaaaaatcagtctaatccaaaacaaaaataagaggtgcttccgtcgtccgtaaaaaaacgggcgaaaaaaatctgtctgatccaaaacaaaacgggcgaaaaaaacggacgaaaaaaaccgggtgaaaaaaaaagaaaaaccaaatctgtccgatcaaaaaagggaaaaaaaaggaaaagaaaaacgaacccgattccaaggtaaaaaaagggcgaaaagaaataaaaaaggaatctgtccaattcctaaaaaagggcgaaaaaaaccaggtgaaaaaaagaccagcaaaaaaaaatgaatctgcgtggacgcggtaaaaaaagagcgaaagaaataaaaaacaaatatgtctgattccaaaaaaaaaaagaattatatgtgacgcggtaaaaaaaattgaatcctattatatttgacacggtactatatatctctatcttatctatatctactacttaaaaatttaaaatgtttctgttgtccgtaataatgaaaaaagggcgaaaaaacattagaacaaataaaagaaagttcgattcaatttacttccgtcgtccgtgaaaatcttatcttatcttaatctcaatctttccgaggggacgagcggtgccctccgtcctcacccgcgggatgaaacgccagccaaagcaaaaaaaaaacgaaattgagcaaagggataaactagattgaagtttccaaaattaaaagagggtaaacgatattgaaactcccctaactcgtaaagagggaataaaatagattgaaatttcccgacaaaattctctaaattcgaagaactctaatttcgggtaagaaccataagagtcaaatccaaatcaattaagttaagggttcgggttacttaccggatttgaagccccagagctcaccggagctttccaggaagcggcaccgccgcaccttcacctcctcgcagtcgtgtcgggttccctgcgcgcacgctgtcctggagcacccctccaccatcctttgctgaagacgggaagcgtcagcttggcgtcacccctaccgtcgacgaggtccaggctgctcggtgctcgtcgccgtttgcacgcccacctagccggaccgccgacgtcgtggcacggttttgcgtcccccagccggcgaagcaggagccgctcggcggtcgtcgctgcacgcgcgcaccagcttgccggaccaccgtcattccactcgctcgtcgccggagagaaatgggatcatgagagggatttgggagctagggttttgcccctctccccggtcggtgcttcattcggcgcggggacgattggagccgtccattagatcggacggcttagattcgcccagcgtcgggccgtcgccgccattgattatgctacgcccaatgggccgcggaagtgcatcggaccgtccccgcatatgtaggtcgcgcttagctgctcagcttgtgggccgtcgaattgactcaactcgccaaagatgggcaagcccaagtttgggccggcttgggaaggcttgggccgaaagcaaatttgatcaaacaatgtggctcacatttttcaaattaaagtccgtcggataaactgctaagtaggctcaaaaaataaatctaaaactaaatcctaaatcctatgctaattgatcaaattagactcggttctacctatttgttaatatatcaaattatacttgatttttacagatttgaggttttcaaggtgtcacaccatcaaacggtgtttttcccgttgcaacacacgggcactattgctagtaaaaataaaaataaaatccaaaattagcaacaaaaaaaaaagaagagttcaagtaggaatacaatttaaaattaaccgaaattcggaattaaaaataagcaatattgaaagaagaatccatataagaacccaacacaagattaattaaaattcagaatgaaaaataaaataatatccaaaattagaaaaactaaaagagagttcaagtaggaatacaatttttaaacaacttaaattcaaaaataaaaaaaataaattatgaaattagaaaaataaaaaagatttcaattaggaatacaataaataactaaaaattggtgataaaaaataaagactattgaaaaaaaaagatcatctaaaacacatgacgagataaattaagtaacaggtctataaagaagtagagtggtggcggttgatacgacatacaaaaactattaataaaacacaaaatagaatcctaatgacgattaaaaggaggaacgacaggcagaccgtgaagctaacgggcaaggcggttgctgggacttctagaaattaaaaataaataaatcccattgataataatattcgatatttaaaatctcaatggcaatcaaaaggagaagcagcagacggggtgtataggagtgtagttgcagagccgctgacggttggcgagacttctagaaaataaaaaataaaaaatgaattctaatgataattatgttcgacttttagaatcccaatgacaataaagagtaggcggcggatgggtcgtggaggagtatagtggcatcgtttgacgggacttataaaaattataaaaaataaaacccaacaagacaataaactctaaaaactataaggaccaatttttaaaggttcggaactttcaaaaaataaaaaaacccaatgataatcatgttcgattttaaaatcttggtgacaataaagaaggaaggcagcaggtgagccacaaaggagtacaatggcaaagccgctgacggtttggcgggacttctataaagtaaaaaatgaacccgaacgataattatgttttatttttaaaatcccaatgacaataaagagaaaagacagtggacgggccatagaggagtataatggcagcgtttgacgggacttctagaaattataaaaatgaaacccaacaaaacattaaactctaaaaactacaaaattcaatttttaaaggtttcagggagaataaatagaaatagtggtagattgagcaagcaaataaagaagcatatgacagaagtaaagggtagcaactggtgtgacttttaaaaactatataattagaaatatagggatgataagatttggattttcaaaatcttaagacaacgacatagatatttaataaattttaagtaaaatcatactaaaaaaatatatgattttgtttgggtgctagccgcagaattgcgcggaccacccagctagttttttaaaagtcaccttgcatggcttaacttacacaccggcagttctctctaaaaaaacacaccggcttaactatgtttttgcttttatccctcttccacaatttcaggacaaacatcaggcgcagttggttcttcagactgtgcagaagcagcattactggtttcagcatccttcgtccatactttattgttgtctagcggccaattagctactcctgagcagtgctgagcttcgacaaactccagcattggatacagttcacgcaattcctcccaacaaaactgcagatccttgaggcatctcaagcgcagcacctctactttgcactccccattctgaatttccagactatgcaacttcccaccagtaaaatacagtttctttaaactgtcagaactaatcgtcccaaattgtctcgacgggaagcagtagagatccagctttgaaagattagagggaagaacaaggttaaattttgcagcatctgattcgtcggcagcatctcgtggagataccattccccatgtaatcttcagtgatgcgagactggcaaaattggcaagcactttcagctcatcttctgcacgcttcagtttcttgctaacactgatgctaagtttgcgaaggttgctcaagcttaccaactcgcccagattgcaggtgtttcttttgttagagtttactaccaaaaaccctttgaggacttggagctgagacatcttgttgaatccctcgggcatatcaacgagcaggtagcactcggagacatccagatactggagcttctgcagcttggtgatctcctttgccagcacctgcagatcgtggcacgccctgagatccaacacgaccagctcggccagttctccaatggcagccgggatggccataattctcgatatgcctctcaagctgaggtacctcaggttcttgcacgccccgatccccttgaggtggtggtcgtcgatcagctcgatgtggctcttccttggataggcaatctggtcgactgggtcagccacccgccactgcccgagctgcaccgtgccgagttgcgatctgtaggtgaaccacgcggtgctcagcttgacatagctctggccaacgttgtagatcgtggagagctgcgggtggaacctggagccctggagcagcccgccatcgtgcaggcatgcgcggtgcgtcctagagaaatcgttgtttgaggcggaggcgccattgccatccggatcaatctccaagaacgcgctgctccttgcaacggccacgagcatcctgcggatccacgggtgcacggtgcacgcgtgggcggtgtcgcagtgcccccggcggcggactgtgcgcacgaaccgcaagtcgacgagctgctggaacaactcattgccgtcctccaaggatgacacgaacttttcgccgatccaccagtggatgaggagccgcttttttatgacggcgccctcggggaaggctgcaaggcagaggaggcaatgcctcaactgctcatccataccgtgcacggctcgccgcaggtgcgccatctgctcgccgtcacggacacatctccttatccctgccatcgtcggcgcagaagccgaatcctccacatcccttcctctgtccggagatggttcctcttgtatctttatcttataggatcctgagattgcctccctgatgatgccaatctgtactccgacaccggcgagcttcggctggagcgtggagatctcgccgccggcggcgagggaattgagtacgtcgtcgacgagctcctcgatggggtcgaagaggtggacgatgcgcctctcattctcgcccatcttgacaaagatagcttggagttctctcatcatgtcacggatgctgtcgagctgagcgaggtcggagctgctctcagcgccgcggaagctcttggcgtcgccgatgacctgcaggctggagaggagaggggtgaggatgccgtcgtcgatgtacttggagaagaggatgcatccaccttcaccttcagcttcagcttcaggagtggacatggtggatgcctctacaactactctacttgtgttgctcttctctttcctcgtaccattaccagagtactagactttccccgatcggtagagatctccgggaggggtaagattgtaatttgcacaaaaaaactagaaaccctaacaatgcgtcgtgcttaattgggccgcggctattgggccgacagtcgtgggagactgcgagtggagggaggccctggcgcgggaaaagtacacgcaaggtccctcaacttgttagccagatacaaaatcgttcctcaaccgcaaaactggacatccggcgtcccccaacttacaaaaccggtcacaataggtcccttggcggttttgaccccggttttatcccacgtggtggctgactcagcgtgggatccacgtggccccacatgtcagtaagccatgtcatcacctctctctatctttcctctccctctctctctctcacttatctcctctcggcaggctgggcgggccgggcggtgggtggggaggtccccggggtgaggcgggagaggaggtccgacgaccgccgaccggcgacgcggcggcggcgacacgggagaaggggagggcggcggcaacccagcgtggtcgtggcgcccaacagacaggcacgggacgggcggcggtaaggacggtggcggcgcgtggttgtagacgaagccgaggaagacggtgtcgacgtctcccccagcctcagccaccaggaaaggagctgggcgcgggtggcagccgtcgagggcgtcgcggcttcggtcctcgagcgccgtcatggcgtcgccgtcgtcgctgcgttcctcccgcctcgccaccaccgccaagccgacgccgacgcgttcctcctgcctcgtcgccaccgcctagctgacgagctcgctagcctccccgcgcctccgccggccgcgcgtgtggctccagctcggccgccgcggtcacccgccgcttctcgtcggtgagcacggaaaggaagctgatgccgccgccttgctcccctgagccaacgccgacgcattcgtcacgcctcgacgccgacgccggcctccccatgcctccccgccgtcgtcaccgcgttcctcccgcctcgccgccggatttggacttgggaggagctcaccggcctccccgcgccaccgccgattccgcctccgccggccgcgcgtgtggctccagctccgccgccgctcctcctctccgccgcgccgaccctcttccccaccgcgtcggtgacgtcgccgccgccgccgccgcaccggctctcctctccgcatcagctatgatggccgcagccgcgtgccaccatagctgaccgcacgagggggacggggaggccggcgagctcgcaccggcctgagctcgcgcgccgccacccgagagccgttgtcgccggccgcaccacccttcggccgcacgctgcctcctgtgcgagagcagagagcgagaggaaaggagagaaatagagaaagagagaaagagtgctgacgtggcttactgacatgtggggtccacgtgggtctcacgctgagtcagccgccacgtgggacaaaaccagggtgaaaaccaccgagggacctattatgaccggttttgtaagttgggggacgccggatgtccggttttgcggttgagggacgattttgtatctggctaacaagttgagggaccttgcgtgtacttttcccccctggcgcggtcgggtcgccgtcgccgtgttcggcgggtgaagtgtcggccgcggctgcaggcagagggaggcgctggcaccgccgccgtcgagcaagtagaggcctaaatttcatgggccctagcccgtcgcccctctcgtttcggcccaggaacgaccctgatgctctgccatctcatctaatagtttaggacaggaggtatcgaaaacaacaaattaaatgcaaaaccgggcaaatacattttctcagtttgcaactttgcatacaaccaactaatttttgacggacaggtggattgagggtcgctcggtgggctcctcctcttgcagtgcttccttatcttcgggctttgggtacggtcgcctctatcctcgtgggcaactcctaggtaggggacatccgtgacgctctcaccgtaccagtcatctcccaattcctgatgctctaggatgcagtgctccctatccagctctcgccaggcatgacggatcgtcttgtttggcgttggatcagtgaccagcgttattcggcccgctcagcctaccaggttttcttccttgggcaacactccttagcttgcgtcgatgtgctctggcatgcaaaaggccctgctaaatgcaagctcttcctctggttggcgtttcagtagcgttgctggatggctgaccttctgcaaaagctaggtatcgatagtcatttggtctgccccgtctacgctcaagatcctgagacagcgaaccacattatccttgattgtgtgttcgctcagtaggtctagcatcttgtgttgtctattcctggttaggctaccccacttcgtcccgtggtgactcgctccaagcttggtagccgacctctagggcctgtctgcctgagtatcttcaagtgagcttcgactccgtagttcttctggtctcttggcagttgtgaaaagagtggaattctagggttttcaactcctttctcagtctctgtggttctcgagtccatcctccaggaagaccgtctgtggtcttctgctagcaccgcggcctttggggacttgttgggagcgtagtggggctctgccaccaccctccctctctataggagcaacgtttctctagtagtagtttcctgtctttagcaatccttttgtattttctcttttttccttgtcctctggcaatggacatccagccgattgcgttgtgtaacgaaaactttgctttcttctaatatattgaaaaaaattaaaaaaaaagctgatggaaaatatgatccctgcctccctgggatttgccatattacaatcaaggttcatacagtaaagataaaccatcctaactcacaattctaagctctaaacatcaacataatagagtactgcacatcatctagacagaatttatgtagtagccgccatgcaattccactccagttcaaagacatttgcagggcattctctagcatcaagtccagcagtgttctccccgcaaaaaaaaaaaaaaaaaaaaaaagtccagcagtgttctgtcctgtgtggcaagttttccactgcacaagcaagtgagcaaccactgttgccaacgcaaagtatccctgtctgtttccccagaacatagaccgtctggttcaggagttggcggccggcgggagtcgacgagggcggcgaagagttgccggcggtcggccaccgtcgcctcctctggagcggcggtcgtctggagttaacaaagtcggctggaggctgctgttcggcgcccgtagccggccacggcgacggcgaggtgaggcgcgctgctctgcacgagctgcctccgagcgacagatctcgatcctccctagtgtggatctaggggcaaaaacgtccacaaacttatcagagaaaaggaggggaaagtgcatttcgcagctctggcggcatagttgagcacttgagtggtaaaattgagctagctctttctcctcctcctcctcttcctcttcttattcttgttttctgatgttcttttcatttcctgattattaccttctcgagttcccaccagatcggacggagtggcggcgttgtacctgtcgtagagaagaagcgaacggtgggcggccgcaggatgtcggagctggaggtgtatagcttgctgcagaagatggcggcgatgagggacggcggcgactggccggccggtgcggagttggagttgcaggagttgtacaccgtcctcgagaaggtgcagcgcaagatggctcacgcggagccgctggtcgtcgtcgacagcggcaactccgcccgcgccgcctactccctcttcctcgcagaccttcgccgcgtcacgttcaccgtcgaccaagccctcgatagctactccgccagcgcccgccgctccccgttcatgcaccgcgtgcgttcggtggctctgatggggatggcggcatatggtgttttcgcgtttctctcggcccgttcgtcttccctgctgcaggaaaagcttttgccgcagccgctagagctgcgccccaagatcgccagaaagttggaagaggccgtgaaggacgtgaggatgcttctccgcctcttcagtacctacgtcgccgatctcctgccgccgccggagcaccagcagccagagcctggtctcggcgctgaccccgacgatacgtggtctcttgccgatcaaaaagaagccaacctccttgtcaaaggaagagaacaggacagatgtaaggtacggcagatcctcgaacatcctggaacgaaagtggtcgtaattgtaggaatggccggggccgggaagacgaagctcaccaggcatctgctgtgcgaaatgtgtagtgctactacgcatggcttcaactactctctttgggttacagtgtcccaagatttcaatccagaatggatttatcggcaggtgatgtctaagctgagcgatcaattgaaggcaggcgaagatgctgaaagcttctggtggtctctaaattcagatctaaatgaaggcttgatcaataagaagcatttgcttgtgctcgatggcgtctggaacgaagaccctcgtaagtggaaggaactgatggatctcctctacggcaattgcacgcaaaagaccaaaatcatcgtcactaccaggattcctgcggcggctgctgctataagctctgcagtaatctaccacctgcacccgttctcggtggagcataccttggagatgctccaaacgatcaatggggagctgcctgagaagttgctcggcggtggcagtagcaacgctaccgtgtctactgctgcggctaaagaattgagtaagaggaaggtcgcagagaaatgcagcggtttgcccaccatcataaagttcttgagctcttctcttgaatctatctgtgcaaacgaggttgctgatccactaaaacagtttgatatgatgtgtgctggcaaccaaggactgctgcacatcgctgaggccagctataaccatcttccaccacatctgaagcggtgcttcctctactgctccttgttcccatatcatcacatctttgatactgacgagatgattagcctgatggttgctgaaggtttaacacagactacaagcagggaagcccaagtggatggtgatatcagcaggcttcagagtgaatgctttgatcttgtcaataatcctgggtctaatgggggaatcagaagaggatgcatgatgcatcgagtattgcacatccttgcacggcacaaagggcaagaactatataaagctattgtgggtgatcattctgctgctttgaaagaacattccaatatcagatatatgtctctcacagttgatcatacaactacggagctcccagggtcgctgactgcgcacacagatttgaggacgctgatcctactcagaacgcagaagatggtcttgtctggtcagaagtctgaaatcaaagagatcccttctgattactgccgctatctcacatacttgcgtgtattggacctgcaggcaaccaagatcaataagttgcctgagaaagtcgaaatgctctcaaatctgaggtatctgaacctttcccaaaccgatattgacaaactgcctgaatcaattggcagacttcagtacctggtatccctcaacatttctcaaacatgcattgcgacagttccagattatattggcaaaattcactctttgaggtacctcaatctttctcaaactgatattggaaaactgcctgattcaatttgttcgctccgactgttgcaaaccttgcagctatcacgctgtgaaaagcttaccaaactaccacaaaatataggatccgtgacaagtttacaaaggttagacctagaaggttgctactatctatccgagatgcctcaggatataagcaacttgaaaaatgtgaaggagctaaatgtactggaatgtccctcactggataaaatgccttgtgggctgagtgcactaaccaagattgaagcattgccaaggtacattgcaaccagtggtgacaacaatcccatattggagctgcgggatttggtaaaattgaaaagactgggtttggaaaacattgcaaatatttccaatgaggatgccgagaaaatacaactgcaaaagaaacatgagctcgagcatttgacacttaattgcaatatggatgctgaaaacagaaaatcaagttctgaagtgaaggagctactggactgtctagagcccaacccagggttgaaaatactggagatcatttcttatgcaggggaaacgttcccgtgctggatggccaacacaaatccacaacttaagaagctcactcagatcagaatcatcagattgattaatctgaagtgcagcagtctcccgccgcttgggcagctacatcaacttgagactctagagatcagtggaatgaatgccataaaaaatgtcagcagtgagctacacggtgaactgaatgctgatacattccgttctctaaagaagatcgtcttttctcatatggttaacctacaatgttggccggtggaaaatggtgctatatgtgaacatcttaaagagttgtcaattatccaatgcccaaaatttcacaagctgtcgatgaatcttaatattgaaaagctgactctattgatgagtcctcacgaattgcttggcagagaaggattggcaggtgttgctaggagtctaaaaagcctatctatttcactgtgtgaagagctatcagcatcatcaaattgtgagggtctaacgatgctttctaaccttgaggagttaaagatttctggatgtgatgaactggagaacttaccgccgggtatggaaaatcttactgcactcaaaagattgtcagttattggatgccagaagttccaaaatttaacggacttactggaatgcactgctctgagctccctggtcatatcagattgtccaatgctaccatccgtcccacagggtttgagagggatcacaacttgcgagtaaactaacagcggtatagttcaaaaacagatagaagaactctagcacaaatatatcaagtatgtgaatgaccaagcttttgcgtcattttttctcataatcctatccacatacagtttcaatttttagatttatttatagatgccaaaaatgtttctgatcggtatctccaatgtattttatataagtttcacggctatcaagatacactatccttgttactttgcctttattacttacatcgatgatacactagcaggtggattttcattaaattttattgaatagtcatctcgttctcttaagattttaaaagatagaaccattgtcacaccccaatccggcaccgccatacaacagcacctgatagaagcgtgtcgtagcaaaaacggcgcaaaccacttcctacaaaaccacgatatcggtactagtcccagaacatagcgctggtatctacggtgacaattatgaatcattacaatcttgaatttaaatagaggacttatttaccttaacttaggctgcagctctcaggggaacccgataatgcaacagacgacgcggaagcagcaacaacaggagcaaaggcagtggaaaccaatgaatgaatacccaataccacaggcaatagcttggaactaggacgaaaccctaatctttacttcacttcaacttcaccttcaaagttggtagaactatatatagagagagcaaggttacttacgtacacagcaagtcagggaaacttaggtggttattgcaagcttcaaggggaccgttatttttgcaatcgattttgttttccagttttcaacaatctaagtatgtgctttccacaaccagcgtgagacaagtctcagctcggtcgggagtgagaagtaaaccaatttatttgcaagatttgcacacctcccagagttggcctaagctggtttcccaaaccaaaccaattttccaatctttcagagtttggttgcctccaaacaaccagatacttccagggattccctgtcccaatgtctccctaacagccacttgctttttgaaacatcaggtttcccaaacggcaacaccatttcataaaacagggtaaagcaaaaactacgctaagaatcacctcacatccgcccattaccgtgggcaaagctgttcgaatagttcgttaatctctgcaaaggggtacactttacccacatgacattactaacctaggtcacctagcccgtgcagaataaccacgtctggtgactttaaggttttcacgacaagacatttccaaagccggcacagggtcaccatatgccaacgagaggggtctcagaccaacagcaggttaggtcccagaccatgctgtgccaggaagcctaggggttctccctgacaccaccccgacgaatccacttgtcccttggcatcaaggtttccctggcctagctagttactcagccaggggtgttccatttcacctatatggtcgcacttgttatatgctcggatgtaattccaaaggaatcaatccttcaaagcgaccgcacaagcatcccgcccaggaatggacttgtgtcgtgagttttatttttaaaactcattttctttcacaatgcaccgacccaggcttgggtttttccaatgtttttgtaaaccaagtttttagtcaaggcgtttctcagattttaagtttgagggcgaccgtcgatactcacacagagtgcacgaataccgaggcacaacacaggtggattcaaggaaacatgatatggcaattaacaagggagaatcaaatgcaacaagttaggtaggtccaccgattgcctcgcagatggggcaaatagctcaagtgcaatcctatcaatgcataaatattttgcaagcaatataattaagttcaaatataggctcaagatgtccaaggtggcttgccttgctcaaggtcttgagcttcacgaatcttcaagaaatccatgcttagaagtaaatccggtaactgcaactatacgcaaacaatcaaaacctaaacaagggacaaaaaaaaagatcatattaaaactaattactagtgccattaaatatgtcacaattttagagtattactggaagtggaacagagtcaaacggaattagggatcaacaaatataagttttggaaatttatctgattttctggacaaaggaaaaggacttgttgaatttttggtaacatgcagggccagcaaatgtggtgggaggagagagggacttcggtccacaggtggctggtgagggactggatatcgacttttgttgagcgggtcgagagataaagaatcggctcggcagctcacaaggctaggggtgtgagcaaggcggggaaactgttttaaacactccggtggacatacacctgtttattacatgttatctaaaaagttatgaaaagttttcaaaaattttgacataataggttaatatgtaatatatcacttcacaaacatgcaaattcaaattcaacttctacaagttgtaacaaaaataacaaatttgactgtgaatatacgtatgctagttagagtttaatttgttatttttgttacaatttgtagaagtcgaagttgaacttatatgtttgtgaagtgataatctatcttgtaaatttttttaaaaattatttgtaatcatttagttgacatgcaaaaaagggtggatgtccacccgagagattagaatccatcttcggtcttgggtcgcagtcagaacgatatcgcacacatggtctcggattcgcagtttctgggaaagcacaggaaccgttagcatccccgtgagcaaagagtttacgtacttgcacttcctctccttcctagttgttagggcatccacaatgtacttcaaaagtggtccataagcaatataatatttgattcagccacctagcaacattgtggaactagtccatagggaagaaataacaaaagctacccataagcatatgggctgcccatagagaataaaatatattatttgtctctatatcttctctcctactaatactatttactattcatatacattgtgaaggttacaatagttaaagttcatatatgtgggtcccatctttatagactacttttaccatatacattattgttgcccttattcctttttcatgtataatcgagataatatctatctatctattatattattaaaacaaccttaaaagagagcatcatgttcactgtgggggttaaaaattcccacattaatcaggaaaaaaaagaaaagaagagtccaaagagaaatacaatctaaaaatagctaaaatttaaaattaaaaataagcaatattgaaagaagagtccatataagaacacgatacgagattaatcaaaatttggaataaaaataaaaaaaatgattaatcaaaatttggaataaaaaaacaggggcaaaatcacaaaccctaattaaaaagcaggggtaaaatcacaattgaatcgtaaagaagggcagaaacacaattgccccaaaatgtttcaatagtttaaatcgggcgttgtttcaccttatataaaaacaatgtttcaacaaatagcaaaagaatgtttcatttcaccgcaacattaaatccatacatagcaaaacattgtgagtacactaggtgaaacattttgtggaacaaaaaatgaacgaattctcttaatagagggtttccaaaatatgtgggtgatttgttacaaaagaatgtttcaattcgctgcaacattagatctatacatagcgaaacattgtgagtacactaggtgaaacatttttgatggaacaaaaaatgaaacgaattcccttaatagagggtttccaaaatatgtgggtgatttgttgcaaaagaatgtttcaattcacttcaacattatatctatacatagtgaaacattgtgagtacactaggtgaaacatttttggtgaaataaaaaatgaaactaattcccttaacagaggtttccaaaatatgtgggtgattttttgcaaaagaatgtttcaattcactgcaacattagatctatacatagtgaaacattgtgagtacactaggtaaaatatttttcgtggaacaaaaaaaatgaaacgaatttcgttaatagagggtttccaaaatatgtgggtgatttgttgcaaaagaatgtttcaattcactgcaacattagatctatacaaagtgatacattgtgagtacactaggtgaaacattttttgtggaaaaaaaatgaaacgaattcccttaataaagggtttccaaaatatgtaggtgatttgttgcaatagagtatgtagtggagatacatggcaggagggaatagggacacctaataggcccacaggatcacgcgcgcgcgtgggggggggggggagcgcccgatcctgctccacccccaccggtcgcccgggtttaagcatttccacatattttcataagggatatacagttatatctattatctattatatactaaaagtccattaaacttcctacaaacgctctcaagtcgccacatggcactctaataaattagagaaaatcctagaaattctaagaaaaaagcaaaacatctaccccttaattttcacttaaattggtgggtccaatattatacaccgttagatgaaattgatcttaaaataaaccaaaccaaatactatgggccccacctctcctcctccctagatatatacgtacgtacattctttcatttctctgttttttttcagtttttcttctttttttcatttatataagtacgtacgcttcttctttcctttctcttttttttttcattttttcttcttttttccatttatataatagatatatatatttttaaataatcataattcatgcgtacgcttcttctttcaattctttttttcctttttttactttttccatttatataatagatatatatattttaaataattatattttacaaacaaaaaatctaccatcatacaactcaggggtaactaaattatctctacaatttttgaaaataaaatttacatcattatctgttactcattaaattaataataatgtaagataattttcatttaaattagtgtactcattactttgtactattatgtttaaataatacactattttaaaataaagtttacacagttatatgtgtacatatgtacgtgtacgtacgcttctttcgcttattttttttcttttttccatttatataatggatatatattttttaaataatcataattttacaaacagagaatctaccatcatacaactcataggtaactaaattagctctacaatttttgaaaataaaatttacaccattatatgttacccattaaattaataatgtaatataatttccatttaaaccggtgtactcattactttgtactattatttttaaataatgcactattttaaaataaagttcacacattatattgtatacatacgtacgtatgtgtacgtacgcttctttcgcttattttttccccttttttcttctttttttctatttatatatggatatatattttttaaataatcataattttacaaatatagaatctaccatcgtacaacttgcatgtaactaaattagctctacaattttaaaaagtaaaatttagaccattatatgttacccataaaattaataattaccacttaaaccggtgtactcattagttcccaatagactgatttagtcttaatagtattagtgttggaagagggtttactttgtgctattattttccaataatgcactatttaaaaataaagtttacataattatattgtgtacctatcaaataaacaatttgagatctatattaactaatttgtacgtgcatttaagccgatggactcattatttaaatcactggatttattttttattacattggactattattctccaataatgcattgtttcaaaataaagtctacactattatattatattatgtacccattaaattaacaatttaaaatctatattaactaatttacacttacactagaaccggtggacccattatttaaatcatcggatctattgttttcttataaataaagctttcgaagttctcttttttggcccgctacacaatgcacgtctgcacttttgccttttgtacgcgtgacaaagcgtcgtgtctaaggcatctaaggtgattaccaccgccgctacgctaccactttgccacatatcaagtcatatatggagttgattaattttattaataacatgtaaagtaaattaaaggtgtgatgccgtgagagaataattaagcaccgcgggttgaattttttccaacacttagctctgtttaacctgaaactaagagttgattatagaataattataatgtattgtgttatgtcatatttggattttgtactatttattcgtacaggtgaaagaaatcattatgttataaatgtgagcataatattaacgaatattaatagaacttttactaagacaagcgtgctataagagagtttaaccctcttttttttcccaattccatagtttgggttttcgtttgcacgcttttcaagtttctaaatagtgtcttttttaaacaacagtttatctttttagaagtcaattcattcatttgtaccctcaaatagctatcatataaataagctattctaaatcctaagtagtacatgtttttttttcatgtgagtcatggtgatcagtaaattggggatcaacagataatcaaagtcgtaagataaatatgtaagagctactatgaacaactgtaaataggtgtcaaaattaattgctattaattagacatctaatggcttgctagccacataattaatttctctctagatgtatataaacatggacgaagctgcaataaataataccatatgccccatgcatatatattatgtggttaatattctaattacatgtgttaagtcctttaaaatttcttaaaatgctctcaaactgctacgtggtgctctaataaattaaagcaactattaaaaattctaagaaaaaaaaaagcaaaatatctattatttaattttcacttaaatcggtatgtccaatattataaaccattagattaaattgatcctagaacaaactagatagtacgaggttccacctctcctcccggggcataggtacgcacctacgtacgtgggtacgtatgcttcctctcccttttttcatttttccctttcttttttttccatgcatgcgctttcctcccgttcttactatatcatgcgtcttcatgagatgatttaatcataagaattttaagtatcttgctctataaatggattgtataataattaacttgcaatagtttcttatttactcgagaaaaaaaaacatgattcaaaagtcataagtacttaatccatctcctactcaaaagtttgtgaatgatttttttaagatactttaagaaaaatagaacccttaaattattataaaataacattatccaaacattagtttgcccttaatttatgagacaaaattttcgaacaaacaataatcttatctttcaataatataatgcccgcgcatccgcgcgggccaccttcctagttgcagtaaaccaaacagccaggcaaatagttgtatccaccttaagccacaaagagttttatgtaacagaaaatggtgtagtgttggttgttagagtttatgatgacatcatattggtatctatgggtatcatttctaacacctaaaatatcatattaacatcagcatagtaccaacatgctagaatttgatacctatatgtatcttgtctggtaactgcagtactgcagtgttcttgaaggaacgatataggccgtgtttagttccacagacaattttttttaaaagtatacggacacacatatgaaatattaaatgtagactaagaacaaaacaaattacagattccgcctgtaaactgcgagatgaatctataagcctaattaatccgtcattagcaaatgtttactgtagcaccatattgtcaaatcatggcgtaattaggctcaaaagattcgtctcgcaatttacttgtaaactgtgcaattatttttttcgtccatatttaatgcggcatgcatgtatccaaatatttgatgcgacggaatttttggaagtttgaagggaaataaacacagctatagtgttccctagtcatcctcttatgtaacagtctcagatatcaacaatgagcttggctctggcgtggccagactccaccctgtattggtctcccacgccgaagtgcgccatgagcagccacaccacggtgagcagctcgcctccctggctgagctgcctcgcgtgggcattgccactgcactttccggccgaatagcacaacatctccacccacacggcggccatgagctgccatctcctctcctcagtgatgccctcaagctccatgagctgcttcgcgagcttgcacgcctggaagagcaccgacttgctcctgtcccccttcacgtcccgtggctctgcgatcgacgtgtccacgtccgtgagcctgttagcacatcccttctcgtccctggtctcgtcgtctcgccggaagaagttcttggcctccgcgcaggtgtcaccaaagcggatttgaccgatgctcgccgtcatcatgaacgggcgcatgaccagcaggaacagcatgtagttcgatatctccctgctcacggtcaccagattatccgggtctctttctcgtgccgtggtgccatgatcgtcgtcgttgttgccggcaggggccgagctggagacgcagaggcaccggagacacttggacgacgaggagcagctgatacagcatccgtcatcatccttctccgccggagcccgataatgtttgttgtagaagcagagttctgtggcgatgtgccagaggaggatgctctcgtcaaactcgcagtcgacgctccagcccagcttctggtagagacccttgcgctggagcgcccactggccacggtgctcgccgaccttccggtagctcttgggatccttgctgatgctgcttgccttgctctttagctgttcgaagatgtggctcttcagctgctccgaaacgccgatgctcgtggtgtacctccagctgtcccacatcgtcttcacgcggaagttccacctccactccagccactccatgggtttcttgtaccagcgggacctgtccttgacacaatagctgatcaggttgtactgcgacatcttgttcgaccatctaggccgcttctctggctggaacaggccgatcagccaaaacaccgccgctgccacggggcggagcgcttctgtcctgcgcatgtcggtgtaggtccaggaggacacgacgatcaggagaatcgcgtaggtctccaagaagatggctccgcccaggagcacgaaggagatgttgatgtcaacctgcttgtagtagcctcgcatatcacccaacgcgcgggtgaagagcacgagcgacacgaccggcgcggccagggtgaagaagcgtaggccgcggcctaggcgaccatgaatcacgagggccttggagtggaggcattcgtacatgagcaccagctcgatctccaccaccttgtacgcctgttccatctccagcctccggaagaaggagaggctgtcgatccggtcctggaagctaaggatgaggtcgacgaagaggcggcggaagatctgaaagaacctgtgcgcactgtacaccaggtcgccatattcctgctgcttgacttcgacatggtggtcgtcgtctggaggccgctcctgcacgatgacgatcttggccaccagcccggcgtccgtcctcgactggcactcctccacgaatttggcgtagtttggccccggatctggcggcgtgagcatggagctgcgcaggcagcccatgctcgccgccctgagcgctagcgtccgctcgccgtacttggtgatgccggcgacgaacatgattatcgccgggatcatcagccggacgccgggccgtgatttccagtagacgtatccggcgagagcgacctgcgacagcaggctcaggaagtgacgcagccagagctcgttgtcctccacggcgaaggcggtgatggtgtcctgccccccgagatgaaggatgaggaaaggggcccagaagacgaggaggtgcatctcgccatcgagtgagccgtcgcagagcttctggttctgggacaggttgcccatcgcgtagatggcgatgtagtcggcgaggaggtaggcaagccagagtggcatgcgcagccaccaagcggctttgcgcttgcgcaggccgccggtgaagaggaggaagacctgaagggataggctggacaggacaagaacgcggatctcccactcaccccacacctcccgtaaccgtctcaggttcatctccgtctccaaaattctccaatgctccctggtttcaatctccccggctagctgctagtgaagctcctcctgcatcatcgatcgaggataagcatttagcactgtgcttgcacaagaggaatgctttctttttttcatttgcaaaaacgaaccgttctctctcagtttggacatttgtttactatatggctatccatggacaatgatttttttataactaggtgccatagcatccatcatttacatacgacataaatagttatagaaaaaattgaaaaaaaattagtaacatcgtttgtacaactagagaaagaaaaataataaaatcagaaagtgaatagtacacgtatattgtagataaaatttgttattttttcttcatatatcgatcgaatttatacttgcatgtttgtatgatgtctcatattatcatggtttatcttatcaaattttatgatatttttatataactgtttaaattacatgtatacatatagatgtggcacctagatatagaaaatactttctgggccatccagttgaactattaaagtcaactaatcattacggacacagtatttgctctatcgtgagagcaacaaggaggtgtgatctcttgcaaactaaagcgcacatgccagatgccattgcccattgacccaaatatttaacgcaaagttgccacctattaattccaagctagttttctctctagactccgctggctctagacttcgctggtcaacttgcattatcagccaacggttggctcgttagtcgttatctggcttaggggtgtgttcatctacacatcgacccagtctaaaacggaaattagctgtttttacggtttgagttatgcgggtttgacggaagcaacttcgagtcggacacccaattggagagataaatatcgggcgtcattacggggtgtgtttagattaggggatatcacatgtataacttaattttaattttagagtgtcacatcggatatgatattatatagggtgtcggatatgatatagggtgccgcatgggttttttttgacactaataaaaaactaattacataatccgtcagtaaaccgcgagacgaatttattaagactaattaatccatcattagcaaatgtttacagcttactgtagcaccatattatcaaatcatggagcaattaggcttaaaagattcgtctcgcaaattagtcgcaatgtgttgaattagttattttttagcctatatttaatatttcatgtaggtgttcaaacgttcgatgtgatgagatgtaaaattttagggtaggatcaaaacaggccctatgtcgtccgatcaattctgtatgcacgatcgaagggactctgcatgctcgaaatgactttgagggactctgcatgttgatttcagtgacttagagggtgtttagatcccacacaaaaaatttacatcccgtcactgttaacgaccaaatttggtaaatcatagatcggattcgaagttacaatcaaagcggatttggagagactttgtttctcagaaacagagtacgcatcggctattgactgcatcggctgacactgaatcagacaaggagaagcggatgtagccgatccccggaagatggttctagaatcattgttgggatcggttgaggcgccgcacaagcattgccacgagtggaaagagtccaaagaagacaattgtatctaattaatattttagtagttttcttagagatattttcggtaagagtcctcctaagaggcttattcgtatttttaagttataatagagatagagtcgtgtccagcaatgacatattatgtatttcaggtataaatatggccggacaccttgtaaaaaaggagatcaataataatacttttggcgcatcaccacctttatctacacttattgttttcgatgagttcttactttcgagttgggctgcattgggttcgatctcagacgaaaaggtaaagcttgttatggcggtttgcattctcgggattagtgcctacatcttcatgacaatctaatcctgttcatgtaaatcgccaagttatcatatatgctatataatctagatcaatatcgttatctgaccccattggctagtctctatcatcaaagacagccgatagggttagataccaacattgaattagattatatagcatatctaccatctaaaaaaggcttttataagcttgtttagatcttgtgtttttcttcgtgcttaatgttgcatcagttaagtttgatctattaagtaacgtgtagaccataatatctaacttgttttataattgctagtagagatagcatcagagattcagccgatcttacctggtttagtcatcttgtttccttgtatacttacttgatatgctaaacctgccctttatattaagatatcgcttggtcagaatatattaagcttgttgttaatctattaggtcatcctgttattagattgattttggttcagtatatttcatcttcattgatatcttggtacagattagtatcggagtactagccaatacatattaggtttgcttcatcggctatgctatgaatctatataatctttactttaaagtatttttagacatacgtgatttatactgtctcggcgtgctgtccgatctatcccaatcactgggtttaagcataattcggattatatagttattgatatctatagctgatcgagtagatctatttattcttgcattacatgttctcactaccgatctgattcatatcgcatcgccctggtgttaaatgatacgtcatcggcagtctagccaatcgactattgtttatggatttaaccttgttcttttttatttcttgttggtagcaagatcaaaccaactggccgatgacgtatattcaaatttaaaatcccaataacaataaggagaggaggcagcggatggactatatagaggagtatagtggcaatatttgacgggacttctaaaaattataaaaacaaaactcaacgagacaataaactctacaaactaaaaggtctaatttttaaaggttccaaagagaattaatagaaacagtggtagatcgagcaagcaaataaaaagaggagtgataaataagtaagagatagtaactgcgtgacttttaaaaactataaaattagaaacacagggatgataaggtttggtatttcaaatacttaagacaatgagatagctatttatcaaattttaaataaaacatattaaaaaatagataattttatatgggtgctagccgcacaattgcgcgagccacccagctagttttaataagattaacattaagtacatccaaacatgcccatgttctattaacattaggaaacgtggtgcctcctagtatctactcgagcaccaaaaaaagcctcctctagataagtatcatcttcaagtaaggtgtttccaaggatggtatagtcatcttcactgatggtttcttcaacaagccgaatgatttctttgtgcttcttgacttgagtagtagaatatcctcctacaagaacaatgtacttcccttaaaagcatatcattgattgaaacaagtgaatagcagcaagttagaaagcttctaaatataaatttttttgtggcgtttcctgaaagagaaaaatactccatgatacaattgcgagattacactttaaagggaattttttttggaagataactattcacatatggcaacaagaagatgatggtatactaaaagtcaattaaacttcctaacgctcctaagccaccacatagcatccctacaaacactctcaggtcaccacattggcgctatagaaaatcaaaacatttagccattgattttcattaaatctagtggacccattattttccaccctcccaaaaatacgtacgtacttctttttctttttttctttcccaaactaataattcgattccatattatctatgcttttatgctttaatttataaaaatatatttgattagtattattaaaaattactcgcttgtacggtaaaataatgtcacattactaaattatggttttctttatttatatattattagaaaattaacgaacaaatatattattttgaaaccaacatcctctctcctacttagactacatttgatctagctcattggttgaccttatccattatccagggcacgttaaacgacgtaggtcgtcagcacaagattaattaaatattaaatattacaaacttgaaaatagatttatttttctaaaaaaacctttgataggaagtatttgcaaaacatgcacaatttagtagttcggaaggcatgatcacgataaacgagggagtagccaatccaataaacactttagaacttaatcttaaatttattacttttgtacttaaacacttaatatgtagtatataatatactttgtcaatccaaaacagcctaatgtatcgatcgtatgttcctactaatcctaatgtatatagattctatatacaaaccactatccaccaatcgccaagtcatattgtttacaaggtatccgtgcatagtgcacctaatatttagctgacatgcaatggacatgtgtgtgatcaagtacagaaaataaaggaagatagtaagtgggcaaccatcaagaaatgatagataagtagaggatgccatcaaggcacaacaaacaatagttgagtacaaatagattgtgattatgagtaatagtgtttctacactcctacaaaaactccttatatgccacgtgatgctctaataaattagagaaaatctaagaaaaactataagacaaaaaagcaaaat

SEQ ID NO: 9901 - DNA, 39171 bp, Oryza sativa
ctatgcagggtgctggcttctcatgtactgtgaccgtagcgaagttgagcccatctcagtcatggtggttttcatcctgttcccgttgtcatagagccgcaactgcatatggatctagctataaatgctccagcggttgctcatcagttactgccattccaaagtaatgttctacagcatacatgttcagctccttttttatatgtctgcttggcctctatgacagaaatttcatttttatatgttaggtaccgtctttgcctgataggaaccgatggaactaattcagcagagtttgtgctatttggacgtgttgcgcagcaagttgttggccgtcctgttatgaatcttatcaaatttcagggcagatcagacaatattcctaaagaaattgctgctgttgtttcacagaaatttacctttgctgtctctgtcactgagcggagccttatgcacaggaatatatcttttcaagttaatggaatcgagactttctttggaagacagggttctattccgcagcctagggaatagggtccatctgcaggcccttctactcctttggctcttgctgcttctggtatggataaggatgacgcctctcaatctcatgagtcaaccccggtcgattcatctacttcgactgctgatccagtcgatgaacttcctggtgacagcaagaagcggaaatccattgtccgtcatgtacgcccttccattcatatcccatacattaccttttgctttttttatggcccttctttttatatgtctgattgctattccagcctctagcagcacagaaaaaattgacctttgaaacagctccatccagcaaagaaaacaccagcccggttgaccctcctactaggtacaagtgtttttccacacttcttgttcttcttatatgttgaaactttctctatgttacatctgctttctaatttttatggccaacagtaaatgtggtttgcctctgctacatagcagagcacggtcagtccctccacttcaatcagatataagcatccaacccattctatttagtgagaaaccatgcattatgaacatattaatgtaggttccttgttaatctatattcctaatcatcctacctaggcctaatagacctaaataagtctttgctatttctcttgcttccatatgccattccgtacctctggtctactctgtactttgttccgccgtataaattgcctgtatgctaaatagaaccactttacattactatgacatggcctgctagctaatcaaaagaaacatgctcatagacaactacagaacattatttactacaggcagattagttgcttatttattatcttttatatgggatgtaatgcgctccaaaatgatctgcatatggcctaccatgttttgctaccactgaccattgcacgcagcctaccagttatatcttttgctttgcataggcatatcatgtaatattactaaccatgatggctatctgctatattgctcagttcttctcgcactgatgaccaagctgctgataagcaacatgttgtgcctcatgaggttgatgtttcttagattgcagctgcctctgctaaaccaaatactcaggttaagcataaatacaccactttccagctaatttagtggtcgaatttttttagtgacactggcaacctaattattcccgttctataggtcaaagatatcctaccaactgaagccaaaaagaaaaggtataaaactacatattcaagctgagaacgaataagaaaatccctatttttgtactagcggtggaagcatgtcacattcattgttaaatagactgcaccatttcgctttcgctgctctcccgtttttggttcttctagattaaccaggtgttcctctttgctttagtgttgatccaggctctacaggcacacgcaagactaagcctcctgtaccgaaagggaactaaatgctcaccttagcttttgtgctgatgtgagtatcctgttctgttatatatctatgggcatggcattagtttcacctagattgctgatcactttaaattatttttcaggggaacaataccctacatcagcgatcccaccctatgtctacatatttccttaatcttactgttggcgatgcagcttgacatggcacatcgtatcagacaatcttttgtttacatgattgctggcaccactgtgtccatgcatgtgcatgtttggtcctctacctgctgctctttcgccctttagtgtcagtgtgctttccataccgtagcagagacttcctatgaaacgctgccatacgactgcacatcaccccatcttttgcttgtatgttatttattgtaaccatgactgtcaatgtccatatggtgctctgtcagtcctatgaactcgttcagcaaacccccttctgttatggatcatattaatgcactagcgttctatctgctgttgttctgttcatattacatgccttgcagctgctttggatatatctagcacttgtgatacactatcgtcattaaaagcttatgtttcatgtgctatgtgcctgtgcaggaatttgaaatttgtagcatttccatcctacccagctaatgtgataagtaggattttgtgccatcctttctgtcctaaagaaagggtgggcaaaatttgcagccaaaaatagcatacgcgttggatcgatctgcattttccacttctacagggcaagccagatgcaaatgacatgcaaatgaccatcgatgttctgtagaccacacgtgaatagtcaatgtattcaggaccacttaccagctctactgccactgctatgttaattagtgttgcaccttaagattattatcataggtactgcagcaccttacaaatatcagacatatgtatgttgttagcgctgcaatctacttatctattgccgtctgctttcattacttttcccccaccaacactttttaaccgttcttccctggctatcagcttattgggcggcacacgtgcgtacaggcggcacgccaagggtgcgccccaacctctagtagtgttaataggtgatttaccacacaactggtcaaactgtgcatttagagctagcaaatacttcttgtactcatttcctatttattgcttctccaaaattattttctagatcactacagaactgaatctcaacaagaaaaaacacaagttaccaaaacctaaatttgatgtatacatccaccatgatctgaatccatacttacatccaccatgcatgaccctacaaatgaacacaaattgaccatgcatgaccctgtgggatgaaaatataccctgcaaatttcccagtgaaagaaatgcgtctgtctaggaaaggtcaggaaaaaaacagaataaatattgctactggcatttgaattttaaatccatgcacacaataaaggaattttttttgaccgaacgaggcattcaacaggcacccaaatgaaccggtacgtcctatcgctaaacataaaccaaattaaccttatcctatcctatccaacagccacccaaagttctgtataatcccaacagcattcacatagtctcctctatcatcaatatcagtttgaagaaaacaggaaacatgtgtagactaatggcattttttttttcgctgggccggagactaatggcattttcatttggctgggcaacgaaaatcctaaatgatagagcagaactggacagtgaagcacgacttggtcatcaaacatcagtttcttatggccgcaaggtctcaactaatttgcaagctcaacaaacaaaagaatcaatatcctctcagtttatttttttgacatgtacttccacaattccatattacgctatctagcttgacaaaagattaggcctgcaatctaaatcagagaaacatattaagataataactttctttgccacactgcccacacattcgcataataatttattttctcacaggtttatgcacgtacacacataatagccatgacactgtaataatgaaggaacgggatcgagcgacgattaccttgttcgcgtcacggtggagagggctaaggtggcggcgcaacggagagcagatggcacgagggagtcgacggcggcgtcgcagtatagaagggggtgcgtgggtgagcagtcccggtggcggcgcgaggggccggggatcgacggcccgtgacaacgatctacattgtgtgggggcattggtggcgtaaatctggaggcgggaatcgacgacgatcctcgtgagggacgctggcggtgtcatctggaggcgggaatcgacgcgctggttggggcgtcggcgacatcgatctggaggcgggattcgacgatgatcggagtgagggtcgaggtggagagacgggaatcgacagcgacgcgagggggcgccggtggcgtcgatgtgaaggcgtgatggggcatcgatggcgtcaatctgaaggcgggagtcgacggcggctcgatggcagagcgtgggcggcgtcgcacgcgatggcggggcgtcggaatcaacggcagcatgggagagaggaggaggtggtggcgacgattagggttcgccagggggagtgcggcggcgcttgtggtggcagaggggaggcgacggagcgctgtaggttgggagacggttgggggaaggagagcgcgttggggattttcggttgaggtgggaggaggagcgatagcggcgtgattttcgtgcgcgcggaggttgagggggtacgtggaacaatatgtggcattggattggatgattctggaccatcagatttgatgaatgagtaatgtaggtgtaagagtgagttggtgaattatagggtagatcgtgaaacggaattgctataaagatggcgacagatttttcactaatctcagtcggttttcatgtccattggattcgttcgcatgcaaacgctgcggcaaccgtatccacccgatcttccggttggttttatatacggaattgctatatcttaatcgacagttttcttgcaacgaatatgtcacttttcatattttatacaaatttacacggtagttacacaccacttagatatgtaattagtatgtaattttgggatttacatacgtaattttagaacttacatatgtaattttgagacttacattgtaaatacactaaaattacatatgtaatttaaggacttacaatgtaaaaacataccgactattttttagtgaaaaatatggcgctataaatatagctactcccacggtgaaatggccggtcaagggtaactaacaaacctgttggaactttggaacctcggccgcatctaaaaaccaaaggatcgccactttgcttggggaagtgaaagaaaaaaaagatgccttttgtagcctgaacatggttgcaacctgaagattttttttttgttttcttctctttacttgtgatcgagatagaaattacgcatcacgaggaggaggaggaaatacatcacgagaaaaacaatcaaacggcatgctaaacaggacacgagatcagtctcgatcgaagaaccaccaccccaaccctttttctgcacctagcccaggagtacaccgccgccgctgttggaacacgtaccaacacatgcgtgagccgtgaggtcgtagcctaagcaccgtacttgtagctggcgatgtcctccgtgatcatctccaggtccctggccgccacggccatcgacattgcccgccggtgccgccccgcctgcatcctcgccggctgctgctccgacgacgcgtccgccgccgccgcgggcttccgctgctcggcgccgccgccgccgatgacgtccgccgccacgtcctcgaggctggcgaagttctccggcagcacgaacacgctctgcgacgccctcctctggtgcctcccggctctctgcgacatcttgaagcttagcaacacacggcagcagcaacaacgaagaagctcttaagctgcgcgacttggttcgctcggcgccttagcaaattggaagaagaagaagccgttatatataggctaacgcatgcacggacactacatttattttattattccattgattatgctcattactactgctgatctactggtacaattgtaacttgtaaatgaattttgtgtcagttcctggctcccccaagtgcattgacttgtacgcattgcatccatgtgaagacgtactctctcccttggattgattaggataatttggcgattaaacaaggcgacctgattgctgaaatgtcacggcgctcttgctgatttggtgctcgatcgtctggcaccttgctaagctaggatctatactcctacttggctagcgcgtatgccgtgtgatgtgatcgattctgcctgatcaggcctctaaactgaagccaacttggcacgtactgttaactgtggtagttgacctggttggtgagtgcagtgtttttatccatttctgtgcgtgtacgatgtcgctatgaagcttcctcgagagtaaaaatatggtattcgtgaggcgtatgtacaggaatctcaggaccgagctcgccatttttattggggtagtgctccgctcatgaatcattctgacattatcagcagagaaccacgtgcaaaccgaagagagaatccaccagcagaatcaatcacataatactactaaccagatcaatcgcaaaaaaactgaaacatgcaagtacggatgccctgactaatcatgaagtttttctaataacacttgcaagaaatttcctcgtaatcctttgtccctgcacaatactatggctctagttgtgtacagatagtgctgttactacccacaaacaattgctaagaaattagtatcagttagctgtttcaataatttttccgatggttcgtgcttatcgcaatggaatcttttcgttttccttttaaggagcacaccactctgtttatgtaggtgctacaacctgatcaagctggatgtgttcatgcgtgcggaaagaaaaaaagaaaaggaaagggaagttgttaactgtcaaagaaagcaccatgcatgttagaagattccaaattcctagctcaaatccagcctcacatgggcggtacacgtgggttgatcccccacgcatgtaatgcaaatattattggggcccggggcgttcgctcgtgtgcatctccaacaaatttgctgcaagtcgccaaacttatgagacagggaaatgtgcaaggcagcagcacagggcgtgtatatgctcttctcattccaccaattaaaaggattgatttgtaatgcgggtctgggaagtgggaactgaattgttcataggatacgttgtttggtttgagtacgtcgatgatcaaaactgtggtttggcaggctgatctagtgctgtaaactggtgttcagtttggtattgataaggagttcctcttctgccaagactggaggaagcgttcgatgcttgagctgaaaagggaatatattgtcagttcagttccttgtgcagattgggaactgcagccatgccggctagttgcctccttcctcattctgcgacgtgctcaacgccgtgggcagagtaggtatcgtggttcgtggacgccgttgggctcaacgccgccgccgtagaatgtcgcgttgtggcggtcgcggaagtaggcgtacggccgtgcatcgtgtacggtcctggtctttgctgtctccgacaccttgatctagtacatactgaactctcattccggctcccggccggcggccggtggtggaactgtcaaccgcgtcgcccactcccgcacgccggcggcgtcgacgtgggatttctttctcctcgagcggtcgtgactcttcaatgagcatctccctcgtccgatctgaacggagagcgcccacgacacgccatcctctgggttgaggccacatgtgcgatcgatctgcgagtccgttactccacccgtttcatccttttaatgagttgttatgattttttttctaattaaacttcttttatgtttaatcaaatttatagaagaaattaacaatattttttgacacaaagcaagcatattatcaaaacatgtcagatgtaagttttagcaaaattaatttcatgctgtagatattattttttttataaatttagttaaattttaaaatgtttaactaagaaaaaaaatcaaaacgagtcaaaatatgaaacagaaggagtactacaaagtggtcggcaacggaaagaccgcgtttgcattagtgcaatttatttatcctcggtggaaccaaacgtaaaatcgaaccgatatgaaaatggtaccggtctcaaaaacactaacggagccatcattttgcttattcgcaaaataagcgaaacggtatatttgcaaacgaaaagtaacttgtaaatacaaattatatatatatatatatatatatatatatatatatatatatatatatatatatatatatatatatatatatatatatatatatatatatatatatacttagcgatctacaaataagtgcggaaaaataaattcgataaaaaaaacctcacaatcaacttcaaatttaaagttaaaaatttaaattttgactgataagcataagcataagtgaaaagattaggccctgaaaaaaggaccggaatgaagatgttagaattttttttattttaaaatttttattttttaatatttacagaaatattatatcatccaaaatatttacaggaatggccactgccgtccaagtggagggcggcaaggtgtgcgcattttgtactaaggtcccttgccaccctctgcaagggctgcaagggggcaaatgcaaatttcgccttgccaaaaatgtatttttctaattttttttatcaggcctacttctgtaaatattttcgccggtacaatatttctgtaaatatttaaaaaataaaaatttaaaaatgaaaaaaaatcgaaaatgttatatacccgtaccataatagcgaaccaaaatagcactcctaaacagggaccggattgcaggagcccattgaatgggccgtacaacatatagtgatttatcagtgggccgttgcccaagcccaactaggcaccgcagatccgacggccactaacgcgcatcatctcaccatccccagcatccacaggggccgtcggggggtcggccgccccggacggcgccgccgcccaccgccgatcgccgttggtagtggtatggtgtggcagcagcggcggagattggcctcgtcctcgcacgccggagtcgccgagttcatcctgccgcggcccgcgggccctcgctcgggtgctcgggtcgggggaatcctctaaaccgtacggcgtcgtgtccgcgagggccgccgtaccagatgctgctcaagtagcccggcgtgcatctcgttagagatctatacgaaggggaggacatgaacagcttccagcagaggctcgcggggaggttcagagatccgaccacaccacattggtcatccctaagaaagcgtggaggcgtcgagctactagattttctgataatggcaattttattaggttcttaatttctccgtgtttcgagttcatacatggaaatgcaaaccatttttttgatgcattgatagggaacaagaagtcgatataatgtcgtcatgctaactcctggaatcaaaaccaaatggtgaaatggagaatcatagtcgtttccatgttcatagtagcatattgtcataactcataaattctgacaagtatttgtgtaggtctatatgttttatgcttcagagctgtggcatgctcattgacttatggatctatggataactattttaggtcagcacctagctgatgcttccagactgtgccgaagaaggtaattcctgtaattgattggcaaattatcaagacatcactgataatgcatccagacaaaatgaaaatcatgaagcatgtcattgaaagaaacattgtggatcatgatcgtagccattttccaattgctgttcaaattaaaggtttcaattaaacttttttttttgaaagatccagcaagagcgctggcattatattataagcaggagaaaaataaatacaaagtttatgtacatagacaaatggccacctcgacgggtgccaataggaaggtctaaattaaactcggatgatagttaagtaggatactaggattgaacctctcctaacatgtcaatgaaagaaacatgaacccaaaaccaattcatgcattctaatttcgaaataacacgtaagcaaatgaggatcaagcttaaaatatatggatacaactttggcagacaatatccatttgctaaggggctgtttggtttccagggacttattccaaatccctgtcacatcggatgtttggacactaatttagagtattaaacatacactaattacaaaacccatttcataacattggactaatttgcgagacgaatcttttgagtctaattacgccataattttgacaatgtgatgctacagtaaacttttgataattatgaattaattaggcttaaaaaattagtctcgcggattagctctcatttatgaaattagtttttttattagtctatgtttaatactctaaattagcgtccaaacatccgatgtgacatggactaaaaaattttagccccatctaaacaccccctaagttgttctggaatctgcacctttgaattaggagcgttgctaaactatatgtgctgttccatggcagcactgctggagttattgataccattttgtttcagtgacccaataacacacttttgtgtttcatatcaccaaactgcagtttctgcagaccctaggacattatttgggggacaaagtagcactgtaactaggatcatgaagtcaattttgtgtttatcatcaatctattgaattcgttcaaaaaaaatataatcaatctattgaaactttgtaactgtatgtaagataacctttctactaatatgatgcattaaatatcttagtataaaacctagctaatttaacatattgtgcaagtatagtattattatatcctctgcaagtatatcctctactgcctggggctttgctttgcatttcccagataacagtaatcaaacactcacttgagctttccaactaaagaaatcaagaaaagatgccatgacaaatactagttcaccacaaaagatacagtagtctccacaacaagagcactagttctgattattactattgtaatagaacaactgatacatgatgatgaattctatcaagagagctccggggatatagacactccattaccatcttcttgtcgagatggagaaggaagacctgccaaagttgtttagttgccctacatggcctagcacctgcctagtggataccttcgctgcatcggccgttgaggcatcatcttcaacaccaccggcgaagctgagaagtagtgagaacactgcatgggttgcatgcagggcagcggtgtcaggccattgttgggggtagagaggaatccagaagaagggtcctccatggaagatgctgtgcttggtttcatttatagagagtacacgaggtttctttcacaaagtggaagcttaggtggtggagtgccttttcgcagaccgaaatgaggtatcttccttagcatattccttagcatgtggaaacttctttttctgttctatgcttttgatttgctttggagtttttcaaagtatattccatgcttttgtgtgctttttggggcctataggtttatgaacaataatttagatgatgaatacactctagatgtattggagtaccttgacgaagcatgggctggaaagttggttttggtggtgatcacccggagcagatcttgcgtcatggacctacttagcaggtgcagtttggctggtcttgcattgtgcctgtcagattagtgctgtacttgatgcattgttgtcgtttatacatgaaaccaaatgaaatacaagaaccatatgtagattgcagaacaaattattttccttctaaagagggtgagatcttagtagaactttattgcttgtggtgccctgctgtttgacaatgtaattggtgcgagacactggcatatgatctggcctgagccttgtgtatgatgttatcagactggactaggccaggtgggccttatgcctgctttggtcttcatgccaataaacagagggagggcccaaaataagtcctttaacaggacactgatgttcatgttccaatgtatacttacggagttgtggacttgtggttataacttataagttgcaagggacagatattgcccaatacatttcatgagaaaaatctcgctatgcttttgcatctttgcacgctcatttggtgcatacggaggattggcctaaggctgtaaaataacaacaataataataaagctcaaggcttgcgagttgctcgagctcttaacgaaccgagctcgagcccaaccccaagctcgcaaaatttgttgagctgagctgaaagcatctaatgagtctggttatatgggctggtacattctaaattgtttttttactacgaaattatcatcaaatatatgttatcacgtacttaagccaagcccgcctgaaagcataaaggggaataagcttggctcaacctctagcataaggcagccttacgctctggcttgcttgagctcggctcgttgacagccctaaattaaggcgtgtgaacctctgtcaactaatggcaggcacatggtggtggttcttaaaaaaaaatcttcgtttcaaaaattcacattgaagttactaggttggtcacaatcaatttgatgcaaagcggatcaattactaaattaattgataataaggctaatttccccatctaactcagatactatattacgttgcaggcaccgctaattaacccaaaattaaaaagagtaaatttcacaaaactaaatatactttgactaaacgatcacaaaactatggatttaagacattactagtaatcgtgcacgtgcaatgcacatattaacaaatattatatgaatatgaaccattttgataagcatatcacattcaaacgattggcaatagaccaaggctacataaacccaagaaacatgtttttttttctttaagacattgtagttctgcttttatttttatatagcaaggacatattactatataaaaaagagaagaataaacgttgttccgcttgtcatagcatgttgactgtagcatccaggtgaatcctttggcgtggcagcataaagatttattttagttgtttattttggcaacttaaaatttacataaaacttaatctgagacgcatcccatctaaagaaaaccaagagataaatctttgagactatagaattgattcattcactatatgtaaatcaatctctcttgcagtgtttgtggcaaaagatgagcgatgcaatcttgatcgtttgacatagtttattctctttccatcgtttgtacacgcttgttttttggtctcctacacatcaaaagaagaaaacacaaaagaggtagcaaatgacaatacatgctttactgaagattactggccacagaatggtatattaatggtacttattgcagttttaagccaggcctatccaatggaggaatgggcatccagtaaaaataaactcaatggagcagaccatgaacatgattacatgaatggagtcagaggtggagacaccatcttttgcatccccttcactgtgtagaacttgttatcagtaatcagttttagctaaaaggaagtcagctagatcaaaatccaagcaattgaaatatatccaatctgatgcagagaagtggagaaccaacctcgtgcaatcgctgagcactgctacacacctatgaattcctacttcaataggaaagaccataaacatagtagagctacctgttttccttcaattcaagaatttttggtttcattaatcgaaacaaaaagaagaaccgaaaaaattgcaaggagaggaactaaagattttctttagtacaagagccttcatcctcgggatgttgctttcaaaataaaagatatagagcagtgcaaagaaatatttttcacaggttaaatcgcaaaccaaatttcagtacagccgaaaaaaaatagatactccaatcatgcacagacatgaaaaaaaacatatttcaacaattagagcccatttcaaaagaagcggtttcagttctcacaaatatgacatgcaatttgttaatcttaatactggtgggctgaccatatcaaggctaacatggaaataaagcacatcagttgaacttcagattcggtagtggtagaaaattggcatatttagccattttattatagtagtagttttttgagcaggaagaaactttcacttcatatagcaatatattagtaactccacttcatgtagccagaaagtaacagaggagcttgatgaaatacatgtgcaacgctgattagaaatagcaggatgatgcttgatgataactcatccagataatgcaatgctatatgcagtggctgtttaatattccactccatgattcacatgacttttttgtcaataaaagaagacaggtaaatataataaggtaatactgggaagggtatatcatcttactttacatttgatagaacggacttagagagttcttaatggcccatctgtcacatctcgttatctgtggacttccaaatcagttgcagttgaacaatatgaagaaatgaagtatttgcctgcaccatatgaagtattcgagaccaaagaacaattcagctttagtttacacaagcagagctttaaatcacaacatatagtgcaaaatagagtaaatatgagataataataaggattcaaagagtaacatgagtgcacctcgaccatgcatttcatcaaacagttggtgtgctgcccatgggcacaacaaggaaccaccatgatagctgatctggaagacatcctcatcgtaatggaaggataccatccgcaacatgcagtcgctacagccgctgaaggcctaggtgcaaacatgaggctttcctgcgtggcttcagcgatggtgacatggaattctacatatctatcgaacccaacttttaaaacaatctatgcacttgtgtaatcacttgaacaccatgtggattagtttaatgataacaaaatgaaacacgatatataatcttatgattatacctagctgttaagtttgtattcttattggtccctgaaagataaattttcagctcctgcacttgaatcttgcatcatttatataggtaaaacaaattgacagctgcatttataatttcatttaggatttatcatgtaaattcagggtgaaagtgaaacaatacctcagaggtactgtcattgtgtgcaaggatcaaaaacaaaaatggccaactgataaaattatgaaatttgggatctggggcaatgacttttgttgttgattaagtacccaggatatcaatgatttacatatagattgatcttttcattttgtataatttccaaagcataatcaaacattttatcaaatttttaatttttgatatctattggaattgcattctaacatgtatcaatcaagcaaatttgccacaagtcaaaatcaatggtgcaataaacataccatttgagcgcacagctatttctcttatgcgccgaaccagtctagttatagagaaaacactttcgtctcaagatttccttccagataaagaatagaactgaaatgttgcaatggtacaatttacttgtgtttggggagtcaatcaaccaaagaattttaaaaaggaactgcacaaagctaaaaccttaaaacattattgccatgtcacttatatacaaattgacaactgcgaaagatagaccaatatatttagcttctaactacaagggtaatacagtagaacagtgatataatcacaaatgagaggtagagtaaattcaagtcgatagattgacacaagagaaaaaggcatctgccaatccccactcatgtagagctaaaggaatataccaaactctaccccaaggaaaccagtaacaagcatatcaagtataattataacagacgctttactcaccaacaaatcaattgcaacagagctatgaagttgaaccattgtaactaagaatctaatccaacatacaaagtctgaggttgtcacgctcaaacatcaggaaatgaccctttactacgtttacgcgatagctcgtctgcagaggcaacagagggctcaccaagtcttgacgtgcttgagcgcgaggctgccggcctgccgagccggtccgggtagatgcagacgcggtgccactgcacggagcagcgttcagcgtactggtgcggctcctcgcagtccagcgggcggcggttgttgcggatgccgccggtgccgactgccgagcgagaacagtacgaccgttctccctctccgcagccgcttctgtatcggctcctgccccaccttccccaccattatcgcctttgcgattcccacccacccaccctcccacacacacaaaaaaaaaaaaaaaatccccaatcaggctatcagctcctacctccgcggttggagtcatccctcctcgggcgtgtagatgtagataacgaagaaggcaaggacacgatggagaggaggatgatagggatggaagttgtccggtggcgtggaggtgggcagcgggcgttcgactccggggcgtcgagggtgaagacaactaaacatggcgcacgacagggatgcgcacgatgaagacgggggatgagtgcggcggcgacggcggatggggaagatctcggctccgtggggggttggggaagacctcgcctccggttcagtgcgcggtggcggcggcagcagaaggggacgacctcgtgggcagcggtggactgcggcgacgacggcggatggggaagaccttgtctccggcggcggcggatggggacgacgtcggctccggccgcagcggatggggaagctccggcggtggctggggaagacctcgcctccggttcagtgcgcggaagcggcggcggtagagtgcgcagtggcggcggaaggggacgacgatgcgaggagcgagccgcgcattgagagggtgatgaggcgtaatcttcgcccggccttcgcgcctggagagtgggaatcgtgcggtggagaaggctggacggtacagattacatctgatttacgaatggacggtagggatgtaaacatttgatttggcatgtaggattagagggggcaactcatttttatattagtatagatatcacaaaattacatattaaggttaaggatcacaaaactacaaatttaatattgaagttatcgcaaaatacatattctaggatttaaatacctattactaacgttatattggatctataaatgttgtagatctgggatatgtactaaacctgtcatttttgtaatttttttcctaattaatttttatttttatgatacttcatcctaaatatgtagttttatgagaaattttgcgctaaatatataattttgtgatacaagaccttaatatatgtagtttttgtgatagtttggtaaaagtatgtgtagttttgtgaaatttacttaattaaaaatggcgactaagaacgaacaattcactcacactttaccattctaatttctaactataaaattaatttattttagtttacttggaattgagttattgtacaaattgattgctcatttctactttcagtttcgaatttcgttatttttttaaatagagatgagtttttatacaaatataatttttgatatgctttcaattttatttggaatatcagttatcacatattttaaacttacttggacaattctttttattgtggattaattaaccgtgaaagtttgatcccacaaaagttgatgaatgatgaatgagcatatataccctttttctgtctagaaaaatatcggattagtgtgttgaatttcaaaggagtgaaagggtttgatagctcgatattagcagtacgtagaaatatcaatgattaaaaaaataatttaggggtagatctttatatatgtagccaacgctgaaaaatatatgagtatgacaagaaccccaaaatcaacttctaaattaaattttaaaatttaaattttggttgtatagctaataagtcaagaaacaaatggtataaattgacagatactctctctacccctaaaaaatcaatagtaccatatgcgacacattgtcacaatatgtctagttaaacatgcatgttatgatctcacaaaggtaatcgcctctaaaagtaataaaacaatgttcgatctacaactcacgggcaactcaattacacattgtcagagttgaatcgaggttgtcgtgttacaactgacgtcagaaatatgcaacggaggaatgacaagaaaaaaccataccactaactttcatgaatttattgttatttacaacaaaaatacaagagttcatctctgagttcattctcaactaccctggcatattataaaaccccccaaaattacatcaattctacgaaatgttaaaaagtaaataaagaaaggtaaagatcaaaaggaaaaatcagcggtgtatattttatcaagaaacaaaggaataatcggcaacagctatcatgcaataatatgtgcagtttgaacggctcaaaggaaacaatccaacatggcgagcgccttgtgtacgccctgcccgccggcgccgagacccaccacgttccggcactttgcgcggttctccgacggcgtcaggttcaagtccaggcagacaccgccgccgtcgcaggccttcacggccgccgccttgcctacgtcgccgttcttcgtcgtcgtcgtcgtcgttgtcgccgccgcctcggcctccgcgcggtgccgacgcatgtgcccgccgagcgcctgcccgatggggaactcgagcccgcagacggggcactcgtgcaccctcggcttcgccggctgcggccgcggcggcgtcggctgcctcccgaggcatagccccgcgtcgtcggcgccggcgccgccgccgagcgcgtgctgctgctgctgcctcggccgcttgtggctggcgcggtggcccccgagcgcctggaacgtcgggaactgccggttgcacgtcttgcactcgaacacgcggtcgtgcgcgccgccgcgcaccaccaccggctgcgcgccggcggcgaagccgccgccgcccagcaggccgtgctggctctgctgcgcgaggagcatcagcacgcgggccgtgtccacgctgccgacgaactcctgcatgtcccacatgctcctgctcctcttgctcatggctatagctagcttaattagccacgtaattaattaacccagctgatcactaacgtcgccgatcgaaatctgtatatccgctgcactgtgcaacaatacttgcacatatgctgcgcgtatgactatatatatagagagagttagaaagaccaaatggcagcaaagctgaaacttgtggtttggtgcacacgtaggaaatggatcgagctagcacgacgaacaacggcccggcttgcttctagatgtggatgtgtgtgtacttttctaaccatttgaccacgagagagcatgatcagattaattagttcctcccgtagtagtagtacatgggacgaacaccttgttttagtacaagtagctagctagctttagtcaacatgtgtgtgcactgcatatctgtggtggtgacgggctatgtcttgttgtcttctagagtggctgcagcagcagcgccaagttgcctccaaccactcggatggatagcgagagagcgagctcgcggcgccggaggcggttgcgagtgacgtgcgcggcgcgcggccggggtggcgttctggctcgggcaattcgccatgttttcttgcctcagcgcgcgacgtcgcgtgcgggcgtggcctgctcgccggccggtcgttcaatcccaagcctgcacactgaagctgcagagcacgggtttcacacacgtacctcaagctgctgacgacgacgcatatactacatgctacggccgttccattcattggaccggctggcagaatctattatattattaaatgaataggaaaaggagtctacacattcgttctcatggtctagaaattcttacattaatcgaagaaaaagaaaatgcagagtctatatagaaatacaatttagatatagctgaaattcgaaattaaaaaataagaaatattagaatagaagactagagtccatatagaaatacaatttagaaatagttaaaattcagaattaaaaaataagaaatattagaagaggagactagagtccatatagaaatacaatttagaaatagttaaaattcggaattaaaaaataaggaatattagaagaggatattagagtccatatagaaatacaattaggaaataactgaaattcggaattaaaaataaggaatattagaagtagagtatagagtccatatagaaatacaattagaaaataatagaaattcagaattaaaaataaggaatattagaagtagagtatagagtccatatagaaatacaattaagaaaaaaatagaaattcggaattaaaaaaataaggaatattagaagtagagtatagagtccatataggaatttaaaactaactaaaattcggaataaacataataaaattaaaggtagagttttgagtctgtataaaaatataatttacaaataactaaaattcgaaattaagaaaaacacgggaagaagagtttaaagtcaacataggaatacaatttagaagtaactgaaattcgaaattaaaaattaaagaatattgaaagatgagtttagagtccacataaaaatacaatttgaaataataaaaattcagaaataaaaataaataatattggaagaagagcctagagtctatatagaaatacaatttacagaaaattcggaatataatttacaaataactaaaatttgatattaaaaataattaataactaacacgtatataaaatacaatatgaatattacacatttgtagtttcgtaaagttattgcaaaatttaaaattatgatgttattttaatatatttgaataatataatgagaaagcatatatgctattatatgagagaaaatataatgatgctagccgcgcaatctgcgcgggccaccatgctaattgtattaaaacgtttaaccaagatgttctgtacggacaaaatgtgatcgaacacgagctgaattcagagagagctttaaaaaactagtgcagtactgtactagtgtgttccgttgggactgcataaggtactcgtggttagctagttatagctgtttgacacggcaatgttcatgccttcattcacccacaaatttcttgactggaatagtggaatgcatggtctttatttttactttctgatgagcacttcatctggattaaccttgtatgaataatcagcttgacagctttgcagtagctgagtcaaatgccaatccgtgttaattagctcacgttctgagctttaccgaggaattcaaacttacatgtttaaacttttggaacttgcgaagattattattgtggtgggcacacctaacttcagatgcaactccgcaattacgcttgtaacagaattcagaattgagaaagaagagagaaagatgagtttggtgatgcagtccaggtcttggcggcaaattaaacgatttgaccggttatcagtggggcgaaatggctaggtgtgtgcattttgtttggctgactgggcccatccaatattccaatgattcagttaatgcctttctctgcacactacttaacgcattctacgcttttaattgttgcaccgcctgttcataggtgagaacagcagatgccactacgagaacatgtcttcaatgcaactactcccccgtcacaaactactaattgccaatagtcaaattaagttttgatagtttgactaaaagatttccaaaattataagaaatcatagtgcctaaacttgataaatagtagtagaagggatcagctgaactagatgaactcccaagatcggtcaaatggtcaacacacacgcatgtcttaggctggtagcctggggcgttctctctctcaaaaaaaaaaaagagagaaggtattgagctgaacctcaaaagctaatttttgcagcacatatagatatagaacgaccactatcatgcatgactcatgcgtgcaaagagttctagttacacctaccatttgttcctgaatcctgcatattttgtcaacacaaacatcacgagtagtgagtaccatgttctaaccaagaaccaaatcttggactccgactgactgactcaccagtcaccacagcaacacacacatcaatgtgcggcacgatttcacgaaacgtgttctttgaattttcttgcagcagttgtacatagagcactaataaattagcttcttttaaacaactctaattaggcaagtgccgaagagataagtgttaacgtacttgctaggtcatgcttgcataagttgtattccgtttttataatataaaaaatataacgtcttccatgtttcatcattcgtcttttaaaaaaaaaggtaaatatgtcaaaatataagtcacacttatttaaagtacatttaatactacgcccatcccaatttatgtataactgtgggtttttgtgtccaacgtttgatcgtctttcttattttaaaaatttatgaaaaaaatttaaaaaatagtctcacatgaagtactattcatgttttatcatctaataacaataaaaatactaataatatttttttcaaataatatggacagttaaacgttggacataaacagtacaaaattacagtctttctgggatagaggtagtaataaaatactacctccgtgcaaataagtgcagttgtgggtattcgtgtccaacgtttgaccgttcatcttatttaaaaattttatgatttttttaaaaatagtgacacataaagtactattcatattttatcatctactaacaataaaataactaattataaaaagttttcaaataagttgaacggtcaatattggacataaacaatacaaaagtgcacttattatgggatggagggagtaaatcataacaaaataaacaacaatctctgtgtcacactattattcatatttaataatattattactatatttatatagctgcacgatcatctgagtgccaaaggtcaactcggcatatttaatatcggacgacttctgtgatagtggctcaggtgtctggaatggttgtctttccaaggtctggttgcttctagctgatggaatttgcaaaaatgtctaagaaaattaggtcacaatgttgtacagattttgctctagaagtatacgactggactgactgcatggtaattctctatgagcaactcagcatgatggttacgctcgcggctaatcatcattgtggaaaaagaaacgccgaacttaattaatatgcattttctcatctagtatacccgattggaacgtacgatgcgaaaaatagagaaatcgattttgcacgattcaaatcatatagggtagttccgacgtcatttggaattaattagtgggtgaccccaacattaatgtttttctttttaagttcctagccatggcttgtcctttagggcggtcccaacccatgatatccataagcagtgtctatgataccatttcaataagacatcacaacataaactacactttacaacccatgatttcttaaagtgggccattaataaatacatcatctctcttctctaccaataatatttattcttcatctattatgaagacactattctctcccaatgcaaaacttgatagcgttgaagctatgtcatgcatgagacccagtttcttcctctcttcactctttctcttaattaatatagtgtcatataagttaaaagtcctacatagcaatataattaatgtcatacacaccatcctaggtggagggttaggactgcccttaatagtaatgacaaaatatgaaaagctaagactattttttgtgggttattacttattactagcgtaccgtttaactataccgtacagcgttttctagtctgtacatatgttttttcactgtgctgatgaagagcgcggactgcatttgtaatagttagaggttaacttctccaatttttgagagcaaaaaaatttccgttttaatttaggtgatgaccaacttaaactattgcatgattaaaatttgagaacaaaataaaaccttttcatttccaacattagactagaaatgtcatcaagcttttgagcatacacgtgcataatgcatgcctaggctcgagtaccttgtgcatttggattttggtctcgcttttcataataggtctcatgagcataaactaaaagggttaaaattactaaacaaacctatagttaatcttgggtgataacatgtggacttaatattaaactcaaatatcatcttctcagcccaaaagaagtttaatgtaatccctgtaacaatattaggtgcaattatgaagtgggaacacatatacaaagtaaagtaatcctaattctctaaaatattatgtgcaagttaaaaaccatggaaaaaaattagatagacaatgtttagcacaagcaattcactataatattggtacaagttaataactaagtttaataccacaaattaatcagtcaaagcataaaactaaaaggaatcaaattaaattttaatcggctaaagccatacttcatccaaaagtacatttaactgctcataagtgaacatggaaaataatttattcaaatactagattatttatcatgcctaaatataacttttctagaattttcctcctctatttaagcctcctaaaaattcaatctagctttctaatagcccgtctttgtttaatttctatgagcagtctacccattatttttaagtgcaatcaaagaaaatggaatctagatataaacatctaccaccagtaaaatctacactaattcttctggtccacatattaagatattgagttgcaaacttagggggaagaaataattccgaaaattatccaaaaactaagtctacccaaactcctacccatacctctcttcctagcctagcttccatcgacttggccccacctggcagcctctccagctcgcccttcttctgtccgtcatccttagccgaccaagaaacacagagagcaagagatcgagagccgaccgagtcctggacgcgtcgacgcgtggtgacgacgtgtcgacgccttcaagtcactgagtcatgcctccatctcctccagaccgagtcgcccaactccacacatcactctggagctgaagaagtcgagggagaggtcctcagcctctccgtcatcctcaacctcgccgccggtcatagtgacgacgaccttcgccatctccgtttgagtcaaggtcacctccatctctttcgcgttcccatctctccacacaatgccgagcatttcctcttttgacctaaacccctctcgtgcagtgcatcgctgggaacgcaagccacgctgacaacgccctggagcacgcaccggagcgccgccacttcaaccatcgtcgtcgtccggccattctcgaccacctcagagcaagccactgcgccatcgtcatcgcctcatcctcctcttcaatacgcctcaagaaccccagccggagatgtgaaggacttggagaacacatcttttcttcaccggcgccgatctagaattgcctccgccgtcatcatcgattaccgctgcctcggtgagccattgttcgattccttgcgcatacaccatctccttgacctcacaaccctcgtgcatgcttgcttgaagcagctcattgtcccgttcgagccgtcgtcgttcacccgaggaggagcgccgtcgccgagccgttccacaagtcaccgctgccgccaagacctcgacaaccctagctcgacccacggtgagcatcctgaagtctagaagaccacatgcatgcatccttttcgttcggaatcgacttccatgcacacatgcactttcaccccaagaaccaccgccgctcacactcgccatcggcgctactccgatgtcctctaaccaagaaaactagaggaatggaatcgcgagagcttgctcttcattttatctcttgacctcaacctcaaacgagccaccgtttgccgccggcgagctcgagatcgagctcagccatggctagctctgctctgtctagagcagagggatgacttccgtgaattagattaagtgcagggatccgtttacaattgtagaaacacactgacatatgggcctaggactgcgggttgattcctagaaacctcaagggcctttgtgcatattggtccctcacagccatgtggaccccatcctttaaaatctgaagaataattaagaaaatgcccaaacaaatatatgtttagcagaaaaatgcacaaagttgtaaaatctatataaaatcaaatatagctcattttaaagtgattacagttgctgtagattcttgaagttatgaactttattccaggaatataaaacttgacactcactgtacaaataatgtctctaaaatttatctaagataggtcatacataaaacatgtacaaacttataaaatacatagaaaattcatctcaactcattttgaaacaaactcaaaaactgcagattcatcatcatgcatgcactctctgattaggtgaaataaaagtaattacttactttgcatcaaattcctctaaaactattatatctaaaatgattagttttagataagctaaactttagaaattcatgtagaacccaatttagcttcaatttgaataaacttaagttctgtaggatcaccaaaacatgtatttccatgttatgaaataagattatatacttactgtgtagtaaaagtctctaaatattcatataaggatttactaacatagagcagcctttaatttgtaaaacttgtagaaaattcatttttagtccaaatgaaatgaacaaagtttccatagaaccagcaaatagttatcttcaacatagtaaaataaaatttggcaccttttgtagagaacatagatcaaaaccttaacttagtgaaataagaatttaaacacatagtgttgtttaagtaatacataaacatgtataagtatatatacactttaggtctaattaaacctaaataaaaacttgattgaccagtgaagccatagttccatcctcatccactaaaacttagaagaacttagctcatatgacaatttctaggttaatataatatattgctagtttagattagagcatctctagtttataaaatatgaaccatagtagtaaagaccataaacatgtgaaataaaaatgttttagttaaccaaattattccttttattcaacttaaacaggaagtagcatgttctgaacctataactcaaaagtcatgaacatataaaacactatatgcctaaaacacgttgtaacttgtaaaatctataagaaaatcattataactccaaaaattgtgaaaccaaatgtgttagtcttagaaaacacatctccacacccctgtgaagtctaatataataaaaatcactttacaaaagtattttataacactacctaagactatactactataaaccgataaaacttctaaaattcataactcccaaatggaataaaataaaataggaattatttcacctaaagtcattttagatcagtaccaacccactgtgcataaatcatgcattttagagcattttggattttcagctctttcggtatttaattgcatatcgtgtcctttatctagataattgcataatcggtgaagaagtggattaggtgctaacatttatctgatcaaggcaagttttctcctcccatcctttgaacgcattgaatcccatgatttgaggaatgaaaatatttgtttgcaaagttgcatgtgaacttaaactatattggtatttaaaattgggttaaggtagttatgacctatttgctgcattccctaccttgaataattgagcctcttgcagcttgaacccctagaaatggttacagtacactctttgtgctcaaattggtttatatatgctctatgtgcaactacttgcttagccatgcttagaaatatgcaaatgctcattccatctataattaaaatgtgattttcatatgtgaacctttgctggaataaaatgaatatgatgggtatttgcgaactaaaatatgtaaaatgtgattttatacttgggcggcaagtggtgtgcatatggtgttagttgcataccgatagggggagtgtttgcccaagtccataaggacagaacttgtgttacccatttaaagttattcgtacatccacatgtgctagtatgggatggcctaagctgattaatctatttaggaatagccttgcattctggtaggccggtgtgtatgagttcgtataattcagaggagcttcctatttaccccgacgtggtagtttaggtgactaagcgtgtccaatataacggtattgtgccacgtggtgggttcccgtcgtgtccgccaccacggcgttaagtttaaggtgtgggcccgccacttaacggttctaggtatattccaagtatgcctaggatggaggaacacgtatcgtgctggtgcaaggctaggctctaagtagtgtaaaggcttcgttatggcctctagatcacattcaacatgaagagtgtggtggagtcttgcaaactcaaaacaaactagagagttcatatcatgtgggtaaagctgtacaaactctgcagagttctttaaactaattgattagccatgctcacggtcatgagcgctttggtgatgtgtcatgagtatagactatgttttaaaaatgtgatcatgtgacattggtttgaaattgataaatgtgttgagttgtgtgtgtggtgatacattatgacttattgttaagtatggcaataagagattgattatgatggaattatgaagaagttaataatgaaacttaaaacttgtctttgttaattgaagcatcaactcctttacaaaagaattgcgaaacaaaacttgctttatgctgaaattgaactacatatttccttcctttgaatatatgccttacatgtagtatggtaggattgacttgtgcttgctagtacattaacttgtttaatgtactgactcttgctgttgatataaccttttgtttgcaggtttagacttagtctttgagtgatgcgggtttcgattgcttcttctaggatgagaacttaatggggtaaacccttagtcggtgtgcttgtgattgggtagtcaagcttccgctgttctctaataagtctatttggccggtcggcctatctaattattaagttgttgtatgtcttaagtttctttcatcttagttgtgtttgctatgtataatcatgcttaagatgaaagtgttaatctagtgcacatcatcctgggaactagatttacatgagtatgagttaggaatatttgagaggttgtagatctttagtcatttttgtcaagtcttctgaatgtgtaacacatctggtcgccgccttcgagtggtttgacgggcacatatcaggctgaagttgactggcaggctaagggctcagcaatgtctccaatatttctctctcgaggcgtcggatgtttcattatgcttgtttgatgacttgaattattcacttcatctctcaaatatctctcaaatataatgaaggtccggagagcctacgacagcatttattataagcacaagaaaaacattggtgttcaaaaaaatgtcgatcagattttttcaggtttagctcatctatattaatgccagtaaagacttatagtgtaaaatatataagttgaaacatttattagcgctaaaaaattatgaataaaaatttatcagaaatattacaaaatggtataccgttccaacgaaatagatgacgtcatgatgccgtcaatatgatacctagatatcggatctggtacatacgagatatcatatatatctaataccggaggtactagatccgatatctatgatatcatactgatactatcatgatacctagttatcagatctagtacatacgagatatcatatttgataccggaggtaatatattcggtacctacaatatcatgttgatgttagcacacattagcattctgttagaacatgtatatcgttctgtagtttccctcaacttttatacatgtgtttttagtgactcaagcaaaggttgaaaaataaattatgataaaagaacattaaaattaactttaaattcacattttagttgtggctgataagctgacgaataaacgatggtagtttatactttatagtagcatgtgcttgcaacttttcgttaggaattctaccaatatattatatcctctatttcttaaaacaactgaaatggctaaaaatgtgtttcccattttagaattttcatcgaaattctaacatttgaaatattgtatctatatattccaggcacttaatttcgcggtccaaaacacaccgcataatataattatttttttcaccggatgcataatataattattgcacttttgacttttatgtcatatgattgttttcttttagcccgtagcaacgcacatacattccggtagtcttctcaacaacagtaaaatacctgttttttcgtgtataactagaattctttgtaatcttggtggcgtgcaggcatttataaatccgtatctgctgtactcgaatgaattaattaggcgggactttcgctctcttcgcaaaaaggttctctgcgacataccctctgctttctagacacgcgtggccctgaacatcgatgtacacagtacactgcgttccaatgcgtacgaacacctgttgcaaatggcaataatactggctccacacggtgatccactctaacgtgaaacaatacttcaatctcagaacatgggaagtcaacaaatgcagatggaatgtacgcgccatatgatgtggactttggaattggtatggaattcatccgatgcaacttggatccaacaagcactcaactcggttaattaccaacgggatatcagaatatgcatgcagatgatggctaatcaccagcaatggacgcatggttcattgtatcaggatgacgactcctaaatccggcaagtcaaaaaaatataatagtaactacttgaactacatatgcataattgcaggtatgcatgtctctcttccatgttttgatgtttaatctgcatttgctttgctgtttcactgagtcaatgaaagaatgtgtctctgtcaggatctgtaattaattggtatcaactgaaggttcatccagaagaaatcaaatgaggatttgtgcgaatgcgattgcatcatagatgacatagcagtaccaaggtcagagtttatttttatgccttgtcatatctaggcgcacaccatgccaattcatgatttcttacttagtacattgcaccttgcatcatcacgttgatgatatgttaatggttagcgacgaacatatctattctaggcatggttgtatctagtaaacgattattgttttctatcttgctatataaatgcaggaaaccaaatttgcagaaactgaaggttcaccaggttttggcaatgcgtcgtggatgacatgaaaccagttacagctgcagtttcagttatgtcaaagatgcttcatttatattagtgtttcttgaattgtgagccatatactttttctccttgctaatcttgtgtggatatgaaacaccggaacttctctgcgcctacttgtttatatctttcgtgagaaaaaccatttgcctgaattttcagagagaagcttgtttgctgcaactactcgattccaacccaaagtacaggctgtggaagcagaacaccatcgtccttgtcttacttttccttgaactcatcctcaagccagccaacttcccagtattttcaggttttcaaagagcaattcgagacgaaataaatttcacacttaattttcgttatactactattcttaaccgattaacatgtgcacaagtcgaacctgaactagcccgtttccttctactacttttcagtagaaaatacccttgaaccccttttgtttcagaccaggatgtgcccaggtcaagagaaaaaacttaactacccagctgttgctgtgtctgcaactctgaatgcaatcaagacatcaagatcagaagataccgtgctgcttttgaaggtgatttactgagttctgacttgattagcagtcgactacgtactgacttagctatccagtgggaaggaagtcaacacacgggaaggactagtagtagtgacctcgccactgatccaatttgcagcttctttttttcagagttattcggtttacttgccggagtagacgactttaggaagctagcttgtgcagtacttctcaagttgtcgctgaaaagccttacctgatgaaagagagaagatgagataacaagttgcttctgagattgaagtcttgtttcaggttagctaagagtgctgattaagtgtgtaaggttgacagctctcttcaaccaagctgagtttccagaaaaagaacccaatgaggcaaggatctatggaccatttgaaacttggcaggacattttgcaagtatagcacatgccctaatatttttgtatctgatctatttattaattttagatagagaaaggaccaaggatatgctaagagaaaatgttggggctgtttggttatttgccaaattcaaccctaccaaaaaggttggctctgccagaacatttgccacttgtttggtttgctaccacaaatttggcgatacctttttttttccgttactagtctaactaatcttgccagcaatccaagcaatcatctttgccaaaaaaataatttgcaatagccaaatcttgccaatggttgccattgtaaaaatgttagcaatactaaaaatggaagagaatcaagtaggcccattaaggctgcgttcttttgtagggttccctactcccctctcgtttttcatgcacacgttttttaaactgcttaacggtatgtttttttaaaaaaaaattataggaaagttgctttaaaaaattatattaatctattttttaagttagttttagttaatacttaattaatcatgtgctattgtactccgttttccgtgctggaagagaatagaaggttttcaactagcacaacgaacacagcctaagccctgctacttcatcaaattattgctgtgaattatttgctctatgctacttctcaagaaaaaaaaccagcacttattctaagtcatttgttaagtttatcttaaaatattgtattattcctataatcaagtagataatcaagtaaaaatttaggtctcatcttttcgcttatacttatacttatacttatcggccaaaatttaaatttaagctgattttaaggtctttttaatcaaagtttattttttagcctaaaaacacgtatataaaaattttatttacaaattaatttacgtttacaaatatgccgtttcgcttattcaaaacaatgccttttttgaatgggctctaacgcccctggccgaaggatttatttattgatattcttatctttttcttaaccgtaagtctgtaaccagcccaataattatgggccgttgtttgggctttgggccggatcatgatattgcagttatcggatttgtacccgaaaaggaaaaatccgcttcactcgcctcctttctcctcctccgtcctcgtcctggtctcgcggactcgctccctcctcccctccgccatcgcctcgctcgcgcagcaatccgcgacaaatccaccagccaatcgcggcatcgcgcccatcccttcccctatactgcaaatccgcttccccgagatggtaatttccttccgccagtctctcctctcacgatgtttaattgcgcgcatctctgtttcttcggtctagttatgtcgtttagggtttatgaccaagagcagatggtgaaaaatccggagttcttggtcactcggcgtgccattccatatcttttatgcgtaataagaccttttttttatgtttttgtttcccaaattttgctgtctggaaataatttcttgaaagggttggctttgatcgtttgctcgtgcaggaatcctgtccttcggtgaagaacattcttgtgctggattccgaagggaagcgcgtggcggtgaagtactacagcgatgactggccctctttgtcctcgaagcaagctttcgagaagtcggtctttgctaaaacccagaaaacgagcgctagaacagaaggtgattaaaatatacttttattctagttctgttctggaagaatcaaaacaatgtttgtttcttttttttcaaaaaaaaaaggtgctctgtgctacttgtgtagagaacaactgccttatccctgagaacatcaattagcaatttagcatctcacaatatggcattgttgattattgtaagactcctgtggaatattctagaggcatacacatatcttccagttcgagcatcattccattgtttggctcatcttctgtaaacctgtggtttgcttgttatgagatgttaattggtcgatttctgaattttggcagagttatcaccagattttgctgtggaatactaaccttatattatagaataacaggttatctgttttttactgctcatgaattccgttgcatttcttaaaattgactgaaagattcaagtttcggaaaaatgaatttttgttccaacaaatgaaatgatctcgatgcctgtgtcatctgaaatgccttatttttggttgatcattcattttgggggattttagaataattgcattgcacatgagtgtaaaatttgcatggtaggttgtttagttcaagtcatccaactatattcatccagtgatttctttcttttctttcccaatttgcagctgagatagtaatgtttgacagttacttcgttgtatacaagttcatccaagatctacacttttttgtaactggaggtgatgaagagaatgagctcattttagcatctgttcttcagggcttctctgaagctattgattaccttctcaggtgtggacatttcctgtgccgtacactcctatcttttttaacatccattataaatgcttgtcagtactgtatactattttaacaactctctttcttgttttcagaaacaaagtgcacagaagggctgcgcttgaaaacttggatcttatcttcttatgccttgacgaagttgttgatggagggtaattactatgtttgcattgcaatatgctaacctttgctttccatcaattgaacaagcccagttttgataactatcacatttttacgttcatatcaaaggcaacagacaaggtcttgggcttgtattgctgaaatgtgaggttaggcactagttggttaatgtaaagaaactacactctggccttgtttaggtgatgagaattgagccagaattttacacaaaatcagcattgacagctatcagttatctataatatttttatagttcattgttgggtatgctcagttcacagccaaccaattttcagataaacatttgcacaaatgctatgctaatgtagaacatctacaatcaggcatattaaacatttgacaacctgtagttattgattgacgctactaattgtttcttcacaatcgggttttgcaggattgttctggaaacagatgcaaaggcgattcttgaaaaggtatcaggtcatggattggaaggatccgggtctctcactgagcaggtatggcaagccgtcgcatcaccttaagtgcaattgcacaatgagatgcaatcatggtgtcgtaattgccaccaaaccaacatgagaaaattcccaagtgaattaattcttttttgtacatgcagaagttaagcagtgccctagcaacggcaagagaacactttgcgagatctattttcagctgatggcgtgtcatccttcaggttgacgatgagcaagcctcagatagtgtctctgttagcagatcagtactcccagtttgcaatgtcctttgaacatttgccacgggttagtggtaggtgcagcttaactggcgatcattgtcatcctaagaaggttgtggtcggcacacttgttactcttgtggtttcatgtcgatcttggctgtaatcgagcacagtaaccatgtagcaacatgtttctgctcaaagacgagccagtttccaaattgtcttcagtatacagccgccatgttttgacgtagtactacatacatttacttcggcctggtttggaatttgaatggtattctttatagctaagttgcttaataatgtttgactaatttcagaatacttgctatcaaaaccgaccaatcatcgaaagtaaccaaaattcgcattacaattctatcacctgttggtatgtttcatctcatgtcaaggtaaacaaaaagagacaaaagtaatcaagcaaagcgaccagaatcacgccggcaaactgctgccaatcctgctcacatactggcacagctggtccctcagcgcggccgcgccgacgtcggcgacatcgctgaactgctgccggtagccgtcgtcgtggttgtgcgacggcggcatgccgcccctcgccgcgtcctcgaggtcgatcatgatgttggtgagcaggcagcagacgtagatgatcctcggcagccggtgcttgtccggcctccacagctctcccttgagaacctgccacctctccttcagcttggccagagcaccctgcaccaccatgatcgtcgcggcgtgccgcttgttgaagtcggctttcgccggagatagatccttctcacggtatggagtcatcagccagggaaggagagggtagcttgcatccccaagaatgtagtctctgaccactgacccagctggctctcctggaagctccgtttgtccgtccagcctcgcgcctttctcgcagagcctgtagaatcctgaggtgcgcaggatgcacgagtcattcaagctgccaggccagccactgacaacgtctctgaaccgcatgtcggcatcgacgatggcctgcaggaccatgctgttcctgttctcgccgtcgagccagacattgctgttaggctgagctgaagagcacatgaggatgtgcgttgtgtctatggcgccgcagcagttggggaggccctgaatcttttcaaacttagatttgacggttgccatctcctcaggagtaggccacttaagatgattggcagcgcgctcctccaaggcctcaataaacttccaagtgatgtttgagatagctgagtggttcatcccgaagcggttccctatgctcaaaagcgactcaccggtggtcaatcttaacagagcaacacctacttgatcttccacgcctagaattgccttgtctccaaacctgaaatttctgaaactttgtgtctttcttgtgaagtccccactaatcagagagcaaaggtagtcaaaggtcttcctcgacatcttgaagacggactcaaagttttggcagtctttggaaaattgtcctgtggacataagacatagtcaaagatcgcagtggcgttagtcgagcatatcataaattatttggcagggaacttgaaagcataaaagggaaaattcagatatattgaaattcaaagaattcgattcgttctcctcatattgaaattagaagggcagaggaagaaacggggtaaaccttatgatagcaaatttaacagaagagattcaaatctaatagaacatggtccacaagtgtcgagaacagaaaatgaacaatactagcaatatcatgaatgaactgagcatattatatgagaaaaggtttagctgttttggcaatacagtgaatatcgattcaaaatttagaagaatcatcagtagaagggacactgcccttgttaaatagatgactagaatgctatcattcctgtatctaccttcttaaatcactcacacttgatgctcaggtttgtactaattgttcaaaatgtcactcttgtcaaaatttgaaaattctaacaatgtcacttgtcataaaggataggtaggcattcaaaaccaatgttttccagtgtttcagatcatttcagcaatcagggaagctcagaataaatatcactaacgacttcaagaattcaaaaatatattgtctatgtttttgtaagaacatgtatgatcaaaataagaatacagcagccagacaaatagctatacaaatctactttatttgttcaagctaaattgtacttgtatgggctgcttcacccaatgatctctgaaagactcacttgaacaccatacagagaggcctaatgaatctatactcctggatgatctatcacattgaattataaaacagtatttgctgtggtaccaggtactataagattcaagaaacttatcgtgggaatccatttctcggaacacatcattcaaccgacctacctttgagccacactaatcattttctggatttgccagtcaatctattggaacccaatcccctcacgtgtttcctttaaaaaaaaatattaacagccaatcggatgatgaaattggggaaactacctgtgaacagatgagctaattacttaaaaaaaacgcatatgctacactttacaattctggactgaacaggcaaagcaattcgatggcaagtacagactaattgttctccgggagatgttgttttccccttagcaaaatgaagttacttcataagttgcaaagagaaaagaagttagttcttgcaatgtcaaggcatgaacagtcaaccaacctattctgaattagattgacacaatgggcaaaagccaacagcacccgtaaatttctagccccaaaataccattgcaccaaaggcttcatagatctggattggagaaggaaacaacaaaaccacagatggcacaaccaattcttctcccaaacacggtctactcgatcgatacccatcagagcaacggcattca

SEQ ID NO: 9902 - DNA, 67769 bp, Oryza sativa
  unsure (1)..(67769): unsure at all n locations
ttcctgcagcccttcaacaagtaagtaatcaagctcattttcattaggatcaggaagttcagcgctgatgtatgtatccacaacagatggtgtggcgtctgtgcttggtgcatcacgccaccagtatatgcacgtggggaaggcccctcttctgaaattccacgctataaagtactacaaacatatcataggcaaaacaaccaaataaaaatcaataaaacaatagaccataaagagcacagctaagttaagggcaaaaaaaagagcactaaccagcacgcacacgaccaaatggaacaccagccataatatcagaaaccatctcatcaagtttcattttaaaaactctacaaacaatgtcagaacgatctgtcgaacgctgccctggctcaaagcgcaatgcttcttcaatctcaggccatttcggattacaagtaaaagtggtaaacacatcaggggcgccatacacacgacaaatagcaaccgcatcctgataattttggtacatatatcttctcccgccagtgaagcttgcagggagaattcgtcgcttaccaacactattaccgtctaaacaacctttggcgactgcatctgcaatgccttgaacgtgttcgcatctaaaatcgccctggtgttcatctataaatgtcaatctaccctcgtcaacacacgcaaaaccatcaacttgactttgggaggacaaacgaccgcaacataaatatgggttgaactggtctcgacgatagtggcaacagtaacaataatgttcttgcatggaagccttagtacgtatatcagtgcgatttaaatcaacccccctcaaatttataccaagctgaaaaccacgttcaccatatgggaataacagtgggtattgtaaggccatgtaagcaggatgcaagctagatacatgatggagtggaccaggaatgctctgcacaattatatcacgttttgcattttccaatgaaaaatcacctacaattaacccagctagttcatcggctgttggtaattcatactgaacaggcccttcctcctacaatcttaattgctaattgttcatcaccgtgttcagccagccgatctctcgcgagcctaaactgcttaaccaaaggattacaattgtctagcatgtctagcaattcagcagctatctcaggatctagatcacagctaccattctcttcaccaagaacagcaagcattctgttttggacctcattttgagtatcataaatatacagctgagcaaattttggtggattatcttcattaggcaagagcgaacctatacggtgatagacctggccatttattttaaagacataaggaccaccaccctggtttaaactatcgtcaatatctgcacccatcgaagtgaaagtaaacagcgaattgtactgacgtatatgctgcaaaaaatgtttacttcgagcatctccatcaaatttaagaagtgaattcaaaggttctggtggctgcgcaaatggagggacaaaaattttcccacctttgcaacaaaggttgtaacagacacggcgcttggtaatagcagaatctttcttgcaccgttcctggtaccagaactgagcagcgcacaaacggcagcgatactcaggagggccataatcacacctatcctttgaagtctctgtgcaagcattcaaaaaaagaaatttatgtttaaacccagcatgctggcattgcaaacaagggaatggaaacgaatcagagatgaaagcaacctctcaaaaacttggcataatcactgtcaaacttgttgcaagagacaggagcaatacggcaaggttttttgcctatagggaaggagacataacgtccatgtaagccatgtcagcaagaacatatgcagaaaaccaaagatccaatggaaaaacctgcagccaccaatcgtttcatggccaatttttttgaacgcatttgccgtctttttgaagaataccatgcagggtagatagggaaaaatccatcgtctaccaaagcgagaaaaatatatgagcaacgactacataaatataaacaagccacaacaacagtcgcacacagatcagtaaatcacataccctgacggggtggagcaacagtctcccaaacatattcgctggcagctgaattagaggaagatgctaaacaagcaacagacgatttaatctttccacccaggaaaagatataaaatctaaagcgtctaaaaaaacaaaccgcaacaaaccatacatctaagagaagcgctgctacgctctagcaatcggcgatcccgtcgacgagcaggcctaaccacacaacccccttccatataggaactaaacgcacagaaaaacagaaatgtcgtgcacacatatagaacatataacccacaaggaaaagcgcagctcgaataatgtatagatagctgaagcaacagaggccaattgttataccttagccgacatgtacgggcacagaagatgtggtccgcaacctgcagggaataagaatgtaatttaagctggatatcagataaaagaaagaacatacaccaaaccacaaggcacaaataaactacaaaacaaaaaggatgtcagccccaaagaaatagcaaagaaacaaagctcacctgaacaggagctgatggtaaagggaacagcagcacaacagtaacgaacgtatcgcacggacctgaccgcgacaataagcacctgcgccaaaaaaaaatcgatatgaagggaaaaaaaacatgtaaacgtacagagatgcacttaaggaaagactcaaaaatacaaatgaaccacatggttctgcacgaaaagaaaacaccacgggacacactctgaatggcgaaacatgatccaataatgaatcagaaccaggaaaaaaaagcaatgatatttgtcattaactaacgaccgtgtgcttcatctatgtaatagccaccatctatttactgaaagaagtatatactgaaagaagaacaacaaagataagcaatgatccactgtcaaaagggaaacatgaacacggggaaaatcgcctaaaacctaaaaactctgtgacagtaaatcccgtgcaacaaacaggccagtacatggctacctgagatgcaccaagcctaatcacaggataaaaaggaaacacacggcacagacagaaaggaaggcagctaggccagatacagaaaacccaccagcacacgcgttcaccccccagggtccatgatcaaacgaagaaagcacaacagcggagaatgggctagaacagacgacaagaagaacagcgaacgggcaccaaaaggcaatgcaaaggaaatggtgaaaaagcagaagggaaagagaagattggcaggcaatgagctacttatactggtaaacaaaacaaaaaaatatgtaacataaaaaacaacatactcagaggctgtcaataggaccccacagatgacagggccatcggtcaaccacagcatacgacgtaacacatcagtgctctgacggaggccatcctcgagctctccgtgttcgcctcgaacgccgagcagtaacactgcgccggacaaagggcacatcggcggagcctactacagcggccaactgcaattggcatggaccacgactacgtggggcccgaacagcagcggagcatgattggctatagccgtgggaccgaccactcgccggaacacgcacagacaccaccaaccacctcgcagccccgacgaccggctgccattgaccaggcatgctcgagctctccgtcccgccctcgaacgacgagtggtggtgagtgcacctgacactggccgcactggcgggatcctcccgcagcgacgagactcgactggcatacaccacaatggcccaatcagagcatcttgagtggtgtgagcgggcaccctgaacgatttgtaccatgctctgatatgcagcgacaagtgaggaagaacaacaagcaaacatccaacaccaattaactggccatccattaccagggagaaaatgtataaggaggaagaaatcacaccaggcatgcagattcggcactgagataaaaagagcatcgactcaataccaaatcaggggggcaaaacaatggagccgctgatatcggagcaaaaatcgcacggaatggcgcggccaacgacgaagaggaaatgcgagtgcatccagaaaatgccacgtcgtccccttccttctttaccacggatgaaccgcccaagctgccacggacacactcaaagacacgtgccttcacatgcaccaataaacgcagcccgtacacatgaaacgcgaccaccgtttctgaacagcgcgaacaaactaaatttgccgcagccagcgtggacccccacctctgtggggaggaaatgaccccatcgaccgtcgtcgtcgtcgccaccgccgccgccgccgcatcatgggggaggtaggcggggtaagcagggggaccggaggcaggcggggtgagaaagggatagcaaggagcggcagcggtggcgctcggcgacggcgatggcggtggcggaggtggagacggctgcactcggtgacggcggcagcggcggcggcggcgggagaagaagagggagagggtgagatggcaggcactcggtggcggcgcgggacaaggagagcggcggcggcgctctgcggcggcagcaggagtggaggcggcggcgcgagggggcggaggcggcgctcggcgacgtggacggggcgagggggagggggaggcggaggcggcgcgtgagggggcggcgcggcgctcggcgacgtggacggggcgagggggagggggggcggaggcggcggcgcgagggtaggcgcaggcggcgggagtggaggcggcggcggcgctcggcgacgtggacggngcgagggggagggggaggcggaggcggcggcggcgcgagggtaggcgcaggcggcggcggcgcgggaggggggcgggagagggagaggcggcagctagggctttggggggtatgcgttagtggatgctgttttgcggaaaagcccctcttcttccacatatcacaaaaaagcccctttccgcgattattcctcttcaaacacaggacgctagggacctatacattattacgaaaaatcggagggctttttcacataatttccaccccgcgcgtactgtagctactgtagcaaaatccgacgtggacgcagcgagcgagcgcccatcccgccgtccttaatattctccaattactttgtcataaagaatatatttttcatttaaaaaaactaatctcatactgacatatattagcgtgcatggtccccttaaaagttaggtttaatcaaaaaatgcgttaaggtggctgcaaggtctctgctgccctaaccgaatggctaggagtaaaatttggatctacgattcacctcagctaagttaggccctctttgtttaggcttagacttttaagtcagcttattggcttatatgatttataagccggtagatttaatgtcctaagtttagtggtggagtcatacatcaacctcacataagccaaaaaagcttctccaatctagcttttggcttaatagtgttagagtggcttatggctttaaaaaaagccaaacaaataagttgcttgtttgtttaggcttagacttttcggcttataagttggcttataagcctgaacaaatagggccttactatattttacaagactacaattacagtttctggtgcatttgccaagcactattcaggaggatattagtttttttgtggtcctggtatatgtacatatgggataaatgcatggtggatgcaccgaacagaaacacaccaacatgcccacgtcaataacccaaccattgatattttggtgcttatttaggatgtttgcatgaattagtagtactagattgcaaccaggtcaacgctcttactgaaaacagccatttgaatggacagaagtctaacagtagtggtagtcaaatcgatcatcaaccttttgaggttatatatttttcatctgcttctgcataaaatacatcaaatgctagacttccgagtgaacttgatcgaaatgcttgcagaacatatgtgtgtgcagaaattggattaaaacaattatttttttctccacgagcttcacattcatgtgtcctacagaaacatactactaactgaagcatctgttcagtttgtcacgttaatgacaaaaaatcgaaatcacctactgagaattaatttgtttatgcaggcatttattacagtccatgatgcccacacgcaggacttgtcttcagcactgtccaggcattaattttgaacatgaccaggtaacgtcccctctggctttcgtacatgaaccaaaggtaacaacagttagttatatacttttcaggaaataattttgaacatgagcagatagacgtaaaattatataccctaagagcatatgatgacaatgtagctaactactaaatttggaccatgctgaatattataagatggaacatcttggtagttagtaatattatgctgaatagttcgtatatatccggttggatgtagaggccgggtaaaaaaatacccttctctaaaaaaataaaaaaaatatgctgaatagttagtggctttgattaatctctctgtcttcttgcatggagtagcacaattatataaccagctgggtacttggtaccttgttgccaccctaaaaaaatgatggcaccatacataaatttgcttgtgttaaaatgtattgccatcatagcgttgtaacttataccttgccttcatggaagatagtagtttattttaaatggaagacagtaatatgctttgttcaaattgatcttccagatgcataggtttatgaaatgctatgatctagatgaataggtttcctgactattgttattcatttaaaatagaaccaaatatgctgaaactattcatcactgaaaaaagtcaaatagaattatactgtcacaccgcactttcataagtttctattgatactggattttattctctttatgttccttcagtattttatcttatatatcagaattaaatagtttacaagaatatgagtgagaattatattattattgatccgtttctgttgtttgccactgtaccacctatgcatgcttgcctattctcttgaaccacatcgtatcgttcttaattttcctgaaatgttgcatgcattctttgtttttttcggactgctttctgtggtgcctagttgttggtagtgtgcaatattgatgatttacgcgtcctgtgtattcgtagggtataatgaaatttgatctgaacatatgaaatttgacacatgcatttccatgatccgaaaagtttatctgcagatttaacaaaatattcatgttcattttacctttttcaactcatttacatgaacaaaattggagccatgtaaaagcctatatatttactttgatacatatttttgctttaatagaatccgggatattttgccaaatattttgggagttaaattactactgctaagtgatgaatatgtctttataagcgtgtgcctcgtggtaggcaaacacactgtcttcaatatggtgcttctactgatatgcgttcgatagagaagttcatgtggcttcttgaggtgctctataaggaggaaggtgaccagtgaggagtagaagctgcagaatgtttccaggcgatgcatgtattgaaaaaatagcacctgtagaacttgcaggtgatatttgtatctatattttacttctaaacattgtgttttgaaatgttaaaatattgtagaactctattcatggtcaactttgggaagttattaacagtataataatattcatgagaacaatacaaatatctctatcgttattttattcctgaatcttaaatattaccttttggtttttgcattatcaattatcaccattgcgttagcacgggcatattactagtgttcgttaattctcccgtgatcgggagactttggaagcgctccatggcgtttggaaaggaacctccagcgctctcaccgccgtgcagaatcgccgaattttgttcatttttaatttttttaatatttacagaaatactataccggtgaaaatatttacagaaatagaccctgcaacccttcctgagggtggcaggatgatgcgtgtgagcaggcgctagaggccgctgagcgggcatgcgaattttgcatgcggcaaaaaatgcatttcacccccttgccgcccttacagaaggcggcaagggacctcagcgcaaaacgtgcacacaacgccgtgtgccacgtcaccttgcgactctccacttgggcgacaggtttattttttaaatatttttgccggtataatattttttaaatattttaaaaaataaaatctactactacttaaaaaataagaggtgcttccatcgtccgtcaaaaaaaccgggtgaaaaaaaaccgggcagaaaaaaccaagtttgtccgatcaaaaaaaccggacgaaaaaaaaagtccgatccaaaaaaaaagtgaaaaaaaaaccgggcgaaaaaaacacccgtccctggcaaaaaaacacccgatcccttaaaaagggaaaaaaaagtccgagagacaaaccgtttaatgaataaaaaaagcgaaaaaaaaagagtccgattccctggagaaaaaaaatctgatttccctggaagagatccgatctgtattggattggagaaaagaaaaaaaacacttctctaggtgcttctgtcgtccgtcaaaaaacgggagaaaaaaaccgagcgaaaaaaaaagaaaagtccgataaaaaaacctggcgaaaaaaaaccgggcggaaaaaaaacaaatatgtccgacaaaaaaaaggaaaaaaaaggaaaaaataccgaaacgaatccgactacatcgacgcggtaaaaagagtttaaaaaaataaaaagaaaactgtcctattccaaagaaaaatgaattatatgtatcgtggagcaaaaaaaaaaaaaaagaaaagtccgataaaaaaacctgggcggaaaaaaaccgggtggaaaaaaaacaaatctgtccgacaaaaaagaaagcaaaaaaaggaaaaaaatcgaaacgaatccgactacatcgacgcggtaaaaagagtttaaaaaaaataaaaagaaaactgtcctattccaaagaaaaaggaattatatatatcgtggtaaaaaaatcgaccgggcgaaaaaagaaaaaaatagtccgatccgaaaaaaacaggagaaaaaaaatgggcaaaaaaaaaatttgtccgataaaagaaaaggaaaaagctgaaaagaatctgactccatcgacgcggtaaaaaaaggcgaaaaaaaactttccgataaaaaaaaggaattatatgtgacgcggtaaaaaaaataaaaaaaccaggcgaaaaaaaagataaaagtccgataaaaaaacggggcgaaaaaaaaacaaatatgtcctatccaaaaaaagccaaaaaggggaaaaatcaaaacgaatccgactccgtcgacgtggtgaaaacagggcgaaaaaattccaaagtaaagggagaaaaaaaatcaaaacgaatccgactccgtcgacgcggtaaaaaaagggcgaaaaaaatccaaagtaaaaggaattatatgtgacgcggtaaaaaaaatcgatcgggcgaaataaaccggacaaaaaaatatctgtccgatccaaaaaaaaggggaaaaaatcaaaacgattccgactccgttgacgcgataaaaaagggcgaaaaaattgtctgtttctaaagaaaaaggaattatacgtgatgcggtaaaaaaaatcgaatcctattatatctagaaaggtttgacactatgtgaaagtggtgaaaaaaacccttcgtaaaagaaatgcacgagaaaaaaaattaaaaggacggaaaaaagcgcggaggaaaaaagtcaaatttatattcgtcgttttttagtccatttatatatcttctttatctctaatgtaatctaatctaactataaaaagagaagtttctacagaatattaaaaaaggaaaaaatgcgcgagaaaataaaaacggtttaaaaaaacacgtgagggaaaaatgtcagaaaaaagcacaaaagaaaacgcgctagaaaataaaatttcgtagttctaattttctgattgttatcgacatggttatgcatgaaaaacgtatattatcattacgttttttcacccgttgcaacgcacgggcatatttgctagtgaaaaaaaaatccagaatcgcctctcgtgcaatgctcgagtgggccggccttctgccgtgacggcccgttttgttcggacgcccacacggcccaccgccgttcgggcccaaaactcccagcttcccaagtcgacggctacgcgcagtagcgctgtcgcagtttccgaacggctgtacgcgtcggaattctctgtagccctacagcaccgtggaagtctggggtcctcaatttcggcacacgttagtgtttagatcttttggatctaaacttctaaccttttttatcacatcaatctgtcatacacacataatttcagtcatatcgtatcaatttcaacctaaatttttaactttaaaagaaactaaacacagccctttgtttgttgggacttgggagagtcggcaccggcctgatccggtccggggctttctttcggggaaaggaggaaaagctgatcatggaagaatgtgttgatgactggagcgtgattagtcaggtcaaaataggtcgtagatgttgccagatgccaaccgcatcaccgttgctacttgttgcattttgttcggcgatgatcccctgacacatagtattttgtagcataacatgattaccgttccatgatactccctctgttttagattataatttgttttaagtttggttaaagttaaactactttaataagtttatagataaatatagtaatacttacaataccaacttagcttcattaaaccaatattgaatatgttttcataataaaattattttaggttgaatatgttataactttttttctacaaacttgattaaactgaaagcaaattgactttaatcaaaattgaaacgacttataatataaaatggagggagcatcgaccctattgtttcgctgaatatttgcaaacgaaaactaatttgtgaagaaaacttttatatacatgttcttaacgatctaaaaagcaaaggctgaaaaatgaactttgataaaaaaaattgaaaattcaaaatttggctggtaagtataaacatgagcaaaaagatagggctgcatatgtcagttatcttaaacttttatgaaaggatgttgttagttcttttggctgggtggtggccattagggcaaggatgtgtcatggtttcggagtggaggatttttttaagtaacttttaggagtttaataagttcgtgtgaaaattttgtaaattctttcgatccaaagtagcctatgagagataagtgttccaacactaattctcagcttgcattttatgtttattaccggcttcccttttgcctttaacttgtcccccatcgtcctgatttctcctcgtctgaaacaactgggatgtatctatacggtggttctcttttatgctatatcatgataaaatccacatattgaagtgtgcgacaaagtttaaaggtgcacttgcgtagttgctaaacaatacgtttcatgttgctaaataatacatttcacgcaaaaaatttctatatataagttactttaaaatattaaataaatatatttttaaaatttaaaataattaaaaccaattaatcatgtgctaataattttttcgtttcatgtgcccacacataattagggctgtcaacgagccgagctcgagcaagctcatatgcttaggctcgagcttgacacagactcgagccggctcgagtcaagcctgttctaacattcgagtttcatggtaggcttgagttcggctcgaccgagcctcgagcttgcctgttgttagcttcgcaagtcacggggaagaaaaatgaaggacataagctttcgttgggagggatgagtgatggagaaagatgaaggcatttagtgtgccatgcagcattttgctgtttgatgtgagaggagcggccgctagctattctcctgtgggaaagcttggaggaaaatttggatgagacaactaagggcctgtttagttctttagtcagtgaaataaaaatttttgggtgtcacatcagatgtttgatcaaatatcggaaagggtttttggacacgaatgaaaaaactaatttcataacttgcctggaaactgcgagacaaaacttttgagtctaattaagccgtcattagcacatgtgggttactgtagtacttatggctaatcattgactaatcaggctcaaaagattcgtctcgcaatttacatacaaactgtgcaattagtttttctttttatctatatttaatgctccatatatgtgtccgaaaatttgatgtgatgttttcacgaaaagtttttgggaactaaacaagccctaacagattagcataagggatggcaaattgtacgtaagcccagcagcaaaagctcgtcgagctatttgagctcggctcgagaagcttgcgagcttcgtgataggctcgagctcagtttaataataaaacgagccgagcttgaatcaagcctaaagcgagccgaactcgagtagcttgcgagtctcgagcttttttgacagctctacacacaatttttatctaccgctatctcaaacccagcttgccaattgttttgactggttacttcataaaatcatatattcatgaaaagcttaagccagcatggaacctccacatagaaagcatggtaaacagctaataggcatgatatatttagctttccttcaaaattaaataacctttacctaaaaagatgctagcatggaacaatcataaatatttttttctgagagggaacaatactatttctgaagtcaacaaaagcaacaataggagtatcagaatttcagcatcatgggttttatttagttaacaaaacaagagtttcttgtgaggacaaaatgggaaagataacaacactacatagcccaacagtgacaaaatgggatggacaacagtggcacagttggaagttcaaaccgtttcccaccaactgcggttaggaaaaagggtgtgtttagttgattggctaatttttttttaagtatatgaacacatattaaacgtagattaataataaaataaattatagattccgcctgtaaactgcgggacgaatttattaaatctaattaatttgtcattagcaaatgtttattgtagcatcacattgttaaatcatggtgtaattaggttcaaaaggttcgtctcgcaatttacatataaactgtgcaattaatttttcgttcacatttaatgttccatacatgtgtccaaatattcgatgtgatgtttttggaaaaaaaaaatctaaacacggcaagggtccgacggaaatttgcacgagtatttttcaaaacaacccaacacagccgaaatattcacacataattcgaagacgtgtttaactagcaaagggaactggactgtaaacaattactcattaattcgagggacttgtacgcaaaaaagctaaaaaattgaactaaccatagttagctaacctcgccttccacagaacaaaccagggttgcgcggacgcgaacaccaccagaccagaccacctcctcctcgagcttcccctcctccccctctttccaaatttccccaatctcgcgtcgcttcttccccgaattccccaacctcgcatcccgattcctcccgcggatcgtgcggcgacctcgcccaaaatcccccgccggattggcctcgccgatggcttaattggcgatttcgactctgcaatggaggcgcagtggctcgccgagtacccgcaccagggcgccgacaagcggccgcggaagcggccccgcctcgcctgggatgtcgcgcccccgctgttccagccccccaaggtataatccatgcgctatgtgctgcgtcgatccggtctctctcgggcgtgtgggttgcggtggtagtttttggctagatctagtcgtggtttcgctagatttagagcggggcggttcgatctgggtgtgcatatttgggaattggggatatgctgcgctgttgcagaggatcatcgatgtgatattgtgaatttgtgggataggatcggagccagttgctgatcgaaagaacaatatggagaaaaggggcaatctcacgacctccatgtgcctaagtgctgccaaatttatggaacttgctaataaagtttgatattctgtcattatttttgctaatcgatattgttctcttttggtgggacacaaccgttacttgaggtatttgtccattcagtgctgtcaaacatatgggttacccggtgtacttctctatttaggactatcaaacaaaacagatagataactttaatggtgctaagtggggtgtaaatatcattgaactttgaaaacacaggagatcagtatgcagttgtttctattcatttagaatttatatgcttgttaccaattttgatgtatatggttaatagtaatttacgtggctaattatttttgtaggcaattcctatgctatattgcgggcaggaactaatcaatggaaattttgcgaccgcttttctgccaccgccaccaatctattatacaggaccaccacgcaatctttcgcctccctggaggccagatgacaaggatggacactatgttttcgcagttggggagaaccttacaccaagatgtatttttccacaactcagtattatttattgcatagggttattgtttttgtttgcatttctgatcgcttgcttggttagactgttaaactgtttttcttctggagtaagtttatcttgccacaattgttgaaatactggacacagaactttcattttgtttgatatttgggacttatgtagctgtttaatgattgtcagttactggttaaatgcaacaccgtgtttcaaccacctaattatgggttgaatggcatttcaagcctcattaaataaccattcattatttacagtcaattaaatcagggtaaaatgtttgcatacctttgttcgttgcccaaataacttctgacattgtgtaatggtcgtgcattcttgatatctattgccgttgtgttgtcaactgccctgcatctctaccagctgtactgaacttatgttttgttggcgatgcttcttttggttgagataattctgaggtttaacctttgttcttgtctatggctttgcagatagaatacttagcaagatgggtgaaggtcagtgtgctcctccttttctaaatttcaacatttcattttataaggaatagttcaggataaatgcttatgctgcaaaagttttgccctttgtacatgttaccaacaactacctttcttaatttgtgttgcagggacttttggacaagtcttagagtgctgggacttggaacaccaagagacagtggctatcaaaattgtgcgctcccttcagaaatatcgagaggctgctatgattgaaattgatgtgcttcagaggcttgggaagcatgattttactggtagccggtaagcaaactactttcgtcattgctaagtcttgactctttattgagttgatggatttgcatgaatggttctatgcctgcagctgtgtgcaaatacggaattggtttgactatcgtaatcatatatgtatagtaagtacatgtgcatcaagaaggcttcctttcatgttttggatggtcagaatttaatattgaattactaactttgtcaggtatttgagaggctcggaccaagcttatatgacttcctccgaaagaatagttatcgtgcatttccgatcgaccttgttcgggaatttgccagacaaatattagagtctgttgcatgtgggtattcagttaatttctgctgtttgttggttatgcaaattaacgttttgttttatcttgcccctaacagtattattctaatgtttattttattgtaatatttgcagttatgcatgacctgcgacttattcacacagatctgaaacctgagaacattctccttgtttcatcagaatctatccgggtgcctgattataaggtggcttcaatactaaattttgtcattcgaactataatcttttgcaattttatccgttaacacttgtggttgccattacattatgtcaattagtacgagcatacatttattttttactgatttttatattgttttccataaaggttacaatacggcccccaaaggatggttccttttttaagaatcttccaaaatctagtgctatcaagctgattgattttggaagtacaacattcgaacaccaagaccacaattatgtggtatcaacaaggcattatcgtgcccctgaagttatccttggtattaacatcatatccttttccatttcccccctataaagtggaacacataattatattactgtgttttgtttatggtacctttgtttagttatttcctttctctgttttcatttgcaggtcttgggtggaattattcatgtgatttgtggagtgtgggatgcattttagttgaactctgctcggttagttcacactatctatacctgagtagttccttgattttctctatagcccagtgccggctccgcgaatttgcagtgcttcctattgatatgttgcctctttgattttctctactagggtgaagctctctttcaaacacatgaaaatttggagcatttggctatgatggagagagttctaggtccccttccaaaacatatgattgtcagagctgagtatgtatacaaggtcttcgttatagtttcatgatttattataatctaagataagatggtttacatctaggcttaggttgctgctgagtttcatctgaagttctttcaaattatcaatcacttgcatgtacttgttacttcttttttacagtcgccgtgctgaaaagtatttcagacgtggattaaggttggactggccagagggggctgcctcacgggaaagcctgaaggcagtctggaaattgcctcgtctgcaggtactttgttatctgatgtagtcagtatgttcctcttagcattttcccctctttgccaagtgtcgctcataggtggtatcctcttgacactcgaattgtgctaactcatgcagaatctggtaatgcaacatgttgatcattctgctggagatcttatagatcttcttcaaggccttcttcggtatgatcctgatgcgcgcctaaaggcacgtgaagctcttcaacacccgttctttacaagatgccacagaagatgtggttactgagactatactgagattaaaatgctcaatgctgtatttcttcattttgatgtgtaagaaccacccaaaaaaaagtgaagatgttccacaaaaatgaaatgtgctaactcgcattctgttcgatgatgtgcaaggtaactgttgtatatagacagagttctacgactgccgatttattttaactgggagatatttttcaattcttacaagttcctgtctttaaacctcacattttacttcatactaatttttgcaagactgcccagtactagcaggtagcatgcagaaatctcaacttggtggagtcaattgaggatagagggaatgccagtggctctcatgaaagattggtacactgtatttgatggtgagctggtgatataaggtgagcattgcattctgaccatgtcctgtttggtgtggagataggcttatcaatataattttatgtgcatttaggatctcagtatttctcgtgaaaattggtgatggcctgttcacttgaccttcatgtccattctattttaccttgaaatgcatgattagccctggaaactaaccggacgttaaagttacaccctggtgagttttgcttgtgactggtcatatttcttaaaacaagtctcgggtgttggataaaagtttggtaattaactgagcttttgagtctgacacttggcttggaaaggtttgcgacaactttgaaattgtggacagtagtctaaatctcaagatgtgctcaactttgaaatattgtcaactgtgactaaagtccagaatccttgatagcagctgatatatatctaatttacctgaatataccgtaaagtactggctttaaaatcttactggttcccatattactagcagccaccaagctcttggattggagatgtttgttagataaatccttgtgggttttgagcttaaaactatactcaacctgtgtctatcgtttgcgccaggtgagcttgttcttaatatcttacaaaagtcatttcctttatcaaactttagtgatgtgatgattgtattcatctattgcttgtttcttctttctataaaggctcattactcaaaagttatcttctggcaaaaaaaaagactgttatttggtctgataacatcttattggctgctacaatatcttctttgacaaactgagtatttgaaatctgctggaaaatgttttacaactatatttaagcaaggacgagtattttttttaatttatcgttttcatttttgcaattgagtgaaactaccgttgaaggtaatttatcaacatcgagtgtcaacactagtgaaacaaaattagtccggcttgttttgttgattaaagatgaaatcattctataggcaagatagactaaccccagaatgctggtagtttaggctcgttttggacatgcgaaagattttactcatcgaaggtggatttggagagctgctgcttcctactgtgaatggatgagcagctggtaaatgttttactcattgggctacgtgacgtcagcccaaagatcgcctccaaagctgtagcagcgggtcaattgtacaagagcctgtaactctgtaaggtatgatatactaacccttcggaacgggcgccaacgcttccatcgtcatgttacatgagatcgcgttcgaagacggcgagcagcaggtttgatcacaggtttcgaacctggcattctcgtatagtcgtatttgcttcgatcatcatatgttacagagatcgcgtttgtttgaagacggcgagcagcggttttgatcacaggtttcgaaccaacaaccctgtactaatatatactactgcatgtgttctttcagcgaggtaggttcttttttctcttgttgaccgatttattgacgtgactcccattctcccaccaaacccgagaccctcaattttttgtttcttatgatcttcaattatttggttgcctccgtgtccctgatgagtccctttctccctgagctcccccgtcaatatgtggaatatactaaatcgtgatgaacgttattcgccaggttcctgcctttccattcggagggttcacgtctcccgcgacgaatgagccaggatcattacaccggcaaacgtgcacattccgacgaagagacgtttatccatcggtagcaaggcgctgctccggctgcctggttgctgctgcttgtagacggtcgtgggccaagcagggacaacgactcctcctgtggattacaggattgtggtagctcatgcaccccggtggcgataagaccgtgctcgcgcggtgaaaaaaacggcctgatcggcacggccaggacgactccggctgctcccgcccacttatcccagcggcgaggcgaggcagcgtcatgcgatgatgcgatctgctttcccgtcccaaccgtgtggctctctgttgcatcattcgctctgccactgcctccccatgcgtacgtggctctctggtgccaggtgcgtgcgtcgtttgtgtggaagaaacacgaggacgatatggtccacttcgcttccagtttcgacatctttttgttggaagtacacgcacctagccgctatccccgggagacgaaagctacggcgatctcgacgcgggaggtgactccgaccacaccgcgcgcttgtttcacgtttgcaagtgggcgcacgcgccgccccgatcagtcataactagcgactctcttcttgaccccaaatgcacttgagctctatagttgtttttctcgaaagttcatcttaaccgagtaatcatgttctcctacataggctcgcaccagccgtgtcatcagctatcaagccaggagccccgtccacgtttacaactgttcgtcgcttcatcagtgcaacttggcaagacagcaaaatcagtgagaggggttgctgtgactgtgagagggattaaatggatctggtaaaggatggcaaataagtagttaaaatcccccgcaatcagcatcggccattttcctgatatgtgtacgggggacagagagaggcaatcaggcgaatgcgtttttaaaccggagaagggggccacatttcctactgcgctgaaccggatcctctcggtatcacctcgcgccacgcaaccgcggggatccgtatcctctcaaattgtgcaccctccacctgtccgtcctcctccgtaggccaagtgcaccgccgtccttgtcaaaccaaagaccgcggcgatcgactatgtacgtggaaaacaattttaatcacttatatgtatattgtatgtcataaatagttataaaagaatttatttaaaaaatcaaaataaattgacatataatatgtcactccaccgatatacaagtttaaactcgactctataagttatgaaagcataaaaaattaagctctaattaattaatcttttgtagaagttaaattttacaagtttaaactcgactctataagttatgaaaagttatgaaagcataaagaattaagctttaattaataaatttttatagatgttaaatttaaactcgtatgtatatcgaatgatatatttcatatcaattgatttttattttaaaaaaatgtatataataatttaattgacatgtgtaataaacgggctcgacagccaccgagacatggagtgattataatcaatctcccgcggtgtatgggctcggcgcacgcggcctaaccctccccttcctttcattccctccccccgccgccctcttgaccctcctctttaatcacgagacccgcactctttttttgcgtcgctcgagcgcccgcgttccccgcttcgccgaaactaccaaccgcctcgccgttctcctctccccgtggcgccgccgcgccgcacggcgggagggcaactgaccgagggagactgcccaccagcgtgccgcgcgccgtcgcctccggctccctggttcgtggaataatggcggcggcggtcgcgggcggtggggaggagggggaggagctgctcctgctctccgccgtcgaggccggttccttcggcggcggtggcgacggtggcggcgcgggcgcagcggcggagaagtcgtggcgcctcaacttcgacggcttccgaccgccggaggtgcagcaggagaggcggccgccccgcgggctccaccaccactgcctcggcgtcctatgtacgatctctctccaactcgccgtcgcgcgcttgctacccttgtaccgtgtgatgtttatggtcttatggatatattgttgtgttcgtatgcttggttgcttgatctaggctttcattcgtttgccttttctcgtgtgttggcaacatggttcatttgtttcggtagttgccttttgcaatagatatctactaaagtaacttatttttatctgctttctataaaagcagttccgtttaggcctttataatataaaaaggcagtaactccttttatttttcgtttcagcaactagcaagagctcagctgtgctagtatagatggggattggattaggatgttgacggtagtggtaggctagattcttcgtgtgcaacctttggcagataagaataggaatggggaatgttatattggtggaatgaggaatttgttgtttctagctttctgatattgcctagttgcctatactatcgtgctcatctggggcagggcaggacggtcctcacgtgagctgctctgttcttggagtgcacgtgaacagagttctaagaaaacttttttttttatcagcgggggtggttagcactgagccgagttgtaaagactggggcactgggtgtgggtgactgacagcgtgagaagggcaccaggtgtcttagcgttcatgtattgtcacaattattttacccttttatgcaattttagaggttttgttctggttaacaaagttgcattgggcacaaaaagttgaattaataacccaatcatgtcatttggccgcactcaacatttggggtttggatatctagtagtcgtttctctcccgtattgtcaatcactgctttcccatggctatagaagtagggagtccttgtgggcttaaagtcgtggtctattggtggttgaattcaaggccccacaatcctagtactagtagtactatttaaatcagaattgacatttttatcctgtacatttcaatagctgtagcattttattcagtggttctacatgtgatataatcaatagatgaaatataattaattagatatcagagttatcaggttcactgagaagtggtataattcagtagaacatgtgaagcatacatgcctgcttgctccactaatgtcactatctttcttcatgctggacataattttctgtgattgatgtacgattctatcttcagctcaaggtcctgaggacgtagttgctgaatactaccaacagcaagtggaaatgctagagggctttaatgaaatggatacacttactgatcgtggttttcttccaggaatgtccaaggtatgtttgataagcttttctgttgtaacagtagggaagacaaattgtttaacaactgcattgcaacactgaacataaatttatttgcctgtaggaagagcgtgagaaggttgctaggagtgagactttagccatccggctatcgaacatagcaaacatggttctttttgctgcgaaagtgtatgcttctgtgagaagtggttcacttgctattattgcttcgactttggattctcttcttgacttgttgtcaggatttatcttgtggtttactgccttctctatgcaaacaccaaatccctacagataccctattggtaaaaagcgtatgcagccactggtgagtcctatcacaagattaccttcatgtttgccatgcttattcttcttactgtaatttatgcaattgattccaagggactcaactctcggctattcatgatgcatagccagttactccctgtgatgttcttttttccgcaaaatgaaaagaaaaagtggaaatgctccaggaatgaaaagaaactaaactattgcaaacattcctggcagatggaccatagtaacatgcggaattttgtgttttgaggattttcatagttactagaaatcacgttcccaatttcccccagatatctcttgctcttaggtcaatgctactgtatcaatatctttgctactccggcagcagacaatttatgcatggaaatatttatgataagtccttcagtctaatttcactaaatgatcgagtttatcgcttctcttttcacttagtattatcagtcatacacttttaagttccaaatttcaatatgttgactgttccatcacaatatcttcttcagggaatacttgtctttgcctctgttatggcgacacttggccttcagatcatcctagaatcagtacgctcgttgttgtctgatgtaagtctgctgatgttttgttggccttgaactcctactctcattttgcttttgaccagaaactttgcctgaggatttcttttctagaacgataagtgtctttgatgtttgttggctttgaaattctgttgtagcttgccatatacctttctgattgctgaacttattgtcttgttctccagggggatgagttcagcttgacaaaagagcaagaaaagtgggttgtggacatcatgcttgcagtgacattagtgaaacttgcccttgttttatattgccggacattcacaaatgaaatagtgaaggcttatgcacaggatcatttttttgatgtcatcacaaatatgattggtcttgttgctgcactactagcgacttatatcgaaggttggatcgacccagttggtgcaatcatcgtaagtaccaaaaagttttctcctgttccattgcagtagtgtaaaactagagttcaagtaaatgctatatttgatctaatcgttaatttggagctaggcacatcatcctgattgggaattgactgggaaaagtaactagtttctgccaattttccatgtatcatgatatattctttcaaaaaaggaaaacataccatgatgaaaagatcagctatgactttattgtaaccagagatgcaaatcctggcagtaccagttactgccatttatccacgagctggtttgttcgtactggccagaacaacttaaattttaatttggaatacacattttgtacaaccatgcatagtcatattcatatgttttatgaacaactacacattagctatatcaaaagtttgaatccaaagttttgaactaaaaaaccggctcgatttgttatggatgttacaggtttttgaattagtgtttgattttgctcttttgtccggtaaaaaccagtaactggcagttaccggtttcttaaagggaccaatatttttttttccttcaaaactggtgtccataaccttgacagtgacttggtttaaaagagagaatatttctagtctgcctgactaaattcctctactgaaagtctgatgaaatagcttccagtggtttccatcgtcctgggtgtgtagtcctttgcaacgtccaaacgtttcaaacatgagaattactcaagaatcttgtattccaaacgtttccttaggtttttgttaagaaaaacacgctgtatttcagagactactttctgttttctcgtttgcagctagcaatctacacgatcagaacatggtcgatgacggtgctcgagaacgtccactccctggtcgggcagtcagcctcgccggaataccttcagaagctgacctacctatgctggaaccaccacaaggccgtgaggcacatagacacggtgcgggcgtacacgtttggctcccattacttcgtcgaggtggacatcgtgctgccgtcaagcatgccgctgcaagaggcgcacgacatcggcgaggccctgcaggagaaactggaacgcctgcctgagatcgagcgagcgttcgtgcacctcgactacgagttcacccatcggcccgagcacgctctgtcccatgaaaaatagccagacgcaggttgcaagttcgcaaccactggtattaagtttagcagcagcaattagtttcagaatttctggtgctcgtcaggaaacctgcgggtgtatgagattttaattctgtatactggattggcgggtgtgacagtgccaaagccgtagattgtgatttgtaactacttgttgtagactataggattcttgactgttaaatccgtcatctcgatcatctcgtgtagtacaatttatactcaaagtctagagagacatatgcctggtaattacaggctcacagccactttacattaatatacggtcttctgctccttcggctacgaatcatgagatctgtttactcggtctatatatatgctactctactgtagaatccattaatctgcacgcatgtgtgcttgtgcgagtgtggtgtttgtttgtttgtttgttctactgcttagcaatcggttgattatttcagtttccatgcatggatgcaagttaggcgggagtaacatgcatatgcataaatacatttatcacacgtatcatacttgctagtactctagaagaatgagcagttcattactccactcccgaactatgcaagcagatcataacaccagcattaatgatgctactctgttctgcttataaatggaacgagaggggaattacttgatctcatattgttgattttgttggattcgatcgagatggcagggtgccgtggccacggattcggacgaggccttgcagtggccgtggcggcaacagtgctgctgctgctgccgctgccaagcatctcctccctgcagctgcaggccgtagcttcgtcttctgctgctccggcaacgacggccacggccacggcgacggacaagagtaagctgccgttcatgcccgtcccgacggaaccattcccaccttcgccgcctcacggccaccgcctcccggttgtgccgccgcctaagcccaagtcggcgaacagggaggcagcagcagcagccgccgccttgacatctactccttgatctactccgatatcgcccttatatatgttcatatatatcatcgattgtctctttctccttgtaccaataaatcaataatatcgcgtttactgtaataaatctctctaatccgtagtggacttattcttgatcattaacgcacttatcttgcagcaaatatcgttgaagacacgcatttccgcaagaacagtaggaaaaacgtaagcacgtacgctgggccggaatgaatagatggccagtttcttacatcagatggcctggccttaggcccttagcccagtactcctacctaagtgttgcattaaaaagcctgtatagtcctactactttttttaattgaaaagaggggggggggggggggggcaatctatcattaatcggattgttcactttcagggtcgaatgcatctgtgcatggttccgccacagatctttaaaccgtgcatggttgaagagcgccgtaaagataaacggatttgttataaaactatcgccagaattttttttacagaaactttcggggtgggtcatcagatgagtgttaagatttgtgctagggcatggataaaagaatttcacaccacatgcgtgaagtgggaatagacctagggatctcatggagatggaagcctactagtcacctaccttttcatgtttgtttcataacgagttacatataattacattgcagttacacctcccttcaactgacgcattatgtcgaggggaggcatagttaaacctgagataatacagtgtggtaagaaataataacggtgtgataaatggcatgagtgcatgacaatagctacagagcatacgatgatgcatgtctagccccaaaacgattaattatgcttttttttaggacacggttaattatgcttgggcggtatataagttgcctagggcacactgggcaaaaggttgatcacgattgctatacacaagaacacatagaagcttaagtagctccagacttatttgcacaagcacttgaccacttgtaaactatgatatggattggaatcctaacaaccaggttaaaacactcacatcattagtccgtacgctgatgggctgatagatcagtcctagtggaaataaggtctatttggaagcctaacattatgacaggaagcagctgatgagaattttgaaaaactatgatttccgatttgtatttgggttcactttcatgattctacaactacaaatttttagaatctagattaaaatctggatattttttcttggagagctgtagattttaggagaagcctgctaagctcccaaacagggtcttaatcaagcagaaaatgttgcaaatgtacggagtactcctaccttaggtcctttttagtactacatcgatccatctcaaaatatagctatttctagcacaatatcttgtcccaaaataaagctattttttcgtctacctcctcctctcaaccaatcacaatcattatctttcatttactttatttctccaaccatacccatccactttctttatactcgtgtcaacctaaaaaatacttactcccttcgtcccctaatataagggattttgatattttgcttgcactgtttgaccattcgtcttatttaaaaatttttggaattattatttttttggcttactttattatccaatgtattttaagcataacttttcgttttctatatttgtagagcataacttttcgttttctatatttatacaatttttttaataaaacgagtggtcaaatagtacaaacaaaatatcaaaatctcttatattatgggacagagggagtacattttaaaacagaggaaatacgtataagcatgtgaagcacgcacgtcaaaacgtcgcgcgcggccgacagatcgaccaatcgacctaccttcctaccgatacgcggtagggcctgacaaaacaaacaccacagcgcgtacgtacgcatacgcgtacgtgtggtgcaccgcagccgacggcactagcacgcaacagtacgtacgtagacttgcacgtctacaccaaaccggcggccaccaatcgatcaccgcgcgcgcgcacgtacgtccacacacgcgcgctatacacgacctagctactgctagcttgcgctgcttcgccactctctcgacgcacgtgtgtcctcgaccccatggcgactccacgcgcggtccagtagctatagtagtactactagctactccttctatctcctaaaataaagaattttaatattttacttgtactgttttatcattcattttattttaaaatttttagaattattatttattttatttgtgacttactttattatccaaagtactttaagacgagtaatcaaacagtgctagcaaaatgacaaaatctcttatattatgagacggagggagtagtattaagagcaaatttaatagtatacccatctactgactttaaatcatctatagtcaattcatacaatagttacttataaaaatatgctacataattaatacatgatcctacctgtcatacacacatatattttgaagtccgtactatagtaattctgtagcccgctgtttttctctatactattttatctttgtcgaaatatgtttatagttgttttatagtctgctactaatgtacctgcgtatacctgtgttgtgtggccaacgcggcacgcgtctcgctctcgctctcgctccccctcggtacaactcccaagtggctgacgacgatcgctcgcccgtgcgtgtcgcgctcgcggtcgatcgagtacgtacgccaataataatgcgcgcggtgtgtacgatccggaggagagaaaaaaaacccagccagatcgcctgtactctgacgacgcgcacaatttcaccttacgtttgcatcaaggcctttgggagaagcacaactcctcgtccaggaaattatacatacatggactgcatcttttacctacaatatatataaaccatgccaaaatttattataaaaatatatttaattattaatttaataaaactaatttggtattatatttgtctataaacttagtcaaacttgaagcagtttaactttaaccaaaatcaaaaacatattataacctgaaacggagggagtagtaccaaattgatctttgtgtaccttgataactcccttaatttttgaacacacgtttaactatttcttttatttagaaaattttgataattattacttactttattgtaatttattttatcatttaaaaatacttaagcatgatatatcctacgtatatgtataaatattttgaataagatgaatgtgaaataaataacggcgtcatttacttaaaaaatcgaccgagagagatccatcgatctttttactgacagcaacaaggtagctaggcactcgaatgtgaatatatgtgtacacacgtacgtcatcttccggatgcatgcaacaccaccggctgaactagacgatggctagctgcgaatccgaatcttaattattttcggggcaaaacgtacataataacggctacattactactatacgctatgtactatgaacagctagatgtaagacagtacgaggtactacgacttgatggatatcctactgtacaagtagccccctctctcgtgggtgccatgcatgcacctagtcgtcgtctccgcctgatctcttggaaccagcagcttcctgtgaagaactactgctcttgctctccgctggttcctctccttggcccttcttgtacgtggcgaagaactcgctgttctccttctcaagctccttccacactgctcacagacagcataatcaagaaaaaatattgaaaaattctcgacgaatgagcagatatcgtcatatagaatacggagtattcatcttatattcgtatttcaaggggaaaaaaagagacatgggagtttttctccgatggccaaacaaattaactaaacgcatgcagcgtgcacaatgtaatgcattaattgatgaaagccacagcttctgcatgtgcatatgcaccgcacagttgcaatgcaagtaataaactcctaggtaaatagtacttaaaaagaaaggtactaaacatgtttagccatttatgcaaatgtggcgtgaagctataaatagcgaattaccggtggaggtgatgacgggcttgatgttggcgtgcttctccagcgtctccatgcattcctccttgttcatgttgtagcagatgcacttctcgatcagatgctgcacctgcgtgcaaattaatcagcatacatctatacattcatcagaatgaggcatacatgcatctcgcaggccacaatccagatcaagctagcagaccacgtacgccgtactaatagagacgccacaatagacgtaccaatctgatgtacgaagccggcgacgagtcgccgccgccgccgccgccgccgtcgtccatggccgcacaccacgcaccactcaccggtcgatcgatcagctcgatcaacgaccaaactctcggatcgattgaggcttgcctactcggaagatttataagcgagagagccttgcagctcgctaatggcggatcgaccggtcgacgacggcgagtagctagcgatcgatcgatggatcgatggagtgatcgaccaacgagagcgtgacaagcagcggggtggaggaggtagaaatagggggggatcgacgatcgagtggggacatgtcagcatgtggggcttgctcacgtgggtgccgcctccccattcgcggagaggcggtggcgggggattttgccgggcccacccgccgcactcaccttacccagtcccctgcttttctatgtggcctgattttgatctcgctccctgacggtcagttcgcgaggtaattaattatgcacgctcgttaatttcaggccgtccgatgcatgtggatggtgacttgctagccagaagtacattggaattggaattcaccgtgatcaataggcatacgtacatagacatgcatgactatcaccgatgtatcttccggttcaaacagtggatgtagctaacgtgtacactgcaggatgagatagtaccaaaatagtagtgacctagtagcatcaaattaacaagctgcatatactaataatcaagaagcgactccggttcggacgcccgatgggactgggagggggttaaaattgggccatgacgtcagcgtcacgcatgcgtacaaaactattttaaatttatttttctcttaaattatttatccaaatcatgacccgattgcaccattaaatttgttgcaattaaatcttcaaaacaagaccatgtgtattctgatgaaaaaaatttagcttattattgaattatttttaaatgttgcacgatgttccaccaggtatatcggaattgtttcactaagtagatcgaaaatatttcacttgtttaaatcggatgttgtttcaccttatataaaaacaatatttcagcaaatagtaaaagtatgtttcagttcactgcaacattagatctatacatagtgaaacattatgagtgcactaggtaaaacattttttgtggaacaaattataaaacaaattctcttaatagagggttcccaaaatatgtgggtgatttgttgcaatggagtattttagttcactgcaacattagatctatacatagtgaaacattgtgagtgcactatatgaaacatttttggtggaacaaaaaataaaccaaattcccttaatagagggtttccaaaatatgtggatgatttgttgcaatggaatatatggtggagatacatggtggggccaggaggagacattgcgcgtgaggagggggaagcgcccgatccggctccccccgcgccggtcgcccggcgttgagcatttacgcaataaccatataatatctttgtttttaatatatgacaccgtgacttttttgacaaacgtttgaccatttgtcttattcaaacttttttgtgcaaatataaaataatttaagttaggctttagaatatttaacgataaatcaaatcataaaaaataaatgataattttatattttttaataaaataaatggtcaaacgtatcttaaaaagttaacgacatcatgtattaaaaaattgaggaaacatatagcttcttcattgctactaatccgtacgtgaccaagcccggtacaactcctgctgatagtctccatttcaagagagaaaacgtagatgaacagctttggggacagctatgtcgtaccaacttacaggtaggagtatactgtctacgtactaaaattcttcatcgtttacccactaaagaggaatagaataagcacaatttggttgcgcttcgctgaatttcctaacaaaaccggaattacggtaagtattgcaatcattcacctgtcgaagatggcaataccgtaacattcagtaaatctatataaaaatcacaaatactcatcacatcatacactgtactactgtagcgtatgccactatgcatcgatatctataatagtaatatgtagtatatatgaggtgcaaatcgagcacacacatataaacactgtagcacgcactgttgataattaattgtccacgatttgattatacaactctccggaaaatttgggccaaatgtggccgagatttaaggttaagctgctcccggaatatgggagtgcgccaggtcagccgtgcgtgctagtcttcatctagcttgtcagtgagatcgtgagccacgtgtcctccatccattggctgcccaaattgcatcgtagtacgaattgatcggccggccatccggcggcccacgcccataccgatacagtgtaccggcacggtgcgatcaaattggtacccgttttgtctgtcttgattcagccataattttccgagcccaattttgatcgtccgtcttattcgaaactttttttaaaaaattaaaaatataagtcacgagaaaagtactatttatgttttatcatctcataataataaaaatattaattataaaaaattaaacaaaatgaacaataaaagttgggtgcaaaaactgatggttgcacttaaaatgagacggagggagtatcaaacggaccaatagcgaaatatttcctctgttccatagtaaaattaactcctttcgtttatttcaaaataaatttatttttaaagtaatcattgcatcggagtttgtgaaagtagaaaataattgtattgtgaataaataaagtgaagaataattgtattgagatttgataaagtagaggtattgtaatattttggttttatattggttatatgaaacaggtaaaaaatgaatttggatagtacctctctcttcgattccccatcgatcagaaaaactaaagacaaaagagaccaacctccctagcttcctcgatcaccgggcgcagatgcaataatcatcgaatccgtgacacgaaaagctacaaatggccaaatcatgcaaagcatggcccatctactatgctcgacggaacgccacataaaatgtgtcgccgcggcgagaaaaatatatatcgacggcgactaaagagcaaagaggacttgtcacctactgtgtgagatatttcgagctccccctatccacaacggaagatggcgagcatcacagctcgcaaaaaccgatcaaatgtggatcacaggttctcgatggattcaccagctaagacgcgcgcctcgcggtctcgagtgcaatgctgcgactgccagcgaggtgcagtgcacctggaacgtcgcaggtacgtttctgccggaattttggcgttgatgagcaaccacttgacctgatgaccacaaaagttaattttggcagggccgtgcgcgagcaacaaggcgtacgtgtgcagcctgtgtgatgccgatcgggcagggtgtcgcgttgcagggtgaattggtgtcatggcgtgcgtcatttccctcttggggcttcgacgacgttgttttcgccgtgatctgactgaaccacggcaatacgtgaggctaagcctccagtagccgagtgctgcctagtaatctctagcggtatagtgatggtcagaaattagcaaaatatatctatatcgtctattgacaaatttcagggcatttcgctctacgattcaatgaatgtaggaatgatcaagaatcgacatggaaatgtcattattatacggaagaaaaagcaggggccagcaaacagcgacgctggaacggacgcaccgatgtgcccctctgcataaaacacgtcctcaaaacctcaacgcagatgaggcgcaaagatgccttcgcatcgccgcggaaaaattttggataaacccaatcaaatagggagtataataccaaccacatttcaaagaataagatgataagcagctggttaatgaaaaaaatcgacagatgacaaacggaatctggaactaattagcatgggaaaccaaaatacacgataattcatatgcaatctactcagcaaggagtaatgtgaacaagcaatatgccgaaatcaagttttcctctagaggttggcgggagtacagagttcggattctacatttccgcataaatcaatccagtgccctaaagaagtcttcgcactttagtaccaagttatcagagatccagcggaatgactaaggacaaatacatcgtcgtacagcaagagatcttaggtgatgtatctttcctgctgctcctgaaggagacgcgccgacgatttagcatccaagtacagaccactgacttcctcaagatcggcctggtaaaggtcatgagttcaccgtgtgtaagatagtaagaataatatcacaatataagtgcaggtagcagctctaggagcgaagaggcgaagaggatgttacaatatatcctgatgaaatgtcaatacataccttgctgatcttttctctcccattagcctttgcaactacgctggcaggtgatagcagctgaatagcatgcctgcaagagattcaagatatacagtcgttcatcagtagcaatctcaattaaaaatgcttatagtagaacactgaaactggaaggtaagaccggtccactcaacatattccctttactcaacgtttcagcttaactatcttttgcaaatttgtgggcatagccaggaggaacaataacaaccaaaaagcagcagtgtggtgagcacaaagcgacctattcttttaccttttacaataacaactaagggtgtgttcgggagtgaggggtgggaaccctcaccccctagcacccaaaacgaagcagcgtttggtgcatgatcaattaagttttagctaaaataaatttgaaaaatggattaacatgatttttttaaagtaactttcacatagaaaatttttgcaaaagacataccgtttagcagtttgaaaagcgtgcgcgtggaaaacgagggaagtgagttgggaaagtggagataataactcagcctaagaatcatacctcaaagatgtctgttgtccgatctctcctaaaaatgcaagactttcttcatcgatctcaatctcttctacctgtgctctaatagcaagaatctgcaaacggcgatgagcaagaatcacacacatttctagacagaaaaagcctaactgatataagacccaaaatcaaacctggatcatctcagtgggaccgtatgtttctgttcgaataatcaccaatcgatctagaagatcaactggtataccatgcggacttgtcatatcagttcctctggacacattcacacaagtatataaaagacttgttaactttaaggagcatagtaatagacaaactgatagacgcagtattactctggtactgcaatgtgacagagtgcttcgagcggtaaatcaaaccgtttaccttacattacatattcctctatttgtcgcaagtatcacaattggtgataatgggctctccagagcacgattaagataagagaagcattcaatatctagcatgtggacctgcaattaaagttcctaacaataataagtaattaaatcaaacaacattaagacatatttctaccatatagtagaacaatagtaataaataagttatacagcatggcactgcttcacaaggacaagacactgtatgcttcacaacatataaacacaccatcattcatatttgtactttctgactccaaaattagcccactgagagcagtaaactttcaatcatacggataaaataagaagatacctcatcaatgaacagaacaccaggtacaagctctgcaattccttcatcaatatatctgttgaccacctactaaaatgcaatataaagattaaagatcatacatcgatcctggaatgttcattaaatttaatccagtttcaaagaatgggtgccgctcaatcagaaactgaaaaaccttattgatttcttgccgaagcttgtcagtgatttcagtctttcgtggcttcatcatttgccccataagggacaaaatatcttggcctccttgtggttgagcatttgcagcgtcaaggtcatgaagtgtaacatcctgtacataaatgacaggagaagttttcctatattcattaacttccatataacttaagagccataagcagaaagattgaatgcactaacactgcatatgagaacaaattttcttatacagcagtaaaagaatataatgtttgagagataatagataaaaaggcaaatcatacagcttgacctttgtcagatgtaacaataattaatcaaacctaatgactccaaggattataatacgtcttagtaagacatcaagtcatggatttgataaaatcttagtgtttgtttgttaacctaatgactccaaggattataatacgtcttagtaagacatcaagtcatggatttgataaaatcttagtgtttgtttgttaaccttatgaaattatttaccaatggaggtacaattacaaatgtagacagttaggtgaataagacaaaatcttatttatttttgtttagcagggatgtaagttcaattctccataaaggtgtcagacttggtcgtaatcccctctattcagacaaggtgtgatggccacaaaatgcaccatagctctactttcaatcttctaaacgtcgacatttgacactgtacttcaaatttattaaacacgaatacacgatacatttatttcttcgattatcaacaacattaattaatggatagcacaatgcaaagaagagttgactgtgcaaaatgtatgggcaaaaatccttaagacaaagattcatcaaattacctgcactatttcctttttcttatggacctctcctttgggaatcggaacatactcctcagcttcaagatcgtattctgtagcaaaagaatcacatctaccaactcttttcactgcaccactattagcttcaatgtatataacatcacccactgccacctgcatcccacagatagctgatgataaatatgaaacatcttgtgcagaaaatggaagtaacagaaatgaatctcagtaccgagggatctaatcagctccagtccaaagtgataagttatgagttcttacacagtagagtatctgaagtcaatcatgcaaatttctacaagtaacattctccaaagtttgtacgatatattaaatattcaacagaaggcattcttttgaataagaaacaaacaaactcaaatttcaaaacatgaaagaaatgtatttttaaagtctagcacacgacataaggatgaggatcaggaagtaaaccttttcctttattaaagcatcgtaaattgtaggatctaacttcagctgcttagtcccttttacagtcttcagacctatgattacatggctaatgctttttccatatccacttgttgtactctcagcttcttctggcgaaagttcagtaacctaaaaggcaatgaagcacagttttatattattttagaaacagacaatgggaataccgtatcagttatgaatgagtgtgaaaacgtaattcaagaacactatccttgcacaaacttaaaaaactagctaaaactatgtgcttacctctccttcataaacctctttattttcttttatacgcaagcctatagctcgacggaaattttccatcagcacctcagttttcttgacctctgaggaatacacttctgatcccaccataggacagaaggggacctgtgttatgaaataacaagacaacatatcaaccattagatacattggaacttttaccaaaactgaagtagatgtagggcatcaaacaaaaaactcataactattacagacaaaatttatcatatagttcttaggaataaaacaaacaaaatgtacaggtatccaataagttgacatcttatgccagtgatccacaataatttagcctcagaaatcttagcacaaatattttcaaggaataaggaacttttcaccaacaggcgaaaaggcactataacatattgaaccagctagcaacaaacatccaaatctcaaaaaatgctgaaaggcaaaaacatagaccataacacaagtttaattaggtgaatctaaaatctaattgaatcatcctatcaaagttcaatttagaaaatgacaaggcatggatctcaaatacctgaagctcaatataaacacctttgtggagctagatgagcccttgtgaatgcagaattacttatttacactagctaattgaagaatgaaaaaaatcaaacatttcaagaaggcttattatcaagtgtccaccagtaatcctcattgaacttgataaatgggattcatctgagcagctagatgatttaactcattcttcagtgaagagaactaggaaactgaataagacctcttaaactaagcatgtcgtatcagaggtaggaaatttatcccccgtcacacatcataattgtaagtgaaattcggacccagtttggttggtttgcaacctttcgaacctaccattttaccccaggaggatcctcaatctcttcactagcagacaagcgaaattgcaaacttctgccttggaataagcttgcagtaagcatccgttgtaaataacagtgtgtgttcactatggagcctaaatctaacatcctagtttgtagcgtcgagtacaaatctagcgcagtcctcaacggtacgaaatacagcggagaaagtgtagcattgtgcatttcagaagcaaacatttatctccatcaatccaaataccccaacaataatacagtttgtccgaggagaataagttgaagcaccaaccttactacctagctcctgagagatgccgagagcgagggccgtcttgccggtggcgggcgggccggcgaggagcagcgcgcggccggccatcttcttctggcggatcatgtcgaccaccaggccggccgcctcccgcgccgccgcctgccccacgaaccccgaagccagccctatcgccgccccattggcctgctcgatgaaaccaaaccaacaagccaaaccgtcagaaaaaagaacaaaaaaaacacggagatctacgcgaatcaccccgaggctaaaaccctaggagaaaacccccccgcgttgcacggagaagcgcggaagatgagcacgcacgtcgaggccgaggcccttgatgtgggtgtgggtggcgatgcgctgcttcttcgccgccgactgcacctcctcgatcctcatcgccgccgccgagcacgcgccgccgccgccgctgcttgtctctccgaccctctcccgccgcaacaaatttgggaacggcggggagcgctgcggggcagagcgcagctgaagaggttttatcccgatttttttatttgtgataattagttatgcctaaattaaatatttagtaattatgggatgggatttactatataggaaggacgctcttgactctagcgtccaggattggacgctgtagctatgtgcgtccaggtcgggatgttgcttgtaaaaacgtccataacctggttcgcatgcgtcatgtgtccagccaaaatggatcgcgtatttggggtctctgggtgccgaagtctacgctgttggctactagaagtcagtgagtttcctctccattcacctatcactgaaaaaaagatcggcgattgacgttttgtgtccttaattattttctgcgcccctgtatttagctattgaagtgcaaatagctttgccttcatccctttctctaacagactgtatacgttatcaattttgtcaatgtgatgcaatcatttgctctagcttgttactcctattagcgtctagaaggctgcacagaagaatacatatatgctacgggttcagcaattgtgttggctcagacgattcaaaaaaatattcaaatgatatcaccacatatcagaatacaataagttctgaccacataaaaaatgaagcgatatcctttcaatccaatcaaatgttacagcagtattttttagcagattgtgacaattaactagatagtggtatgaatggaattcactaatatttgaaagtagagcactgtaagtacagaccttgagcacacaaataattttacaaaataaatagcaatgtctagttttcggatagttttgatatattgaatgaccaaggcatccataacacatcattagcggccggtttttccaacctgcaaacaaatttatcaagatcgatcaccaatccaaacattgggcccgaggagagggaagccggtgatggcgtttcttcgcgtgccgtggcaaatggttgtggagagcaccgaagagcatccgaaccgagcaggatgaggtgcaccaggttggacgccgcccagaacagcgtccacctttggacgctcttcgaaagtgtgtccaagtctagacgctatagggaaccgcgtccatcctattttcacaaatttaatctgagatttatttatttaatttaaggatcattaattactatgaataaaaaattcggggttttatcactagtcgctgcacagtggggccagaataaaatttagtctgaattgtacgcaaaccatcactgaatgcgtattatttagtttacgtaaattgtctacagaagcggagattatgtgataaagaactaatgatcgacattgccccggacaggagagcaaacacccgcacgcttttgcacagcagatcatttcatgcttctactacgtgctactactacagactggtcgtgttattgtgttgactgttgagtgggagtcgttgagatccaaagtggagcagtttagcataagaccaactccatgtcgcctcttgattacctaaaccttaattttgacagcttaaacaagcacacctcacaaaaaaaccacacctccaaactcccaagcctcgtctacgagtcaaaactgcgcgccgagatgcaagcacaaactcgtcgtcgcatcctcgcccaatcctgcgttgcactcgcgctcctgctgaccacggtacacacggcagccggccgccggccggcgagcaacaaacccacgctcccctcccatggctccgaccagaccatgacgctctacaccaccgtagccacgccggcagaagctgccggcgttccttcgtcgcaacaccccgtcttcgccggccacggcccaatcggccaccactccggcggctggctgcgcgtcttgacgcggccgggagcgctccagcccggcgcggcggccgtcgtcgacgagaggttccacggcaagaaagagttcgggatgccactggctgggaagcttcagggagttctcgtcaccggcctggaggatgacgacgatagccgtattgtggcagtgacggccttgttttccggcgacggcgaggaggatagcatcaggttcttcggggtccatcgcgacgaccaggaagagtctcacatcgcggtggtcggagggacaggacggtacgacggcgccaccggtttcgccgttgtcagagcagctgacgcacataaagctggcagaaatgtcagctcgaactcagttcttagtttcagagtgcatttgaagtagagtagaagaggagagcttgcagagatgcataccatatgatgtaaattaagatgagaatgctcacaggtgtcaagactaaagtactgtactatgttaagcttgctgtactacaatagattggcagttgaacattagtgaactaaggaacatgattgaactgaagagcaaaaaagcgaactcgtctgaatatatttcacttgaatcaaatattcgtattacaattaggagctagatgaaaatttgaaaccaataacagctcctgatatacaaacctatacttctcacaagacttactaagattcacaatgtggacaaataattaactaattctgttctgtctcaccaagatacaaaaaaatcaagtaattctacaacatttatcgtgtatgcagtaaataacgttgtactgcgtgatccagcaggtgaagtgctactgactatatttgcagcatcatatagaatccagatgagtaaacacacattgttttgattactcatccaaaattctttgacggaagtccttcaccattaagggaagaccttccctgagagagacctttggctcccaacgtagcaggtgcttggccttggtaatatctggctttctcatgtgaggatcatcagctgtgttgggtttgaattcaattgttgccattgggtcaattgtttccttcacaacctggagaaggcaaaatgtttgtttatgcaccaattcaagaaaaaaaatctgtaaaacaaattgtgtacaaacctgtgcaagttccaacatggtgaattctcctgggtttcccaggttgaaagggccaatgtgatcaccctccatcagagccatcagtccagcaacctaaaaaataccacaaaagattttggaactttaagactttgcaataggaacataatatcctgcagtcatcgttcaccatttatctgctggagataggaggagctgaacatatgattgaaagcacaacagaattgtcgcacagagggaaaaagagtgcaaatactataagctggtgatttcctgaggctcaagaatatgtcctaatttttcaagtttttccaatgaagtccggactgaatgccttttggttaaaataagctataacagaattctgtgcataaaacacttcatttcatttaggatcacagtatgcaagtaatctgcaaaagaatgctgcctggagaacatacttgaaaagagtggacaacatctgtaactaatgagtaaacacacacacagaaagcacaataagaatactgtttattgcttaccagatcagaaacatactgaaaacttctagtttgttttccatcaccataaactgtcataggctgtctacgcaatgcctacaatgataatcatgtataaactcagaatttcatattgacagcgcaaatgtgtaaccaaaagttaataaaatagcggtacgtgttaaacgaacctgggcaacaaaattgctaaccacacggccatcatctagacacattcgagggccatatgtattgaaaatgcgagcaatgcgcacctgcataataagtcagttagcaaaagatcgtagaatagctatagttactaagatgttgaagtcacataatgctacaatacgaactacagtattgcagcaattctactctatttcatcctaagagttagtgaacaagattatatgttggacacgttaatgtaattgttactttaaccattttttcagtttcatgaataatatagactgaataaaaagtaatgaactaactaaaaaatgacaactaataaagatcatcatcgccccctcccccccaacacacacacccaccctgcaatagactgtccaaaacaaaagaaaaaaaatatctttcaggactaaatggtaaaatgaaacagatctgtcataatacctaaatccatgtaaatgaaaatattagaaccccaaaagtccgcatacaatcgtcatctcaatatgttgtaaacccagcatggaatataagtgggacatatttagattattacctcaacaccaccacctctgtgatagtccatggttaaagtctctgctgttcttttcccctcgtcataacagctcctaacacctgaacaagggagagaagtcagggcttagttaattggaggtccaaatgcaaaggactgaccagaaccaaaagattatataatgtggtaccaataggattaacatgcccccagtaagtctccttctgtggatgttcaagtggatctccataaacttcacttgtgctagttagcaagaaccttgcaccaattcgctttgccagacccaacatattcaaggttcccatgacattggtcttgtaataattgttaagaaacccagatttgataatatacagatgcaacacatgattatattgtaaatagtgaaaataacataataagttgcaaaaaaacatgattggtcaaatatccaggtaaaagacataacggttttatatttaactataaaacttcaactatatattgagttacgatagagcacataaaaagcctttttaagaaaaaaaataaatgtaccttataaaaattcaggtgatctcttttcctaattctcgtacaacagaagctggtttgtgctatatctatatggcatttcaatgaacaaactaatcgaatcctgccaaggattgttcatggaagtatgtttagaaaatgggttagaacccggcctctacatccaaaacggatgtacacagccattgttcatggacgtatggaacaactactactctctgttaaaatcctgtagataaatggcactacagtagaaccggctaccccacatttaccacctgtgcatcacaactaacaaatctatcgcgtcttcctaagatctcaacagaacaaccacttgatattgaaaaaaggaggcaaatttaggatccagggttcacttgaatccaaaccaaccaccaaaagtttcagcatacgagcttgatctggaccacttatgtgctagtttgcttcaagcatatctcccacccaccaacccaataaaaaaaaataaaggagaagatcaaatcaagtcgacatgaatgtaagcaaatcaaaggtatgtgcagatccgggacgagaaggatatgatcgtcttgatggggttgtacttgtagtgcacaggggacgcggggcacgcgaggtgatagatccggtccacctcgagcaggatgggctcgacgacatcgtggcggagcagctcgaacctggggttccggaggtggtgcgcgacgttgtccttcctcccggtgaagaagttgtccaccacgatcacgctgtccccttgctccagcagcctgtcgacgaggtggctgccaacgaacccggcccctccggtgacgacgacgcggcgcggcggcgggcggaacccggggggcacgcccgacgccgacgaggtgtgcgaggcgaaggagaagagcgggcggcggtcggggacgtgggaggacggggagagggagaagaggtaggggcggaggaggaagaaggaggaggcgatcagggcgccgaggaggacgaagaggaggcgctgctcgcggaggaggtagccgacccaggatcggggcccggggcgggacgccttggacgccttggacgccggggcgtgcgccgccgccggcgcgtgggtgggggacgacttgtggagctgcttcatggcgggagagcggcgcggcggaggaggttggtggtggtggcgtgggttgggggaaaggggggtggggggtaggagaagaaacaagccgaggtgtgcgagggtaatttggggttttcgttttgctccgcgattgttgcgaattgaccctccaacagttcgccctttgttagaaaagcaccgcatttcatgcaggaagtgaggaagaagaccctcttgtttgatggttttcatcccccccccccttttaccggttatattgtcaaataatactctcttgactatgttcgtcagggtgagattgagtgagaaaacgcatcgttttccacgcgcacgtttcctaaactattaaatggtatgttttttttaaaatttttttatgtgaaagttgctttaaaaaatcatattaatccatttttgaaatttaaaattgttaatacttaattaatcatgcgctaatagctcatctcgttttacgtatcttccctatcttctcaatccccttctccttaaactcgtcgcttgttctcgatgcaattggctgcttaaccaaccatatccttagtacattggtgatgaggcatcgtgtcaaaaaaatccaacgacaaaagcgatatagcttcaacagagttgtggttgtagcagcttaggttatttgtaaatgagagaaagatctgaactttcaaccaataccgttgaagctggatatagctaccaaagatgatagcaaaagaggatgcgccctagtggcttgctggcgttgtactttggtaaatttcggatcgtagaagtagctccataggctgtatacatattacaagagataacccgtttaaaactgtcttttctttttgttacatgtaaactacctcttaaaagcttaatgcgatgatatacttcgtgtttattatcgaaaaagggattgtgattggctgcaaatatctaaacttgtttttttttgtcaattaaccatgtgtattaatattttttttatggtcaccttgactcaaaccctgttggatggatcgccacatcactaatgcttccagacaagaattttcatataaaccatgtttgacccaatataaatagttgtatcatatatatagtagtactacatataacgaactcttctccatataactaagtactattttatcgtcatgttataatcaaagagggcaataaccatatccgtgcactaatgttgctatattattgtgctcacccaaatagccatgcttccatgaacattgatgacgagtgttacgtgcgttgatcatgtttttgctttttcttttaaaaaagtgcacgctgctttcgaaataacctctctgaaagataatacagtacagggtgccaaacgcaaatagacccgcgcaacatggaggattcgttggacgcttgacttggaagggttcagaatctctctccccatccagatctggcccacggacggcccgggcagtaggtgcactgttagattcgtgcttgcgtgcctttgagattcggatccgcgagtctgttaaaccgaggctgtcgcgcgtcatcgaacgacgacgatctgttctgaatttctgatcggagacggcgcgtccctctccctcgtggccgcctcgtcttttcgtcaaatcgaagcaatcacgcaaactgccgctccttttcctgtctccttttcaagacaaacaacaaccctttggtggttagcaaatgcacgtcaaaccttcggtttaatttagcgacaccaactccaatcaaccaatcatcatccagtctaaagtttaaccgattaccagtacaaaaatcttctgtcagcaatgtgatctgttccaagctctctgcattctgcatttctctagtgcgcaattcctgatcggaacgagttatttattcagaacaagtttcagtatatcgttttcggtaggacaaatttacagcggacaagcacagggaaactgcaatggcacatgattgacatctctcagaaagtttcaggaacactgcctgcacaatccgacctttcgtccagccaggagatgatgtcagaatagacacgctcgacatcgtcaggaagctcagccgtcagagcatgccacatcccagggtaaagcttgaaagttttgtccctgcctgatgcttcttcgaacagcagcttgctcaccgaaggatcggtcacgatgtcgtctccgccgtgtaggaccaagaacggcagtgtcacctgccaactgaaaatgttaagcagaatagcagtgtccagggagttactgcacatttgcatcagttgcatgtcgtgtgcagctcgaatcgagaaaataaacatggcatatattgaaatacgctgttctaatgatgatacatgctttttttgcttccaattaggaatagagagaaaataaaaccattttcacctcatgcaggttcttctcaatgtctaggctgaccatcaggagttcatgacaggtcttcagtgggagctttcccctgtatatgtacggatttgagcgaacctaaacgcagttaccaacaaagacaagttcagtaaactctgcctttttcttccggccatgcaactaacacatgttagctatacctgctttctcatctctggatctttacaaactttgtcaattatgtccggtgtgggtatgattctccaactaggagccacagcgcacaccattttcagagcgctgaccgcgatcgggtgaggccgcatgtcatcaggaatctgacatcataaggtagcaaacaatcatacgaaaatcgtttagaaaaagggaaatttaggaagaaaatcatgaggtggtataagtaaaaataaagaactctacaggtttcagaggaaagagagctcgttgtcgagccatttcgccatgaacggaccttgcacataggagcaagcaagacggcgccatcccagtaggttggctccttcctgtggaggagaagcgccacgcctccacccatggagatgccgtacaggaacctcttcttctccctgttctccggcttctctgaaaccagcaaccataatttcagagttttgccatccccaaactgcgtgttcgatgcgtttgatttataccgcaaatactcgtgaaaaagtttgcgcagtctgagacgatgtcaccgaagtttggtatgtagcatctctgaccagatgatctaccgtggccttcatgatcaatcccgtaaacggcatatccggctcgcaccaatcgagcggcggtgtctgaatatttgtgcagctgtcagtatttcagtcaggcaagaataaatgaataatcgaaggatggtgttgatacctctcatcgatacgccgcactctgctgcgattcctggagaagaataatcaaggtgaaaatgatcagtttgtctaatcgcttctttgaatcgatttaacacaaaagggaaatcttgttagtagcagtaccatgacagataaagatcagagcttttggttcttgtttatgcggtgtccatctgcaggtgaacagcttgttgtcacgggagttcacaaaaaactcctgtgaaaatcgagttagaaaaagggctggcgatcagaaactatgaaggctaccacggtgggatcgcttatcaggattaactaacctcgtcatacttgatattctcactgtactgatcctgccaagagaaaaaaaaaacaggttgaggaactcagcctgaatcatgatccgtgatacgcaaatgaatatctgaactggtgtagggtgttactgaacgtaccatggccatatgcgtctatgtcttcagatgctttcggaactagcaaacttaacacgattggtgcctacatcgactatgcatatgtatatatactgcttcccaaaaaaaaaaaaaaacgagcaccgcaaaatcgtgagacctgggaagttacaaccaagcaaccatgggaaatctctgcatttttctttccttaacatagccaatgacacgcaacagttttatacatgtgtgtgtaaaagagtggattccttaacatcagaagattaaaaatgcaactcgtctaaatggaactccagagaccataaaaacaacgcgcatgcagatgaatgtctgcggacgcaggtcagaatcatgtggcattatcagttgattcctcatgttgatcttatactactagtacagtatattccatctggattgcaggacagtggcatcggatccacaagtttgatgaatataatatacggtagcttcagaattaagagtttcagacatctgaagtcccatttcgcaatatccatcgtactttgagagtttttacagtccttgaagaaaggaggtaccaaatccaagtcgtccattacgcaccatccaacggttgcaaaggcttggtacctcgcggtaccgcgtctctaggaaagcaggtaccgagtaattttcaacggtggaagggcagagtagtactttcgcatatgaattggaggggaacatcgcactgcttgctatcgtcgccacaaatcgagcaacccgatgcggcagtcggcctcccggcggcggtgaccacgggggaggtggtcctatatggggatgcgggcagagtactaccctatctcctccctcgtcctcagcgctagtacagcggaggcggcggccatgggagtggacgacggtggcggagacctctcggatggtggccgttgttcctcattgtgctaagaggccgatgcagaccgaggcaccgagctgagcttcgccgccgcagcaactgttgcagttgtgcatggaagaggaggtggacgctgcccctgcatcatggtatgaagccaaggccaccagcaggcagcagctacgcgtccagggcaagacgatggagccatagttttttttttaagactggtgatggagccatgggtgaaaacaacgttctgaataattgaaatttctagttgatagataaattggcttattgaacaggaaacatgcatacatactatatctatatcaatatcaagaacttcagatgttgggtttctctcatccagatttttcaacaaggatgaacacttaggcagatttgcccaggttaaattcattggtgaagttattgtggaaacagaacatcacggagctgcaaagaaggagctccaagcaccagccagctcgagtgcaccgacggacagaggttgaagaatcggagcgagctcgacgggccggcggacaagcttgatgatttagagcgatctcgagggcggtgaattggaacgagaacagagcgggcgagagctggcggcgagggcacaggcatgaaggtcacgaaccctgcggacattcccgggggtggcctcgatgcgacggcggcggcgcggcagcctagatgtgcgacggcggcgcggcgcagatggccagcacaaacgacgtgatgcggcagatggaagaggggagaagagggcggctcagaggatgtcgctattttgttagcccaatcatacccctgctaaaccaacggttagattagattggtacctcataataactcgtacctcatagtacctcgtggtaactcttcaaggatgggaaatatgctctcgtacttatcagaaatactgttaccgtaattactatagtaataaattagtaattgactaattgtggatactttatttgatttatttacttcaagtggactgtgtggtatttttactactattttcattacagttgttcatgtgtcaagcagtagtgtcagcaggagcagaatcagtttcctcttcgaggcaagtgtcttccggcagcggaactggctgccagccggtgaagcactccagtagctccttgagcgccattgacgccggctgaacggaacaagactggtagaaatccaattcctgaatcttgaagtcccacagctcatctgccgcagcttctgaatcctgagcagtgcactcctctgcaccgttcaggaacaggtcgccttcagaccggatgaacccagttgaactctggtctctgtctgccgcctgttgcaatcaccatttcaccaatgcaaagcatttttagaagtatctaagttaaaacgttttatccaccattacgtggcgtaacataatttaggataagatactgaactagtacagggttctgaaacgaggaaaatgacctgttctatcatgtacttgaagactttcttcttctcccctgcctcgtaaatgttgcactgggatacaatctgcagcagtaatcaacttcaggttaaattcgtacaattccccgaaaaaaaaaatctcgtacaatgaagttccagcttgatctgatttttttttcaggtgtgctctctccggccaaaaaaaccaatctagtattagatgtgatactttctaaaacaacaaatcagacatacttatgtataaaaaacgtcttatttaatactaggttgggattttgggatggagggagtagttacctgtgactcgacactggcgcagacagcgtaaatgccccagcccctggtgtagttgttgtagaggtgcaccctgccgaagcggacgcgcgggtgcctctgccgcgtgccgtcgaagaggcagtggtggatggtcacccggatggcacggtcctcgacgtggccggcgctgccgccgatcagcacggccttgtcgtgcgccgagaagcggcacctggacacggtcacgtccgtgctgccccgggtgacgtcgaggaggccgtcgccgcagccgcggaggccgcaccggtcgatccacacgtgccgcgacccgggcttcaccgccacggcgtcggcgtcgtggccgcggcacccttccacctccaggttgcagacgatcacatgctcgcactcccgcagctggagccccttgccggacagtgtcacacgctgcccgcggccgtcgatggtcttgtacgacgacacgcgcagtcccgtcgagaggtggatggtgcccgacacgtcgaagacgatccatagcggctcgcgcctccggcaaccctcccggagcgacccgtccccgtcgtctggagatcgagacccatttgctacgttgttagatgcagggagatggaatatgaataggcttgtgtgtgttagtgtacgtgccctcgagggtcgtgacgtggtagacgtcgccgtggaggccgccgatggcgtggcggccgaagccctcggcctgaccggccatgacgcgcagcgaggagtccgcggtggcgtacggcatgaacacgactccctccacggatgccggtggctcgcccccgcactggccgtcgagttgaggaggctccatggctaccgactacgaggaggttttcgcgtcgctatttgttgagtcgcgcgcggggaaacgcctgctgtagtgctgtttactgctggaatttgttgcgaccgggccgtttggcccgtttccgcttttgcagcggcgcgcgcgtttcgggccggcccagacaagccgccaaccggaagtccggaagggattaacacaggtcaaacagagcgttttaggagtttgcagggtcgttgcattgcatccagcacgagctcgttactatctgcatgacgttacgagcattcgatttcaaactatcattcaatctcgatcgtgatgtttttacctcccattgcccggaaacgtcagtgcatttaagcttgtccctaacataagttttcgctgttagatcgtttaatgttcataacatcacatgagactaatcttgaatgaaaaatcagttgggaaactctccccctttgatcaatcttagctaaaaacatcacatcggaatatcctctttgcctgaaaaccctctctaatcttctaggccaaaaaggcaaaaaatcggtcatggcccttcccatttttgtactgtttgatgaaagttttaagtaatatcatcgtgcgagacatccgacagtgcgaagtttggtgtgtcgttgtcacgtaaccttccctcgtttcctcatattcctaccgccggttgcgggtcgtctttttctcgcccgtttcatgggctccctttcatgtcagcatcggattgcgtccgaacaaagtccactcaaactctcaaaggaagatcctgaatggtctccgatcgaagctgtattggctatctgcgaagtgtcattgccggctcagtggatacacacacaggacacgaatgtacaatcactaaccacgcagcaggtacgcaataaccagcgttagtttaagcaaaaaaagggtcgtcgattacgtataatttccgctcgatagagccaaaaccgaacgtgcccataatccccccgtgcgtggatttacgtgacgcgcgacagcgcaattctctcccacttccgatctcttcttccgcttggactcatcgccgtgacgtcgacgttccacgaggaaaaggacggcgtcgaagccaccgggcaacttctcactcccgctcgcgtctctgacaagtgggccccacgcctcgctttcttccccccacctcccgcccggctgatggcccaaaccccaacaaaacctcctccgcgaaagctacaatccaaagggagtcgttaccgtctcgccattgtcctcctcctcctccgcccccacctctctttcctcgtgccttcctctttcgccgccggccgtgcgcctcttaaagccgctccccgcccgaaaccctacctcgggaaccctaccgcgcggctttgacccagggataatcccactactggctactgcattcgcttatctcgctcgcgatgtcgctcgaaatccatgaaggtgagtgatgggaatgtttggacaggtttggtggagtgtgcgtgctcgaggcgctgatttggtttgtttttggttgtttgggcgcagaggagggaggaggtacggcggcggcggcggcggtgaaggtgatgacggtgtcggggagcgggaagcgggggcggtacgtgcggcaggtgacggggcggcacaacgacaccgacctgcacgtggcggcccgcggaggggacgccggggcgctgcgccgcgcgctggacgaggcggcggcggccgtggccaccggggaggggagggaggcgctggaggaggtgcggcgggccgtggcggcggagcccaacgaggccggggagacgccgctcgtcgccgcggcggagagggggcacctggaggtggtaagggagctgctcaggcacctcgacgccgagggggtcgccgcgaagaacaggtcggggtacgacgcgctgcacgtcgcggcgagagaaggccgtcatggtgagatgacacatttagagcaactgttgccatatgtttatctgctgggcaagattttgagcattgacgtatgcacggaactgggactcgatgcaaaagtctgattgatctgtaaattccaaaacttcgagatttcttatgataaaaatttatggtataacttccactgcaattagcaagtccatagagagagggagggataaattccaattaaaaacagtaacagtgtgtgtttcgtaacactaattattgctaggacctgagtttgctagatacaatattgtttctataatctttagacacaaactcatgtctaactgactaccacatattaatcggtgcttcttcttgctgatttttcccccatctgtccatgaatattagttgttcactttcctctgaggtcagtgtacttatgtaaattgttgtgattcaaaaaatatgttagcctgttatttcattgttagcatggcaacttgtaaccttgaatttctggatattgggtttgtagcagaaaactgtgcataattccataatcaaattaaaagttttggtcttttatgtgttctacacattctgaattttgaacaaacctatcactttctcatttatacatgttaacagcgaagccaatatatgcagtcgttcattttctcttcatacataggaacaactaggataatgtaactaatgtctttctccagttcagtgtatcttgatgttatcccttatgtatatagtatgcaaacctctgagcaaacatttttttcttgcagctgttgtgcaggaaatgttacttcacaataggttgcttgccaagacctttgggcctgcgaatactagtccacttatttcagcagctacgaggggtcacaccgaagttgtcaaattgttactagaactagatgattttggattggtggaaatggctaaagataatgggaaaaattccttgcattttgctgctcgacaagggcacgttgaaattgttaaagcattactcgagaaagatcctcagctagcaagaagaaatgacaagaaaggtcaaacagccttgcatatggctgtaaaaggaacaaactgtgatgtgcttagagcacttgtcgacgctgatccagcaattgtaatgctgccagacaaaaatggaaacaccgccttgcatgtagcaacaaggaaaaagcgagcagaggtaattaatcatatttctcaatgttttcattttgaataattttatgtcttcccttgtgcactggcattctttttcagttctgaaggaacatcatacagaaaacaattactaacactatggaatgtttatctttcatatgattacttcatatctagaaaactacaatgtaaaaagaacatggaactctacctgatggttatatcttgttaattgaatgatcaaatatccattaagatttactcttcttctggaaacattaatgtacagtttaaatgaaatcaaataggtgatgccatgtgttttcaccttctaagaaataccttgattagctatgttgttaccccttttagtatgggcatcatccaatcaaatttattaaaaccaagttattctcctagctaatcaaattatcttgtatgaacaaatgctttcttaggatgcgctaagtgatatttgtgcattttttggttcaccagaatagatagtcattagttccttttgtattaataaatataatctaaaataatcaaataagtcattaatttcttttttcttatcttctacagatagttgctgttctcttgcgattaccagatacccatgtcaatgcactaaccagagaccacaagactgcgtatgatatagctgaagccttgccactctgtgaggagtcttctgaaataaaggatattttatctcagcatggcgcactcagatctagggagctgaatcagcctcgagatgagctccgaaaaacagtgacagagatcaagaaagatgtccacacacagctggaacagacaagaaaaacgaacaaaaatgtgcatgggattgctaaggaactcagaaagttgcacagagaaggcatcaataatgcaacgaactctgtaactgttgttgcagtactttttgccacggtagcctttgcagccatattcactgtgcctggtggaaatgccaacaatggagttgcggttgttgttcaggcagcctcctttagaattttcttcatcttcaatgctatagctctgtttacatcattggcggtggtcgtagttcagataacggttgtcaggggagaaactaagtctgagaggaaggttgttgaggtgatcaacaagcttatgtggctggcatcagtttgcactaccatttctttcattgcctcttgctatattgtgctaggccgccatttccaatgggcagcactactagttagtttgataggtggcatcacaatggctggtgttctgggtacaatgacatactatgtggtgaaatcaaagcgcatgaggaagataagaaaaaaagagaagatgtcaagaagaagtggatctagctcctggtatgataatactgagctctcagagactgagcttaaccaagtgtatgccttgtaagagaaaaggtctcctagattcagtctctgtctctgggattgatatgtacatgaaaattccagatatacacattaacagataacatagctcacagtatttcttgatttttacaattccttcctgtatcaaccaaaccactcagaactaaatggaataccaattgtccaattgtgcaaggctccttcagctgcagaattttatggcaccaaacgagctcaacctattgtacagtgagttgcatgtttttttgtttttgattttcattctattgccaactttcatgagaaaggatttttttttcttattctttctgtgcctacttatagtttgtgatgcgctcttcagttttcataatgtaacaacagaacctgacacgttttagttccctttatgctattggtcatcttattcttacaatgttgccctttgatgtaatttttacaatactgattttatgttgtttcataaataaaattttactgtggatctaaattatgtggctgtaagtctgtaactttgcctttctattttcccggaccttttcaatcttctattgaatctataacgtttctagcaaaactagtaagggtattcctggatcttatcagtaggtttctagcaaaattacctagtgtaatgaatgaagcaatactcacctcgctacatcgtatatttacttgtggcaatgattcttctgtactttggggggggggggggggtgcttttttttttttttggaaaaaatgacccagatacataagcctaaaggtatgattggtgcagacagaaatggtctctgatatgcctgtgccctggttacactccattacaggtgtcactcactggggaaaagactgatttgcttcaccactcaccagaataacttacgattgttttgctcactaattaggaaatggacagtacaagtcagggaagcaatcctagaacactttaaattctgaaaagcacaattgtgcagcttatgtcatgcaaactacacagaccaatgtgctcataaacaatggaaaacatttggctaactatgggttagggttatatagaagcagggaggcataaagtaggccctgttacatgcgtactatcctaacacagcccaacatcatcaatgtggtcggtaactctgcttaactttggcttcaatgctgccctgccttttatcgacacacacttttagtttaaggcttatttgtcttcacttggtcatttatttaccagatgttctgttttgaagccaagaaacacaatattcccttgagtggattttttttctttcaatttatgatagactttagtaaggagtgttatatattattacccaaccttctgtatttcttaaaaaaggaaagatgatcttctgtagtttcatcactttatgcttaaatgaagaaaccaaccagttggaaatttagtacttcagaaatgaagctgatcttttccgtcatgctgcagttctcctgatgccaaatgggaatggccaaattggacgattgcctttgttttgtgctttaattggtggcgtggtatattggtatatgtccttggcatgctttgttgattgaacctcctgttcttattgcaattgcttggtcaatgacatctcttgaaaacttttttgagcactaaagatgatgctaataacatcaatggaactatagcacaatcaatccctgatatttattatgcaaattctgagaaattttgtcacatccaatggcctatatcttaatctgtcttcgaatacagatcaggatacccaggcagtcatcaagtgtgaacataaagctcttgcctccattgttttcacattttcccttctttttcatttaattttgttgccttatcatattcttccttcccttgtgattcacagctttagagttgggcattatgtgactataagcagatgtttctaataagcactacaatggattttttttatgtatatacaactagaaagggattttgtccttttggatttcatgttttaagtgtgtcggccaccagtgctgtgtatttcccaatcaaggtacttgccatagtacaggtgtgttccttggttaacttagagccatgatagttgcattcagaacccctgaaataataaatattataatacagaagtgcaaagctcaagatgcagattaaattattaataccaaggtgccagaaaagctttttgtgcataagctggactcccttgagttaatgtagtggcgcactttgcccattgttacatacataagtaaggcccctccgcccatgccgattgttaatattcaagctgcacaataagaacttcattgtcttgctttatctgggcatgcatttgaaaaaacagccttctgagagtaaatatgtgtcttgtatagtgaatatgaaagggcatgtagcctagtggttatagtgacctgagtagtaccccaaggtcctgagttcaaatctcctatggagcgaatttcagattgggttgtttgcggggctaagttccctattttcaatggccgtatatatccggttggatgtagaggccgggtaaaaaatacccttctctaaaaataaaatgtgtcttgtattgtgtttaagaaacaagcaactaagatctaatcaggaattggttgcatgtggagacagttacacacacagaaacagaataaagcgacaggtccacccaaaaagtaattggccctctttggttaattatgctccattttctcttaattgtgatgtttgtttatattacttctttttttttcttagtagcctactgcacatgcacctgcaatagggatggttatgagagaaacttttacttcagtttagtttgttgatgggaaatctgcactctggtattagacagtcattccaagtgcttacactatttggtgttaaagattagaattagaaatttgaaactatttgttcttacacaaattacacaagctacttgaatttttctgaaggacattataagatcatgtctgcaggtatctgaagatcaaaagtgtacagaattagcaaaagtgtttaaatttgtacataaacacttcatcgtccgcaaatctcaattatatcatctggatcttcagactctgcagctatccttgacgctgatgatgacatgaaacggaaacctgcatcgcttgcactctttctcaccgaggccagttgctgtgaccttttgcagtatgctattgctccctggattggattgtccatctctgagcttgcactgctgctcctcctgagcactggccccacaccagagtcagtggagcttagtatggaggaggatgaatttgatgaagagcatgacgatgatgacgctgaggatgtcttgtttgatgatgagtatcgaataatgacgctggagaaggacctcctgtggccgcactcatcttctttaagcctccctccaagtgtgacactgttgctgataggcgaggctatgtacctgttgcttctgatctggccaaatgggttcttcctccaagacttgaactgcgcattggagagctcatttgcactaggtgtaccagtcttgccatctggattgcctgctttagtggcaaatattgtcttgatataagcttttgatgccttgagcttgaggccaaggttgagatgcctgatgaacttgagcttcttggaccatggcttcttttcgcaggcggcggcctcctcagcagcaccaataccagctgatgtgcactcgtggaagtaatgctcagcattgagctctccactgacataacatgaatttgccggtgatgcattgcacgactggtatggcgttgctggggcagtgctcgcggagaggaggcccttctcagctgcactctcgaggagcttctcgaccatctggatgcgtggtggaaggtggagcggcagtagcttgcccttgtagaagagctcatcggctggtgatgccgcgggctcccacttgtcaaccggagccgacatgtggaactcgaactcccttgagttttgtggggaggctgccatggctgtgctgtagcagagcaagcttgctctggcactggcagtcaccgcctctgccgctgcaggtgagctcaggtccatgtctatgtagtcctcttcttggagtggttggtcatggctttgagggccatgtctcgccattgttgttgctaccttgtcttgtgtgtttggtgtgtgtttctggtttggttttggcagagatagtggttgtgttttaggaaggaagtggaaggagtttcggcatgctttaaagcaggatgcctgtagctaaagagtcttattaattggcttatactagtactacttatgagggacctacccttaaaccctatgatctgccttttgttagcatcctaatcctctttctgtcacggcaatatgcaatgcagtactactatggtaccagtatggtgcatatttactgtcgtgctctattattgccctattttttggctgcagtgcatttggtgattaggctattttagttgtttcgtccttcgcatgcttctcttctcatgacttaagctatatgtttgtttaaacgtgtaggtttacaaggtatccattaagagctaggccaacgaggtgcgcactttaaccaaagatttacaaactgcttggtaccttctgataatgtatggttgcaatgggaagcctcattttccttcaagcaagatagtgtagacagaggttttgtgatggttggatcgcttgatggtagccctgaattatttgtttgtggaggagtggaaggtgcaggatggttaaatcatcccggcaaaaactacctgacctgggaagacctttgaacaattggaaggtttttctggagtgaacttgcttccaaggtaaacatcttattagctcttgcttgacctttcctgttcaagtctatcattgtaaattttaaaggacgagcgcatgccctcaaaacatggatcaacatgctatttgtttatttcatcttcatgtcaacctgaggaagtgtgagagtgacatcagtggaagagctcaggccccttgtttaagttccctgtccaaactgggcgtgcgcagctagacgttgtttcttggcattttctctccctaatcttcttatctagcaaccactgtcccttcctgggctggcatccaatgtcaactttgtctctttgctgtaattattgatcactgggcgtgcattagctctcatcgagtcctttgtgcatggttaagagctactcccggcattacaaggcactttggatttattctaagtcagatatctttaagtttgactaaatctataaaagaatattaatatctacaataaaattagtttcattgaatacattttgcttgtatttttattgtgttagaaacattactatatttttctataaacttgattaaacttaaatgaggtttaacttaggacacgtacaaagtgacttataatataggaaaaagtccaaataaccccctaaactttgggtggaagtctatctagcaccctaaactttgaaaccggacattcaacccctctaaactttaccataccgtttatataaccccctaagttagttttgcatagtggtttttatctaatttgtatataagttgaatgagtttgatcacatgtcatacactttggacatatatattaaagttttgatttaaatatttcattttgctccttattagctctcactcataaacaagtcccaacctaataataggatggtctcactcacaaacaaatatattatattaattattcaaccttattcgtttaagcttccaaaatatgcaaaaccatcatctaaaaccatcttaggagataacatggatggtatggtaaagtttagggggttggatgtccgatttttaaaactcaaggtgctagacaaacttccatgtaaagtttagggaggtatttggactttttcctataatataaattggagggagtagcagatttttccatacaattctgtgcggtgattttaatagtacaattaggtttggtatatgaccgttcctttattttttataaattcaattgtattttgcatacaactttatcgaccaacttagcaccattataatttagactcactgatgaaacagtgcgtttctttttttcttttttttttctcctccacgtgataatttacgttttgaacacgatggattttttttaccctatcttaataagcacttatcctaaggtggacatggtttaagctcatgttatctcgttctgatctgagctgatatttctcttttgtttgtagaagttattcacccccttttctaatatacatatctttcttgattcttagaacataagggttaattgcccctgaagaagttctgaggtaaaagaaccttggcagctcgtggatttcggcagaggtatttgttccctatacatatctatatacaaattcgttaggttgtcatttgctatccgttaaattaaagcccttgactttatgatattcttctgaacccttctttatatctgctagtaccccaagcaccagcttgagcactaagcaacgttccacaaatggcttaaagatctaattataataacaccaggtccccagccctaatccatgacataattatatctaaactaacacccattgacaaactgcaggccaggcctgcaccttttgcaggtgatagtgctgattagaaagtggtctcaattaggttaggtgttgatcgagtgcctaacaccctactaaattccacatattggtttatatcaaaatatcgtcgtagaaaagtctgcaactctgaacagttaatcccctgaattgcaggtctaaaggtgaatgttttgcaggcactgttacttggttagtgttggttggaacttgaaaaagattcaagtttgcccccctacagattcataggcactcggaaatattatagaaacggtgaacaacccatgcaaaacttcataaccacctttcttacggacatggtgacatgattgtacctgaaaatgcatggcgcctgaggtgacagtataaaccctaaacgattaaattatggtagagttagtttttttttcctgtacagtaatctaacacgctgcatagtgttttaactgtatgtctgtttttttaaacccatgcgagggcagcgaggccagagctgccggacatttcttggtgggagtccaatattttttgccctgtaagaagagaggagggccctctgaaagttctcaaagctcgaggtgttctttgccgcttctccaaacttggaaccaagcaaaagcttctgatcttgcagcaattctggggtatctgatcatctaaaggcagaaagttcatgaagaattttgactgcttaaatctccaggtaccgatcctaatgattactccgtattacatatggcactaagcagtcatcttctctgctttaatctgcataactagattcgcactgccaaaaatgtttgaaaagaatcccagccaatgaacagtgatactcgcaagaaacaccaggttcctttcaactgtacacatttgctgtgatgtgactgaactagttgtttggaagataacctattttagacgaatggaacaaacatcctttatcaaggaaaattgcttatcttatggaaaagttgcagttgtgacgacttctttatcggaatttatgctgtgtgtgttgtacatgcacctacaacctgtttcgcactgaaggcgctagtcctgtttctgcaaatgcattgcatgtagtacaataatacatacagatgtttcagcttatgctatttattactagctccgtctcaatatatagcaatttaaaatgagatcagattcatcttaaaactacgaacctcagtggcggatccaccgtggggtctctaccccactacccgtattgtaactatgggagaccccatgaagaccccactaaaatgttctgtcatacatttattagaagagggggctataattttatatagtttgttcagacccttctgttaatctttgttggatccgcccctgacgaaccctatatccagattggtagtttagatccaacctagattactacattttaggatacattttaggatggagagtattattttgctcgtttcttttgtaaaagcctaacactgttgtagacgggctagctgtcaagatgggtgcaggagaattgatacgttgaacactgacaaaagctcatgcaaatccaagaggaaaggcaacgtggctcaagaaggccgaaatggaaaaatgcgcttgtagatcaccctccgtgcagagttccaggccttgagcgctttaaggcaaagataagaacgatgtgattgctcaagaacagcgtgatagggttgtccatgatatgatggtcagtaaacataatacgttaatcgaaagacatcttgaaccttggctccctgcgccaaggagcagaagaagaaataccatgggctgaatacctcatcaagcagttgacctgtgtgtttttctttctgacctcgatttctcgtgacactttcttcagaactgtaacctgcaagaatcgtggcctgtcagcctgagagcgttcgctctacctggccaattcctattttctggaggcccaaacaaactaaggtcgcgacttgcaagtgctattggcccagccagaagtccctgtctatcttaaccgtaagcccaaacacataatagttaatctgcaggccccgagcctctccaaccggcccaccgcaccgctttaggtacctcaagacggtataattttttattttttaattttatttattacatttttaaagtatttttttcgttttaaagttttacaaatctacatcctactgccctttgagaggacgcttttcttccgaagagccttttttatgacataacacatgcccgttagtgtgtaacggtcatgcggagggagaatggacagggactgcatgtaaaatgtgatctacgatattttgcaagcggtcaccttgtagtcctctaggactagggtggcaagggggctgtctgtaaatgactagctcagttattttgcaggtgcttcttgcagctttctgggagggtgataaggaggttgcctgaaaaatagccgatcgtgattgttagcatacgtcaaccgatgtgtgccataccataaaaacgccctttgtaagggattttttttaagaaacacccttccgcagaaaattaagggtgtagatttgtaaaactctgaaaccaaaaaatatttgagtaaatttcataaaactacagatactttgcacaatctatcacaaaactacagattttagaactagtttcacaaaactacagatttaatgtctttgtttatcacaaaattacaggtactttgaataatatatcacaaaactacagatttatgaacttgtttcacaaaagtacaggtttaatatcttcatttatcacaaaactacaaatctagtgtcccattgggacactaaatctgtagttttgtgataaatgaagacactaaatgtgtagcactgtgataaacgaatacaccaaatctatatttgtgtgaaacaagttcttaaatctgtagttttgtgatagattgtacaaagtacctgtagttttgtgataaacgaagacactaaatctgtagttttgtaaaaacaagctcttaaatccgtagttttgtgataaattgtgcaaaatatctgtagttttgtgaaatttactcaaaatattttattaaatatttcaataaataaaactcatgcatgagggaggagggagaggaagctagaaagatgaagagaggggagggaggggggggaagagttgtcctatgacatacgggatccatgtgagtctcactcgttacattagccaaaaccaatcattgtattaccgagggattaaggttg

SEQ ID NO: 9903 - DNA, 4823 bp, Oryza sativa
caatgcctgcgggcttatgatgtaataattagcactagactcttgtgtatgtgcttttggtatttcagctatgaactcgtgtgtagcagaccacttgatccagggaaatggtactgtttacacgaatgattcatgttataaaaacgggggtccacagagctggtatcagagccatacgactgtaggaaaagaccaaaaggcgccccaccccttttctaagttggccaagggaaaaattcccatttagtaatactttcgaaaataaaaacgctatgtttacaaaactcggtatgattttcatcttactcttaactattttctttacaaaataggttttactctcaactgactttgggtttttcttaaaattagatggcagatccggattcacccgctacctgggagttgagcttacctcaataagaggggtatgtcattgagctgcatcggatgttgaggcgtctgcgatactctaggttcccgttatactgagtgagacagtgtggctcagtttgggaggctcgggtcgaggttcacccccgagtcccttccgagttggactacagctttcagacacgtcaccaccgagacctgctgtcacgcccggaatttctatccaaaattctaaacgcttacatgtgtgtgaaccctcatccaggaatcagccgaggcacacaataacaaattgataatagagtacaattattactctaattaataagcgaataaaatgtcattacagaggtagatagttcctctcaatcaataaagatctaagcagcggaaaataagataaacggcgcagacgactccactccacaggcagcttgaccagggctacacctaatcctcctcaccaacagcatcactgtagaactcttcctctgatgaatgattgcaaggtgagtatatgacatactcagcaagccacgcagcaaatatgcaagtgcacaggataaacaaagaatggcatagtagggtttcatttgcataaatagcatttaataaacatttcagaatttaataaaacagttaagtaataattaaaccatattaaaccaacactatacaacataccctgttgcataggcccaaccattctgaacaaccatcccggctgcacagttctatctccaaaccaagaatataccattccaaaccaggagctaaacaaattattaccagttatagcatcttttattatgatgaggagtgtgagactaatcacgaaagacattgttagacccgcccataaccgcgggaacggctattcgaatagttttactctggccagaggtgtaccactgtacccacaagacacagccccacaacatgtcaccatgtgcctcaataccaccacggtacctcggaaaggagctgtgacagtacccctcgcacaacacaatcgaccacagcgcaccattcctggatcataatcacccccttataaacaaggcattgactccccagcgacccccgtgggcttatctccgctacttctcagtctggtgctccgcaatgaaccatgctgtacaaaaggtaaagccgttgcccacgctggcttgtggttggcacggttaatgtttcacaaccgaaactcgtgaaccggtccttaattgtcatgagcacgactctcaaaaccatgtgctcacaacccaccattatcaaattttagttggcaaataattaattaaccaatcacgattgaccatcgtgaactatcattaaaccatcattaaataatagtgagtcataagttatcccaataatgtgctaatgtttctaagcatggctaagcagtcatatctaatatctagctgaaccaatatatataaagctcaactagtcaagttataataacccaagatatcaaggaataaagtaatcaagaacaaaagggctataacaaataataggttaattccacccaatgacattcgaaaataaatgcaatagttgaatagaaacaatagctttaaacgggatcaacatgctcaaagggttgtttgggatctgtgtgacttgccttgctggccttggaactcttcaaattcttcccctgcaaaaacggactctccggaaacgtcggaatctaaacagaaaagagcaaaatcaccaaaacagcacataaacaagcatgaacagtacatgtggatatttttaacatgtagatctcaattttagaaaaaaattagagacttgaaccaactaaatccgagctaaggtgaattagttatgaatttttaaagattaaatcggattaaaacacttatattgattttaattgaattatgacgcaataatgaattatttttgaaaaggaaaaaggaaattattgcgttagcggctagggtttgcggtggaccgggcgcacggcggcggttcacgagatctaacggtcgagatcgatccatccaaaacggacggccgagatcgatcgggtctacggcggctcacggcagacggaccctgatgacatcagcggtgacgtcatctccggcgacggctcggcggctcgggcgcgcaagctcgccggcgaacgacggcgcttcggcacgaacggagggcaccaggacgatagagagcgacgcggcgaactcaccggtgaccaaagaagcggcggaggagcagcggacggcgacggcgtcgagaaaaaggcggcggcactcttcggcttgacgacggcgacggtgctccgacggttgacagcgaatgcgaaggggcggacgaggatggcgacgcgacggcgaccacgatggcgagctccccgagcgacggcgatgactggagcgacggcggcgcgcggctggagcgacggcggcgctaggctgcacgtggctagggcgctacagacgtcggcgagcgaaggcgagggtggcggcgggtagaggagacaccggggtccttttctaggggctagggcgcggcggcaaaggcccacggcggccggcgacggaaaggaaagattggggaaaaacgaatccgaatcaaactcgaatccgcctatttccaaaggaaattagacaaagtttctatagaggaaaagatagagtagatcaaggggattctttcccctctaccaatttcaccggaaacggaaaggatcggccgaattggaaagcggcggcggcggcacagcactagggtttcggccggcggcggctggaggttgacgacgaccccgacaggtgggccccacctgtcagcgaggggaacgcgcgtgcgggcgctcggcttgggccgacctgggccgagagagagaaggttttgggccgactttcggcccaaagccaaaagagacttttaaaaacctttttcaatttaaattattcatgaaatgcaattccatttattaaaattacttccttagctcaaataaatcccagaaaaaatctaggaattatagaattaagcaaagtatttaatgaaattttatctggccccattttatattggaatttattaattaaaattaaatcttctcttctaagcttttaaaataaattctaaaaattccaattaaacaacaatttatatatttggaatttttagggtgtgacacctgccagagaccgcgatgcaggatgcagcccaggaggccttcctccgactcagctctatccaccgagctgagttagcgagtaccgagtttgctcatcacccgttccgggaggagagcaactcagtttgcacagttcaggacacgccctgctgctacaacccgatggtgactcggttgtcacgatgggctgaggcagtagatgactactacgaggaggctctgttggagattgacgatcaccagagacgtgtgggagagctggagactgagttgactgacctctcagtgcagcagcttcagttggaggaggagcactaggcttggggcagtgagatagactcactgaaggcacagctccaggttcacggcgaccagttccagcagttatctgactagtacaacgatcgccgcgggatgatggatactcttgaggaccagctgagagagagtcaggagcacgtcagccagctggaggagcagcttcgagcagccacgatcagcaccacaggggcttctacttccatagcagtaggccgtgaccgctacttcttcctcaccccgccgtacccaccagcgttccacgctcttctgggagaggctagtatgctagctaccgagtcagcaccttacctactggacccgacagcgacacaaccacctgtcccggagatggtgcgcactccactgatccctacaccttctccgcagctaggttccagtttggagactccgatccaggtcgactccgagacagaggggaccgacaccgagccagagatcgagccagacatcactgatccttcagaggatgagacccctgttccccgcatcaccttccttggaggtcctcgcaccctcagcactgctcgcaagagcacacgacctccgggcaagaggcccaagccagatccagaggccactacttctgagccgtggggactcaggtttgcgtgtgccaacgaccaccctctacctgccccaggatcctgcggatggctggaggactagactgacagactccttgcagcttcgatctcgtatcagatggtttttggatagcatgcgagacacaccccccctcttacctagattgacgagtagattgatgattagtttgatgtatcttttggatgaaccttattcgactgcgtatgtacgcagtcgattgcatcatgatttatgtaccatttgtgaaactctgtgatgttatttatgatatctattgttgttgtgttataaatgagtttattccaccatgctt

SEQ ID NO: 9904 - DNA, 7619 bp, Oryza sativa
gtcgagaggttccaggacaccgatctttgaccgactggtcctgataactccgatgatgaaaaaactgatactgattgatgtaatgtgataacaatgattttgatgatgatgatggaggcacaatttgtacaatactgatgaatttatgctgtgctcggtgtttcaaacttagcttctgatttcttaaaagcttttgtcaaaccttattgagcctaaaacccgcaaaagttattaaaaagcttttagtcctcatggactaagccaaaaaatcaagcaaggcaatgataaatcaagtaagcaaattgaattgataaaaatcacactccattattattataatagtccccgactgataacttcaaggagacgcttgatgttgtcagtcaaaatagggaaatacagaagcaaaacttaagcataaaaacgacgaagatgttcgatattccaagagttgtcgataggtgtaccgtcttcacgcttgagtcgataggaacctagccgagtgacttatgagattataaatggcccttcccataaaggggataacttgtgccgatctcgtgtagtttgaacttttctcaaaaccaggtcgccgacttagaaggctcgtgatcggacgttacgattatgataacgacgcaacccttgcaggtatcgggccgtctgaattaaggctacttcgcgggcctcttccagtcgatgtagatcatccactcggtcttctccgtagcgctcctcgcgaaagttgcgaaaacgcaaagattcaaattctacctcactaggcaacattgcttctgctccataaactaggaagaatggtgactggctcgtagccgactgggggtggtgcgcaaggaccaaagtatggatggcagctgttccacccatttgccggcataaggattcagtcggtcaaaaactcgtgactttattccttggagtaccatgccgttggctcgttcaacttgcccattgctcataggatgcgctacggaagcataacaaattttgatgccgaagtcatcacaaaaatctttaaatactccaccagtgaattgagtgccattatcagtaatgatccgattaggtaccccaaaccgatacacaatgttgatgaaaaaatctctagctttatctgccgtgattgtgatgaccggtttagcttcaatccacttggagaatttgtcaatagccacaaagagatgtgtgtaaccgctgactgcctttttaaacgggccgaccatgtcaagcccccaaaccgcaaacggccaggacagcgggatggtttgcaactcttgggctggtagatgagtttgtctggcgaaaaattgacaaccttcacatgtccgcacaatcttgtcaacatcagacacagccgtaggccagaaaaaaccttgccggtaagccttgccgacaatggtgcgtgcagcagcgtgattgccacagataccagaatgtatatcctttagcaattgtctcccttcctctaaggacacacagcgttgcaggattcctgatggacttttcttgtacagctcggtctcatggataatataaagcctgctgcacctggaaatccgctcggcttcatctttatcttgagggagttcttggttggtcagaaatcgtataaggggctctctccagtcggcttcaaccatagctatgtcttgagtgtccgcggcctcaactgtttctctccttggtacggttggttcgtaaagatgttcgacgaacacgtcagaaggagccgcttcgcgtttggatccaaaatttgctagtctgtcggctgcttcgtcattgtgccgaagaacatgggtgagatcgattccatcgaacttatgctccaacttgcgtacctcttgtcgataagcgatcatattgtcgtcaaggcaggaccactctttcataacttggttaacaactaactgtgaatctccgcaaactatcaaacgccttgattcccaaagagattgtgatccgtagtccgtgaaggagcgcctcgtattctgccatgttgtgagttgcagagaaacgtatccataacacgtagctcagtctctctccagtcagggaaattaaaacaaccccggccctagtgcttgaaaatctctttgacccgttaaaatgcatagtccaatactccatcttctcctcgggcgtgtcctcttggcactcggtccactcggcgacgaagtcggctaaagcttgggacttgatcgaagttcgtggcttgaacgatatgtccaaggacatcagctctaaggcccattttgcgatccacccgtttgcttcacgattatggagtatattgccgagtggaaacgatgtaaccaccgtgaccgagtgaccttggaagtagtgagataatttcctgacggtaattagaacaccatataacagcttctgaacttggggatatctcatcttggagtcggccaaaacctcgctaatgaagtagattggtcgctggactttctgaacgtggccttcttcttcacgctcgacaaccaggaccgtgctcacaacctgagaagtcgccgatacgtacaataatagcggctcttgcgagtgtggtgaggccagaactggtggagtagtgaaaagtttcttgaagtcttcaaaggctttttgtgattcgagtccccactagaaattgtctgttttctttaaaagcttgaagaagggcatcccccactcgccgagtagcgaaacgaaccggctgagcgccgccatgcatccagtcagcttttgaacatctttctgggaactcggcggtttcatgttgaggatggcgttgactttctccgggttggcctgtatgcttctatgagacaccataaatccaagcagcttccctgacggtactccgaaggtgcatttttcagggtttagtttcatcctgaaagcgcggatgctcgcaaaggtttcttccaggtccgtgatcaaatcatccttttgcttggtcttgatgactacatcatccacataggcttcaacgttgcgaccgatttgagttgagaaacatctctgtatcatgcgttgataatttgctcccgcgtcctttaatccgaaaggcatggtgatgtagcagtaggccccaaagggcgtgatgaacaaagtcttcaagcagtcggattccttcaatcggatctgatatcccgagtagcaatccaaaaaactgagcagctcgcagcaggcggtcgagtcgactacctggtcaatgcgaggcaacccgaaaggatcattggggcaagacttgttgatgtcggtgtaatcgacacacatgcgccattgccggtcttcttccgaactaggactgggttagccagccagtcgggatgaaggacttctttgatgaagcccgtgtcgcgtcccaaaacgactctaaaatacatcctcaaaattgtgcatagaataagtaaaatccatgtgaaagcctccaacaattaaaatgtgcaaagttaaaagtcgaataaggcttggaggatttttgtatatttcctaaaagcctaaaatgcgtaaataaatttttagtggaattttcagagcacaaataataattaagaagaaataaacaaagttaaaaaggttttataaaaagaaaaaccctaaaaagtttcttttccctccccctctccctcttgggccggctcggcccacctccctccctctctctcctctcccccgtggcccaatcggccccctccccgcgcgcgcgtgccgctgacgggcaggcccgcccgccaccctcgctgacgggtggggcccacccgtcatcccctacctcccgccgctcccgccgcctcgcccgtgccctagcgccgccgccgccgcgaatcccgccgcctcccgccgtccccgcgcgcaataaagagggggaaattattccccgtgattccctccctctttccccccacttttccctctctctctccctcggattcgttcggaaagtttccccctaacttcgccggcgcatcaatggcggccggatcttccgcggccgattccccctcatccggccgctctctccccctcccaacactatataaacgctccccgtgcctcccttcaccgtttccgccactcgccgctctctctccctgtcggaatcgagctcgcgccgtcgttctctctctccgccgtcgccgccgagctccggtccgccgccgtcgtcgccccggaccctctcccgtttcggcgtcgccttcttcgggttcgccgcaacctcgccgacctcgtccacccctccgtttcgcccgccgaccgccggaacgccgccgtcctcgtcgacccgagccgcgccgccgccttcctccgctccggtcgccgttcccgtcgtcgccgtcgacccggggtgagccgtggaccgccgtttcacttcccccttccctcccctctctcgggcgccgctccgccgcgccggtggtcgccggcagcgaccatcggggcgcgggtgcgccgcctcccgtcggctgtgccggcgtggccgccttcgggcgcgccccgcggctgccatgtggggcccggccgtcagccgcccgcgccctcgggtgcggctgacacgtgggaaccacggcgccggccggcgtaagccgcgtgcacccggtccaccgtggaccgtgaggctgccgcgtgggccccactcccgtggaccctgtccgtgcgcccctcccctcggctgacgcaataaatccgattttaaattaaaatttaaatgaagaaattcgcaaatatccatttaaagagcatataaacttcaaatggccataacatggccattcgaactcggaattggaccgttcaagtctctaatttctccttaagaagtcaagaacccatttttgtgctttgtttctgcttgttatatggagtttagtagagtaaaagccgtttcttttccattggtcgtgtagacgctgcagcttcggaagatccgctcttcgtggaagttgaagccgacgtttgggaaagcgagcaaggcaagtcacatcatctttgaacatattgaatcccagtttgtaaaattatgttgatttaacttattgcattatcgctttatttaaattcccgcgttatcactgttttatttagccatgcctatttacctttgttatgaccttattattattgttattgttattatttccttgttcaccctagaataaacaaaaccccaactagtggacactctactcatgctatcactagtatgattttaggtagatgcttcgcttttaattaggtaacattaggcggttttacaactctagactttgggaatattcatatcacctggacactatggaatggtttggttattgtggaattggcttcacaccgctccttctattcaaaatccccaaaaatggttttaggctgggctcggggtgcatggttttgatagtagcacctcggccatataaggaccggtcttcgggcctctgttgcaaagcactaccgtacttccacatgtctagtgggtaaggcttagtttgtggctcagtctagttataaacaaaagtacacggatggagatggaagaagtcgggggtcgatggacatctccagggcaaatgaaggctacacgagctgcggcccggtagtcgagatgtcatggcacagggccggtgtcctgctgctaggggctcagtcctgcctgcctgtcccgggggttctggccgtaggtgggattgggtcggtactcttgtctatggctaggatgggttggaaactatgtcacgtcttccgtctgtataccgtggtggtatgtggcacgtggttacacgtgaggaagatgtgtcttgtgggtaaagatgtacacctctgatcagagtataatctattcgaatagccgcgccctcggttatgggcaagccgagcaatgtacccaagttagtgttttaattcttaaaacctgcttaacaactaaaatgtggaatggttggcctgggttggcttgggacgagctgggacccagggtcgggttgccagttcggtctgaatcatcgtaggccttgggttaaggcaggttcgtgtgggttcacggccttgataaataatattgcatagtactagaatcgtgtttgcaaaatagccctgagcaactaatgtctttaaatgctgtttactgcaaccctaaccctttatagtataactcctttgtactcccttgcatttattctgcacttgtgggtgtgtcttgttgagtacggtggttgtactcagtcttgctcaatttttcccaaacccagaagaggagttcctggaggatgaaggcttcggtgtctagctcgtgcctgccgtcaagtgcctgtggtcgtcgccctagtcttccgttgtttctcgtttgtctttgtgtgtgctgggccttcgcttcccatgtaataaattaactatttacgcttccgcttgttaaactctgaattgtatcaacttttggtgtaccttgcctcctgggacaaggattaatgcacgcacgtaaggaacgcccgttgggttatttccggtcgtgacaagttggtatagagcccccttgaccctaggacgagccgtagatcccaagccttagcagtattttcgaaataaaaatcctctgttatttgtgaaaaccctttagtctttctctgtcttgctgcttcatttatcgccaaaatctgatttttttttaaatgttgcttttctttttgtttttgtttgtagatggccggcagcgtcacccgtcgtggtttggacatgactggtttcgtcttggagctgcggggcatgtgcgttgtcctggggtatccacatggagtggactaccagggcaggccgcttccggagcaggagggtgacgatgcagagccccacgctgcttgggaggtcactgcagtgatcctcgttggctctcccgagcggacttcgctggcagtcaccgcgggtggagattctttccccgccgcttgccagagcgccgctctcctcgccatcggcactcttcaccagcgctacccggacgagttgcagcactcgccctaccgctaccaccctcgccgcggtggagcccgcgactacgccaccttccgggatgctagctcggaggatgatgctaccatcgtgcacctggcgcgcatggtggaggcatacgacgcggctcgtatcgacttccatcagatggtgcgccgtgggatggtcgagaacaacatgaagatcctggagctgcgtcaagagaacctgcagctcaagaaggacctagacgcggtggaggcgcagctgcatcagctcaagatcgcccagggagaggtctgccgccccaagcgtcgccgcgtctgccgcagcccgaagatcaccgcccgcaagagcacctccaggccctagctcgttcgtcagtccctggcgtggacttgcttcgtcgagacccctcgtgccgagcccgcgcccgtggttccccaggagggggaagcctccagcgttggtagcacggaggatgcgctgttgctcaccttccgtcctggcccgtcgcagcggtagacgagcagttagtaggcttgcgcgtgtgttctttctcgtttgtcttcttgttggagttgtgtggggcatggttataccggtgtgtggcataactgtgtcggagc

SEQ ID NO: 9905 - DNA, 1099 bp, Oryza sativa
aggggcttctactttccatagcagtagccagtgaccgctacttcttcctcaccccactgtacccacaagcgttccacgctcttctgggagaggctagtatgctagctaccgagtcagcaccttacctactgaacctgacagcgacccatccacctgtcccggagatggtgcgcactccactgatccctacaccttctccgcagataggttccagtttggagactccgatccaggtcgactccgagacagaggggaccgacaccgagccagagatcgagccagacatcactgatccttcagaggatgagacccctgttccccgcatcaccttccttggaggtcctcgcaccctcagcactgctcgcaagagcacacgacctccgggcaagaggcccaagccagatccagaggccactacttctgagccgtggggactcaggtttgcgtgtgccaacgaccaccctctacctgccccaggatcctgcggatggctggaggactagactgacagactccttgcagcttcgatctcgtatcagatggtttttggatagcatgcgagacacaccccccctcttacctagattgacgagtagattgatgattagtttgatgtatcttttggatgaaccttattcgactgcgtatgtacgcagtcgattgcatcatgatttatgtaccatttgtgaaactctgtgatgttatttatgatatctattgttgttgtgttataaatgagtttattccaccatgcttgcaaaacaaagttcacatcaaaacaatctcccctaatgggataaagccgtaaaagatagccagagaattaggatacttactcaatcaatcaacctgcacagatggcaagccgacgtcgggcaacaaccagcaatgacgaaactcagacacccgacttaaccactctggccagagttatggccacccaaactcaacttctgcaagccatcgcaaacaaccaaggcaaccgcggcggatcgagctttggagaatttatgaggaccaagccacccacattcgccacagcggaagaacctatggatgctgaagattggttaagggtcattgagaagaagctaactct

SEQ ID NO: 9906 - DNA, 3188 bp, Oryza sativa
gtttcagacaaaagggaagctcgcacctcggtatgtgggtcctttccgtatcattgctcgacgcggagaagtcgcttaccagttggagctgcccgcctccttgggcaacatgcatgatgtgttccatgtgtcgcaactcaagaaatgtcttcgagtgccatcccgagcaggccgacttagagcaaattgaagttcgcgaagacttgacctacgtggagaggccagtgaaaatcctggacaccatggagcgcaggaccaggaaccgggtaatccgtttttgcaaggtccaatggagcatccacgccgaagaagaagctacttgggagcgtgaagacgagctgaaggcagcccatcccgatctcttcgccagttcttccgaatctcggggtcgagattccgtttaaggggggtaggtttgtcgcgtcccaaaacgaccctaaaatatatcctttaaattatgcctagaataattaaaatccgtgtgaaagcctccaacaattaaaatgtgcaaagttaaaagtcaaataaggcttggaggatttttgtatatttcctaaaagcctaaaatgcgtaaataaatttcagtggaattttcagagcacaaataataattattaagaagtaaacaaagttaaaatggttttataaaaagaaaagctctaaaaagtccttttttccccctccccctcttgggccggctcggcccatctctcttcccctctctcctctccccccccgcggcccattcggcctcctccccgcacgcgtgccgctgacgggcgggcccgcctgccaccctcgctgacgggtggggcccacccgtcatccccttcctcccgccgctcccgccggcttgcccgcgccctagcgccgtcggcgacgcgaataccgccggccccgtcctccccacgtgcaatcaataggggggaaattttccctgggaaccccctcccctttccccccatttttccctctctctctccctcggattcgtttggaaactcctcccctaacctctccggcgccattaatggcggccgagtctcccgcgcccgtttccccctcctccggccggcccctctcacccccaaccctatataaaccctccccgtgcctccctccaccgttgccgccactcaccggcctctctccccgccggaatcgagctcgcgccgtcgctctctctctccgccgtcgtcgtcgagctccggtccgccgccgtcgtagccccggaccacctcccacctcggcgccgcctacttcggctttgccgcatcctcgccgacctcgtccacctcttcgtttcggtcgccgaccgccggagcaccgtcgaccccatccacccgagccgcgccgccgtcttcctacgctccggtcgccgtttccgtcgtcgccgtcgacccggggtgagccgtggaccgccgtttcgtttccccccttccctcccctctctcggccgccgctccaccgtgcctatggccgccgccggcgaccataggggcgcgggcgcaccgcctcctgccgctgcgccggcgtggtcgccttcgggcgcaccgagcggctgccgcgtggggcccggctgtcaccgcccgcgcccttaggtgcggctgacgcgtgggacccacggcgccggccggtgtgagcccgggtgcgcccggtccaccatggaccgtggggctgccgcgtgggccccactcctgtggacccggtccgcgcgcccctcccctcggctgacgcaataaatccatttttaaattaaaatttaaatgaagaaattcgcaaatattcatttaaagagcatataaacttcaaatggccataacttggccatttgaattcggaattggaccgttcaagtctctaatttttccttaagaagtcaagaacccatttttatgctttgtttcatcttgttatatggagtttattagagtaaaagccttttcttttccgttggtcgtgtagacgctgcagcttcgaaagatccgcttttcgtggaagttgaagccgacgtttgggaaagcgagcaaggcaagtaacatcattcttgaacatattgaatcccagtttatgaaattattttaatttaagattattgcattaccgctttatttaaattcccacgttatcactgttttatttagccatgcctatttacctttgtgatgaccttattattattgttattgttattaataccttgttcaccctagatcgaaacaaaaccccaactagtggatactctactcatagtatcactagtatgattttaggtagatgctacgttgtttaattaggtaacattaggtggttttacaactttagatcattgatgcaatgatctttgtgctattaaaactatttctcgagctccgaaaattcacggaaaattccggagagtgcattagggcacagaatattacaaaatattcttggccaatgatttttaaaggaaatttttaattccctcaataattcacttgatcatggcaggaccatgatcatcaccagttcagaatttactcctgaagacgcagcaaggatacccaagcgtcagagaggaagaaataccttccgtggagcacgccagctaacccgacatctcataaagtacggtccgcccagacccgaagatgatgaatcaggagaacggttttctactgatgacgatgatgatacgacccttaacagtttcaaggaaagagagttgaagttcaaagcatgtgctagatgtgggatagtcggacacactgctagtttatgcctccccacatgccgctgtggtgaatatacccattactcagatgcatgccctttaaggaaggtcacatgtttcttgtgtgaaggaatagatcatgtgcctaaggagtgaggacaaagtgtgtagaaaggatgcctgtggagtggtgttcccgctgcagttctagtcaaggcttagctcctgttgtctttctttctttccgctgcatttatgtaagacttttgtgatgtttgtaagacatggatctgaatgtcgatattgtcgtttgtgtaccccggccggttctggacggggattttaatgcacattctgcttggaattctattcgggaatttctgggcgtgacagttgcccacccaagctcttacaccagcaccagcgtcgctccgggggtttggcggagaggcagttcaagttcttggccaag

SEQ ID NO: 9907 - DNA, 2262 bp, Oryza sativa
ccgcctcatgaaggcaactaccctacccatgatttttttttatctgcggcggttcatgctctagggatctggcggcactatctcattgggaatcgctgtgaaatatatactgatcataagatttgaaatacatcttcacccagtctgatctgaaccttcggcaaaggagatggtcagaactcatcaaggatcatgatgtgggaattcactatcatcctggtaaggccaacgaggacaccgacgctctaagtcgaaagagccattgcaacactcttaacgtccgtggcatcccacccgaacttagtcaacagatggcagccctgaacctaagcatagttagtcgtggattcttggctgcgttggaagccaagcctaccttgctcgatcaaatccgcgaggctcagaagaatgatccggacatgcatggactcctcaagaatatgaaacagggtaaagccgctggtttcacagaggatgaacacggaaccctatggaacggaaatcgagtatgcgtcccagataacagagaacttaaacagctgatacttcaggaagcccacgaaagtccttattccatccaccctggcagtacgaagatgtacttagacttgaaggagaaatactggtgggttagtatgaagcgggaaattgcagagttcgtggcactttgtgatgtgtgccagcgtgtcaaggcagagcaccaacgaccggccggactcctccaacctctccaagtacctgaatggaaatgggatgaaattgggatggatttcatcaccggacttccaaagacccaaggtggatatgattctatatgggtagttgtggatcgattaaccaaggtagctcgatttattcctgtgaagaccacctatggagggaacaaactagccgagctctacttcgctaggatcgtgagtctccatggcgttcccaagaaaatcgtatctgataggggaagccaattcacctctcacttttggaagaagctccaagaagagctgggtacccgattaaacttcagcaccgcatatcacccgcagacagatgggcagaccgagcgtctaaatcagatcctagaagatatgcttcgcgcatgtgtcctagatatcgggaagacctgggataagagtctcccctatgccgagttctcctacaataacagctaccaagccagtatacaaatggcaccttatgaagcgttgtatgggtgcaaatgccggacaccgctcttgtgggaccaagttggggaaagccaagtgttcgggactgatatactgagagaagctgaagcgaaggtcagaaccattcgggataatctaaaggtggcacagtcccggcagaaaagttatgcaaataaccgtcgccgtaacctggaattcgcagtggatgattttgtgtaccttcgggtcacgccattgcgaggtgtacacaggtttcagacgaaagggaagctcgcacctcggtatgtgagtcctttccgtatcgttgcccgacgcggagaagtcgcttaccaattggagctgcccgcctccttgggcaacgtgcatgatgtgttccatgtgtcgcaactcaagaaatgccttcgagtgccatccgagcaggccgactcaaagcaaattgaagttcgcgaagacttgacctacgtggagaggccagtgaaaatcctggacaccatggagcgcaggaccaggaaccgggtaatccgtttttgcaaggtccagtggagcaaccacgccgaagaggaagctacctgggagcgtgaagacgagctgaaggcagcccatcctgatctcttcgccagttcttccgaatctcggggtcgagattccgtttaaggggggtaggtttgtcgcgtcccaaaacgactctaaaatacatcctcaaaattgtgcatagaataagtaaaatccatgtgaaagcctccaacaattaaaatgtgcaaagttaaaagtcgaataaggcttggaggatttttgtatatttcctaaaagcctaaaatgcgtaaataaattttagtggaattttcagagcacaaataataattaagaagaaataaacaaagttaaaaaggttttataaaaagaaaaaccctaaaaagtttcttttccctccccctctccctcttgggccggctcggcccacctccctccctctctctcctctcccccgcggaccaatcggccccctccccgcgcgcgcgtgccactgatgggcgggcccgcccgccaccctctctgacgggtggagcccacccatcat

SEQ ID NO: 9908 - DNA, 924 bp, Oryza sativa
ttcgggtgggatgccacggacgttaagagtgttgcaatggctctttcgacttagagcgtcggcgaccacgttggccttaccaggatgatagtgaattcccacatcatgatccttgatgagttctaaccatctcctttgccgaaggttcagatccgactgggtgaagatgtatttcaaactcttatgatcagtatatatttcacagcgattcccaatgagatagtgccgccagatttttagagcatgaaccaccgcagctaactccaaatcatgggtagggtagttgccttcatgaggccgtagctggcgtgaggcataggccaccacatgaccatcctgcatgagcacgcaccccaatccttggcgcgaagcgtcacaatacaccatgaaatccttgcgagtatccggcaagattaacactggcgaggcaaccagcttttctttgagagttttgaacgccttctcgcattgcgggctccacacaaatttctcttctttcttcaacaactgtgtcatgggtcgagcgattttggagaagttctcgatgaacctccggtagtatcctgccaaacctaagaaactgcggacttgagtgactgtcttgggttgcttccaatcagtgacggcggtcactgtttcggggtccacagcaactcctttagcagatatcacgtgccctaagaatttgacttcggacaaccagaactcacacttgctaagtttggcatacaattgatgttcccgcaactttcccaataccagacggagatggtgctgatggtcttcctcggattgtgagtatatcagaatgtcatcaatgaaaaccacaacaaacttatccaagtattccatgaacactttgttcattaagttcatgaaaaaggcaggtgcattggttaaaccgaatgacatcaccgtgaattc

SEQ ID NO: 9909 - DNA, 2143 bp, Oryza sativa
ctgatgagcggtgaatcgatctactatcacccgccaccactgtcacgtgggtctctgtggattttgatacactggtggagaaaccatctttcgtcggtcggccgatttccacaatagtcccggatgcaataaaaaccagggctaaagatgatctttagtcccggttcaaaagggtaacgggcatatttgatctttagtcccggtttgtgttaccaaccgggactaaagatcatcttagtcccggttcgaatgctgttaggtcatgtcaggccccccccccgggatctttagtcctggttggtagcaccaaccggggctaaagatgaccgggatctttagtcccggttggtaataccaaccgggactaaagtcccacccctatatatatatgtcttctccagttcttcctcctccagctgcccgaacaagctttaaaatttcttcaaaaaagaggggaggtcatgccaaaatttctattgaatttattttggtgattacatataaatcggaggtgcctaaaaggtttgcaacttcatcctccaatgtttttttttgtcatactacatttgcacctatgttttgcacacttttttttgtctccaaaatttagttgtaagttgatgagagagaaaatgtgtgtggggaagaaagaatatatagaaatttagttcatttgctaaacaaggttttataaaatagttgagaaggaaaactctagttaaataatagaaaacaaactaaaatgaaaattaaaagaagtaaaacacattaaaattagtttaaaactttacaaatagtttttaagaattatttggtgtaatattttatgatttttgtatgaataaagatatcttataattattgtatgactgtcattattgtaagaataattatttgtgtacggtttttttgactcatgtagatggatcggcaatggatgtacgctgaccggcggtccaaagagtttattgacggcgtgcactattttttgagagtggccgaagctaacaggcaaaggggttttatttgttgtccatgcaataagtgtaagaatcagaaggagtattctgcatccaggactattcatttccacttgtttgagtcggggttcatgccaagctataattgttggacatcccacggagagcaaggtgttgaaatggaagaagatgaagtggaagacgacaatattccggactttgctcagtatgttggatttgaaggaaatcaaacgggcgaggaggaaatagctgctgatggtaacgacgttgcggatgatcttggtcagatgttgcaggacgccagggaggactgcgaaagtgaaaaggaggcccataaattggacaagatgttggaggaccacagaacttcgttgtacccaggttgcgagcaggggcacaaaaagttggataccactctggagttgttgcaatggaaggcaaaaaatggggttagtgacaaggcatttggcgatttattgaaactcgtcaagaacattcttccggggggaaacaaattgcccgagacaacgtacgaggctaagaagatagtatgcccgttaggactggaagttcataagattcacgcatgtccaaacgattgtatcctatatcgcggtgaggagtatgagaacctagaagcatgccctgtttgcaaagcactacgatacaagattagacgggacgatccaggagaagttgacgggcagctaacaaagaagagaattcctgctaaggtgatgtggtatttccctataataccacggctaaggcgtttgttcaggaacaaggggaatgctagaatgttgcgattgcacgctgaagagcgtcaacaggacgggatgctgagacaccctgccgatggttcgcagtggcgaaacatcgacagaaaatttaaagaatttggaaaggacgcacgaaacatacggtttggtttgagtacggatggcatgaatccttttggagagatgagcagcggccatagcacttggcccgttacgatgtgtatctacaacctcccccctggctatgcatgaagaggaagtacataatgatgccgattattattcaaggccccaagcaacctggtaacgacatcgacgtgtacctaagaccactggtcgaagatcttaaacagttgtgga

SEQ ID NO: 9910 - DNA, 5592 bp, Oryza sativa
cattcttctcggcttttgcacgttgctcctcctgctccctcgcaatacgggcctgctcgtcttcaggggccccgaccatgaaaacttcaaagaagagtggagagtagtcgttggtgaactcggagttgttgatgctttcggtgtcgaagttgctatagccgtccgagaagctgacgctgttgataatctatgtagtcctataggatccaattgttgaatcataacgctcacctcccgagatccgatcttggactcgttgaaattgtgcataggtcaggacctagggggagggagactggtctagatccgaacgtcacagcgaggggcgacggaagtagcatggtgatctgaggatatattgctgaagtggtgcagtttctccctaattggttcgaatctgactcgaggagagcgatcttactgaagtagtcggagatgaagtcgaggtcaccgaacctgttggcttgtcctagggggaatacgaagtcgtcggctcctgaagttgatcccattgcacttgtcagtggaaaactcaacgcaacccctatctggcgcgccaaccgttgattctagaaatcgacaatgagaaaagggggtagaacatgagatctaaagtggatgagtaaagggacaagatatagacatgtttaggccttttcaatgagaagtaataccctacttctgttttggggattgtatccactgggtgttgtattgatttgacaatcaagttgtgcttattccattgagaggctccctgccctccttatataggttcggaggtcgggttacaaggagaaaaacccaaccaaatacagtataaatttccttgctggcaactttttgtgacaagtcgacaaacacgatcgcatcacctaaacgccttgcggtgatatggagtcgccaaccacctcgacctagccaaaaggccaagtcaagatggttttttgtagaaaaaaagctaaacaggctagcggagctgatttagagatcaaaatcagcctttaggccgatttagatctatatgaggataacgacccgtctcgtgggcaaatggaaggttttcgggacaaacctacaaagaggtgttgcactctcgcagcggcggcggacgattcattgcgcaaatcaacaaagatggactaaaactagggtaaagtaaaaaacatggctaaaagtaaagataaaagaaaaaaacgatacaagtagattgtgtgttcgggggttacaattgaaccggcattgtcccttgaataggggttggtcttaccctctacaggccctcctccatgtccaactcgggatagaaactaaagaaaaacccgaaacatgccttcccaaataaggaaacccaagacccgacgaaaacagactcgggctcggaccctgacggtctgactagccacatacctgcggtcagaccggagttcaggccgcggtcagaccgcccacatacctgcggtctgaccggtcttgtgaaggaaacccgtcactttccaaactttggcaatattcccctatttcgtccataggtgccaaatttgggtgtaaacattccttatacatttagataagtgtgtatgactaaaacttatggaatatgccttggagtacaagacaacacaacttgcaaagcctaatcttttacataatatacggatccggcccatcacctatctctagtcgaataagctgttcgtctaggcaatggtctatgtttacatgggaaaagtcaaaattgttaagtgtatgcaagattgttgatttgaacctagaaactcatggtgagagtagaatcccctcgtcaccatgctatcaagtagagtatgcacaaatgtttgtgctaaatctcatatgacatggtaaaattggtcacctcaaaatctgagaaggcagcgccaatgaaattatggcttagagccattgagcatgacgatgagctaaaagtccatttatgtaattagttttttatttataaaataagtttttgaaattggacgtaattgtgacatcctggcccaattaggatttggcctgtgtggctcatatgagctgtgtgcgcatgtttagtttcacctggctagtttagtaagggtggaaccaaattatagggacttgtccatccaaccatgcactcccaggttaacccttttacaagaagcgagaacagaagtgtagatggagtggtatgtgtaagtaggccctcccgttggatgggctggctacacggtcctggagggagggatgttatagtaatgtcaaaaatcgtgggtatgatttgttggatttttagctacccacttgccgaataatttggttttgctcacggattgaaatttcggaccccttggcatgcacctatctcgctcgaaatttactggtttttttaatttgtttatattgataaaaagttattcaaattcattcaaaatttgtttaattctaaatattttgatccaaaatctctgaaatatcgatgccccatagaaatgtatgaaataaaattggaaaaaaccctcgttttgccaacacgcatccctcattttttcaactatcatgtcttgagccttcaacattacatgatattgttgaaataactatcaaatgggatatcccaagaaccctattatttgatgtgcatataaacgaagatagtaatatttgagagaatattcgcaaaaagactaccatagaggagtatgtacaataatagattatggttggaagacattttcaaagaatatatcaaggtccagggaaaagtaaaagaaaaagtcagcggatcaagcaattctaaggaaatgacttgacatgttaagaagtgcctgaacggattgtgagaaagaataaagaagtgcctgaatggaatgtgagaaagaaaatttggaatatgatggacaaaacagtcaaagtcgtagcaacaagtttacagaactaaactcctttcagcggaatctcggggacgggattctctttaagggggtggatctgtaacagactcaaaatttcatggaattttttttttgcgaaatgtcttaagtcatgctcttcccgattcttctgttgaagtgatcttgccttctcttaatttcttttaacttggatttaaaactttatttgcaaagttaatcgctttcttttaaattttacaaaactttgttatttattttctttaatctttaactttggctctaaattatatttcctttgaatccattcccaaatatctctagagtacatgaattgttgatacctttcgtttggatctccacctaaatatcccccgagtccataaaatatccttttcaatccccctttgagtcaacgtacccatccttaatttaaagtttatcaatctaccaccaattctgttcctgtagaaattcccatccacatatacttccgagcccatatctatactcccaccaatatttcccctttgaaatcccgttcctccaaattatccactcaagatttcaaagtctattgtttagcttgggccaatatatccccgattgacctgactctctgttatatcccattaaccatttttgtctttggggctaaaccagtataactccctttccgttggaatttattttggatcaaccccaatctaaacctatccgtgaaaacctttgtctccttttaatcgatccaaaatattatgtggtcaagttcctattttgatcaatccaccaatttgattcctatgacttgatcacattcttgacacaagaataatattatcacaaatattggaatgattgctcttgtgctaagaaacttatttccaatcccttctattcaaaatttaacttcttttagccacaaataattcaccgagaatccataccacatattttggaggctaaaatcttagttatttaccttcatctatttttgccaccatcccaaatttatccaaagttagaagttaaattattacctttcccgtttgatttttaaatctttcgtgacaagttttacatttggtccttatttgaattcttttaaaattggagcatctttatttttatccttttcaaaatttatatctcaaaataaatatatttgattttattataaaaatattttaaactcctttttgctttaaaaaactttatattcttcttataaagttcaaaagaccctccagcgtttctcttttaaattttatctccattaaaatttatttaaaaccctccattcaaaattccttggattcaattccttgaccaagattcaaaaagtccacatccatccatccttttgttttcaactcctttaaattccattccaaatcctctatacaaaattatcaaaacttcctatttattttgggccaatttccctttcttttggcccattccctttttcttttcctccctccttcttgggctgccgacccaactgagccgaagcccagccgagccggcccacagccgagccgacttttccttctctctctctgtgggcgccaccgccgccgtcgcttgcaacaccacggcgccgccgccgcttcgccattcccaacacgccgtcgcccagccaatccgccgccgccgccttgcccagccaatccgccgccgccacctcacgccgttgacgtcatcctgcaaagcaaaccgacgtggccagccaatcaccgaacgaggccggcgtcgtttcttcctcctgcccgccaccgtcgttgtggccaagtcgccgaccgcctttgcaagcgaagttctccaccgcctctcgctgcctataaaaaggacaacgaggttccctattcctccccataaaccgagctcctagagcttggtctccctttctctcctcatgaccggccaccactacccactggccgatctcctcccccgtagcctctcttccaattcccttgcgccatcgggcttgcctcgccgaggtgaactcatttttccagtttctcctctctttccccatccgaaaccaaccaccacagccaccttcttttgttgccggagctgtgctcttgttgccgccgttccggtcatcctcctctctccctctgccttcctccaccctccccgggtgcgtgatgctccggaacacgcttagacgccgccgtcgaggccgttcaaccaccggagcaccggcgccctactccctccctctcctctgtgcccggctggaaggagaagagaagaagaagaacgggaggaagaagaagagacatatgacaagtgggccccctgcacagtaacctttttcttttatttgattttaattcaatttcaatctttagacacccatatctttccaaccacaaatccaatcccagtaagactttaacctaaattcatataatttcaaactcttcgttttgatatcaaatttcttatttttaaaattttatttaaaattctttatttaaaaaaaacctttccttatttatttatttactttctaattttaaattattttaattaacctttaaaaattattttaaatttatttgatttactttatatccctttaattttaaatttatcgtttaaaaacttttttaaaatttaattatcctttaatttctttaaatgcccttttctttattttaaaata

SEQ ID NO: 9911 - DNA, 10370 bp, Oryza sativa
ttccttcgtaaccatgtttacgtatgagtccctaatctactatgacaaatgcttagaaatgctattctagaatcatgcatactcatatttgtcaaatgctatatgctttggcaattacctttgggaaggtaattgagatgcggcatgtggagacatgagcgccacattgccatgatattgagaacatgatttgtgaaaggagaaataaactaaataactgttttcgactgggacggacggaggatttgggtggtatctggaaaaggctagtaccgtccctggtcaattaaggaccgagccatgaagttaagcatgaaacgaccctcgtacaaccgcacttctcgtatgggtatagacctagcggagtagatagccgagtggaggcagtatccctgcatagatggttcacccctgagtgaggcaggtgcgctacggtgggacagccgttgaggtagggccgagaggcgtgccctacatcggtgtcgccattggtaggactgccatgagtgtgtgagagagagaacttaacttgaaccataatttaatttaatatgtgtgtgagacttctctttcccgggagcgccagaactcctctcactgctagaaacatggacgcctagagtgcatgaggatttaagttcatggagcgggtactgccaatgcgaggttatcgaaaggctttgccgtgacgcgtctcatgtgttgggacgaggctcatgtgttgggcagttacggagtgcgggtaaagtgtacatccactgcagtgtgagtaaacccaatctattcgaatagccgtgctcgcggttattgagcaccgggacatgtattacacttggctagtctctaaattcttaacttgtgtgtgatgggttgttgcatgacgaatttttatgctgttggagccacttcctgagaagggggaaggtgggcgtcctcagaaaaccataacgattcaatggcgggaagctatccttgggatcacaatggatggtggacagaaccgtcgttgtttaaatacaaacactggtactaaaatttgatcagtcaatgctaggtcttaggtttgtgaaaagaattacaaaactggcttagcgcaaaagagccatagccatcctttgaaatgcccctttcatatgcattgttgctgtggtgacttgctgagtacggttggtactcacccttgcaaatataaaattaatcagaagcgggagatgaagcttcggaggatccctatgcctactactaggagggagatgaagatgatggcgctcagtaggtcttagtacggttgttgcctgtggcaatggcatgccgctgcctgaattccgctgccttatctattactacttttggatgtattccggaccgctcggtccgatgatttaagacaatgcctgcgggcttatgatgtaataattagcactagactcttgtgtatgtgcttttggtatttcagctatgaactcgtgtgtagcagactacttgatccagggaaatagtactgtttacacgaatgattcatgttataaaaacggtggtccacaagctggatggagctctctcacaaaattaactagagttgtggagctgggttaggcagctgcacaactacactgtagagccaactcctgtagttaaatttaggagttggagctgcaccaaacgggccctcagtatgtctgaattgctttctctaccccaattcattgttgcaacctagtagaaaatatctcagtgcttttgaagatctaaattcaattgaaaaattggactggagtaatcttgtatttgaatgattgatgaagcatatagaaaaacttgacaagtcgaaaagttttggtggctgtctaccaataggtatgtttttcaatttttttctttgtactctcatttaaactcttataacaaactgaagaaatcttctaacttgacattttataatcttgacattttgatttttagaagaccaataggtatcttctaccatgattttataagctttaaatttttaatttcatttacatgtttttagtacttaaattatagtttttttcaatgtaattcttatacaaatttactgtaatttgatttatattatttatttcaaatcttaattttttgatattaggattttacctaaacagaatatatttgatgtcacataaattccttacttttataacttttcagttcaaccaatattaaattttctgacttaaaactatgtacaaaatgggaacattctaaattcataacttattcataacagtagacagtttgtaatgttttcttgtttctttataattttcaaattatttttttgtagaattgattgtggaatctttactctaaagtttatggagacttggtgtccgagagttctacttccaaatcttttttcccaaagagatattcctcgtatcagaattcaacttttgaacaaaatgttgttccgcccaaataactcaaaccttagctcagaactttatcaactcctgaatgatcatttttgaaggtcattttttaaaagctatttatatcatttttgtactttcatgctatgttttgaaaatttttctttatttttctatagattttggatttatatcttgaagaaatggttcaagtggagattacagattcatattctctagaaggacaattgactatactagtcttactacttacatacatattactttgtaattacaaacttttgctacttgtgtaactacaattttgtgtaatctcagtttgacttgtttcatcacaaacaattgttgataaagtataattattgaacttgaaatatgatactgcagtaatagaacttattattacaactatgaatgtccatttttgtctctgaaatatacttaagtatgaattctaattcagatgatcatatgaaatttgatatgaatacaaaacatatttgattacagatctaaataccgaaattcttcagttctttttcatcttcttgcttgaattttgtacttcatcattgcagcttttgcctcccattgtcttgtccttctgagattttcttttacttggagcaacatttttcttttgttcttgtccatcctgcaattgttttgaaaatattatatttttattttgattcaatttttttaaaaaatatatattaatctaccctataattcaccaactaactcttacatccttcatacttcattcatcaaatctaacggatgaaaataatcgaatccaaccgctcctgtaaccccacgtctcccctgcctccccttctcacacggtcgcaccccctcgtctcccccgcctccccttctcacacggtcgcaccccctcgctccgagatttttgacaataagccactaaatacgcgcgcctttgcaaacttaccacccaatccgcatgccttctctaatacaccactaggaatgaaaatttcttaatttcataccactttctctccttcccgtcactttttctttttctttttcgttttctatttttctcttcttttctgggacagttttaccctggtcccacctgtcaggtaaaagagataggggaatcgagagaaggggatcgggaacggggaggcagagcgcttgcgctcctgtcctgtcgcgcgccggctgccgtgagtctgtatgctgctgccttgctgttcctcctctgctgctgtaagcaaaattttgtcgccggagagaacaaaatggcatcctgctgccctgctgttcctcttctctgagcaggatagtggcatataactgttgcatttattgctgcatgtattgtatatatgtgtatacataaactgttgctccggatgccaaaattttgacagcttgtaagcaaaattttgacagcatgtaccctaaattttggcaacattatgtaccttgcaatttgtacagcatttgacaagtcaagaaagtacccataatttggtcacagataaaaaaatggcagcatgtacccataatgcatatataaccatttgagaacaaacaagttcaataacaaacttaagaacatcatccagattacataaccatttgacaagttcagagaacaaaatgaaaccaaccagttgtgtcccatgtttcacattacaaaagcatccacaacactaaatattatatttagaaaagcattcattttttccctttctttggagtgatcttccttgcagctctagtaggcctcggaggggttgccatttgactcgatccttctccaacaacattagtcaatgccaattggcttcaatgaactgagtgttagtaaaattttaagaatcaatcataccattgaactaaagaaaaatcataccttctagtgacaggcccaggactcgcattgctggaatcattgattgcaactttttgtcttttaggtgtgctagaacccgctgcatcactagttgaacctagtggtcttccttgtttagcacgacttttcctaaaaaaatgtaaaacaagttaaatgattcataaagattaatgtacaatatgctagaagaagtaaatgtatgtggctaccttttttttcttggtaccatttaatggacattttgaggatgtttgtctatggcccatgttaagacacttcttacattgaacctgccactttcctttggtcctaggcttgcttcctttctcaaggcacccaactatcctattctttctttgcctccctacatccctcttagtgagaggcaacaacttgaaaccaatattgacttttggccattgggacttatctggaagtggatgaataacacctgcatatgccagcttatacttttccactgaatagcaaggatccaggtaatcagccattcttgggtttctagctgatattatgagagctaatgcatgtgggcatggtttgccagaaacttgccactctctacaagtgcatgtatgttctgtaagattgacagcatgcctactaatatcatgttcaggagtaatctcagtcacttctgctaggtccttattaccttgcactaccttcaagtgacccaaatctctagtcattgcattcagttgacgaactacaatagggagcataacaccatctagtttctcacctatcttcctccgtctcgcaaatagatccattgtctttgctctgatgccatctgcgagatctgcaataggatgatccttcatatccttgatctatttgttccatgactctgctagattgttggtgatgaagtcacattttatcttttctaagaacttactcctcatccaaagtaggccgtgataagtttctagatatggcttcacatctgattttgcctcatgaattttattcatgtaatactcatatctatctgtcatgtaagacctagctgcagggtacatgttcccaaacactgaaccatgaaatttcttgatgaaattctgcatcaagtgccaaaagcattctctatgctctgctgtactaaatacacttttcacaacattctccagtcccttacaagcatccgagctgattgctaagtgtggctgttttccaatggccttatgaagttgttgcataaaccaagtccaattgccagtggtctcactttgaaaaaaaccaaatgcaaccggaaacatccagttgtgtccatctatggatgtagcagaacctagctgaccattccaactcccattaagggctgtggagtctatactcaagtatggccggcaactcatacaaaacaaaaagggaataaccatgagacaactcatacagacaaaccaatatttgaaatatgacacattgtttagttagttgttaggaccctcacggatttttcattatgcatcagcctggccacgatagcccatgggcattcatcagctgtgcaaaagcccctaaacctttctttatcagacttctctgtcccaacctgaaattgtccctttatagcgtgttgcctcacagctgacctaaattcattcatgcttacatatgagcttccaacttccatcggaggatcatctctgtcatagaaaatttcagattcaccaggtattacatcattaacagcatattacaatctctgcctcgttaaggttcaaatccccttcagtatgagctgaacctggtgtaggcactgaattcctttgcctcttagcctcaagtctagcttgctcggctctcccatcctcagctctaagtccaacaaatgtatgcatttcatcttcctccatcgaaggcatagaagaaccaagttgatgttgtggaattggttctatctccaatgcatcccaatcaatagcaagttgaggaacttggttatgtggaattggagctatctctagactatcccaatcaatacaactgctgcattcttgaacatcaccttgcctgtctgtcacaacttcacccattgctacctcattgacctctgaaactaccgagttagtcatcaactgaataggcttgtcctccacatcaacaaacaaaatcaactttctatcactcttcctaacaaacaatgcatgggctacatccatattatccttaaacggtgtttcctcaccagtgcccatgtcgtagccacttatcacagcatgttggttgctgccccattttacccttactgcaagatccttttccaaactctccaatgtgcactgatgatagtccacaacccattcaagccatttacgcgccacttcaacacaagtaccatcatcaagtttagctgtaaaatgaccgaactaaacgcacacgctaaactccgcatcacatacgaacaagaaaaacgagagtaaaaaaaaattagttcgcccgctaaccaaatccgtcctaattttgttcttcagcccgttaatgcaaataatggagatgtggagagttatagcattacctagaagggagctcagatggaatcgaggagcttgccgcttgcgccatgatctcttgaaccgtgaccccctgtcccatctctatcttcaaaaccctaggtccccgagggaccggaggccggccggcggcggggcaaggaggcctgccgacggcgagccaagtaggctggccggcggcggtgggtggctgggcgatctggaggctggtggcggcgcccggtgaggaggcggcgcggcgacgggacgggagcgcacgcgctctgcctccccgttcccgatccccttctctcgatctccctatctcttttacctgacagatgggaccagtggtaaaactgtcccagaaaagaagagaaaaacagaaaacgaaaaagaaaaagaaaaagtgatgggaaggagagaaagtggtatgaaataagaaatgtgcactcctagtgatgtattagagaaggcatgcgaattgggtggtaagtttgcaaaggcgcgcgtatttagtggcttattatcaaaaatctccctcgctcccgaaatcacgccgcatcctctcttcagccaacgtcgcccacccgctcgtcaccgattccccatccacgatttctctcctctcccgcgccgcccctccgtcgtcgtcgcgtgaagtcctggccgatcccctccgtcgtcgtcgcgtgaagtcctggccgatcccctccgtcgtcgtcgcgtgaactcctcgccgatccccttcctccgtcgcgccgtcacgccgccgattcccccctcctcgtcgggcgcgccgcggggttcagtcggcgccgatccccatcccccaggtcgccgtcgccgatcctgcatctcctctgtcccgtcctcgccgatcccccgcctccctcgcgccgtcacgccgccgattctcgcctctccaagaccggtattcttgcctttttgtacaatgcaactgtgtatagacatatcctagcagggatagaagtttcagtttttttaattaatgtgtcttgtgtgagaccagtgcaaggggatccacattgttcttgattttgttttggtttcaagtttgctggtgcatgtgcatgtatatgataactattgctcctcgatgactgggtcgctgttgaaggctcagttttggcaagttttgaattcgagctcgatggccgggtccctgttgaaggctttcagttttggcaagttctgaattcgagcgaggttagtgtaattttaattattttaggtcatttcagtggtgcaagtaattcatatgtcatgggtgcaattgatttacttaatcattttagaattctgtctgcagccatagcggcctgtacttaaagaaacttgagcatgtgtaaaaaaggttaaagaggcagatgcagtgtactccttcagtgaaatagcagagtacattagagaagtgtaattttacttgatttagtgcctcgcacttaggaagtgatcaatatttcagtgctgggcatatggcacttgcttgtccttaccaccttgaccaaatctgcaaaatagagtaggaaacaaaacatacaacaaagatataaaaaaaatgcagctaagatattttacttcgtttagctgaatcaaatcaaacaaaccactcatctaatttcttctttttatctttgtttaatgcaaatactatggtaggaacccaattgtttgtttgacataagaaatcagtcatctaatttcttctttttatcttttttatgcaaatatggtatttagtaagaaatgctagagtactaatagtccctctgctcaaattgatcaaatagaactgtcaaataaattcaatatgttgttttggcgtcgttaaatggcatggttgttttataacacacagtaaatacaatgttagacacagtaaatacaatgtgtagaaattaattcgagaagctcaccatcaatgttagatacacctctgaaattagagcaataatggcagatattagatcaatgcacactataggggtcttggggtcttggggagatcgacggccccggtgtcttggggtcttgggtttggttcctaactgaatattgttgtttcaacagctttcatttttgcatcttccccagatcactgctggtcaacaggtcaacaaaaggtaacgccagttgtaaatcctgccatgactctgaatctaggactctaaaagctcccaagctttaagatttgagaaccccgtgcagaggcagtggagactgaggaggtcgccatccacaaccgacaacgacaacgcgacgccgctgccgcctcaagagccaccgctgcctatccatactcacgccaccgttcctcctgcgccgaaaggtacaggacacccttcgccacccctaccccatccctaatatgtctcctctctcccgataagtatccctgatgttgatcttatgtaaaagcatgatttatgctcaatatatatcatatgtaatttgtgctggaaattgggaatcatggatgacattttctgtatatctacatccaaagccaactgtgaacagttgtattttcctctgataagcactttcaaattcatgaatatgtaccatactgctgatttcagtatggtggggaattgatgtggctggaataagaaaaaacattctcacaccctgtgtttcttccaaaaggactatatgttcactattctaagggtgatttgtctacatgtgtatcggacgatcgctgattagtccctgccatatctaactatgtatattcataaattagtactatgtattgctatatttaagtatatatgcctatgcttctatgatcacataggactgtgtgcaatataattgctctatagtgaaattgaagggaaaggcctttatatttctgtgctgaactggaaatagataaatggcacatttgtttttaataaccattgggttgtctgaaatttagagcactgaaatgcacattgtttattgtcccttgaaagtgtaaatatatttggatcactcatgcatttatgtattcgggaccaatatatattcttaagatcattggtttagactgtatatacatgggaaatggtagcgactattgaataaaaatgtgttttggttccagtaactggatgggatagatttgttgtctacgtttggacgatatcttactgatttccagtaagatctaagcgtcggtcattttttcatttcattcctgcctctgacaataggtactgtgccgttaaagatacatgtttctattcaagttaaatcacacttatgcaattattcatggttacttacattgtctgctctgttaatctatacaacttgattgccaatggcattctctgtagtctcaagggtacatgattatgcttttcaggtcttggctaaatgcatatgaaaaaacatattgattgaactttactaaaaatattgctcgtccgggatttagtaagaatgtccctctgctcttattgatcaaatagaactgtccatatatgccttttctgatcacat

SEQ ID NO: 9912 - DNA, 21584 bp, Oryza sativa
  unsure (1)..(21584): unsure at all n locations
gcacctcatccgtccgtttccgcctctcgccgcccttcctcctcgccgaaatcaagctcgcgtcgtcgttctctctctccgccgtcgccgccgagctccggtcagccgccgtcgtcgccccggaccacctcccacataggcgccgcctccttcggcttcgccgtatcctcgccgacctcatccacccctccatttcgctcgccgaccgccggaacaccgtcgaccccgtcgacccgagccgcgccgccgccttcctccgctccggccgccttttttcgtcgtcgccgtcgacctagggtgagccgtggaccgccgcctcttttcccccttcccttcccctctctcggccgccgctccgccgtgcctatggccgccgctggcgaccataggggcgcgggcgccgcctcccgccggctgcgccggcttggccgccctcgggcgcgccgagtggctgccgcgtggggcccggctgtcagccgcccgtgccctcgggtgcggctgacgcgtgggacccacggcgccggccggtgtgagcccgggtgcacccggtccaccgtggaccgtgaggctgccgcgtgggccccacttccgtggacccggtccgcgcgccccctcccctcggctgacgcaataaaccctttttaaattaaaatttaaataaagaaattcgcaaatattcatttaaagagcatataaacttcaaatgaccataacttggccatttgaactcggaattggaccgttcaagtctctaatttttccttaagaagtcaagaacccatttttgtgctttgttcctgcttgttatatggagtttattagagtaaaagccttttcttttccgttggtcgtgtagacgctacagcttcggaagatccgctcttcgtggaggttgatgccgacgtttgggaaagcgagcaaggcaagtcacatcatccttgaacatattgaatcccagtttataaaattattttgatttaaattattgcattaccgctttatttaaatttccgcgttatcactgttttatctagccatgcctatttacctttgttatgaccttattattgttattgttattatttcgttgttcaccctagaataaacaaaaccccaactagtggacactctactcatggtaccactagtatgattttaggtagatgtttcgctaattaattaggcaacattatgtggttttataactctagactttgggaatattctcatcacctggacactatggaatggttggattattgtggaattggattcacacctccccctctattcaaaaccctcaaaatggttttaggctaggctcggggtgcatggttttgatagtagcacctcggccatataaggaccggtcttcgggcctctgttggaaagcactaccgtccttccacatgtctagtgggtaaggcttagtttgtggctcagtctggttataaacaaaagtacacggatggagatggatgaagtcggtggtcgatggacatctctaggacaaatgaaggctacacgagctgcggcccggtagtcgagatgacatggcacagggccggtgtcctgctgctaggggctcagtcctgcctacttgtcccgggggttccggccgtaggtggggttgggtcggtactcttctctatggctaggatgggttggaaactatgtcacgtcttccgtccgtataccgtggtggtatgtggcacgtggttacacgtgaggaagatgtgtattgtgggtaaagatgtacacctctgatcagagtataatctattcgaatagccgcgccctcggttatgggcaagccgagcaatgtacccaagttagttttttaattcttaaaacctgcttaataactaaaatgtggaatggttggcctgggttggcttgggacgagctgggacctagggtcgggttgccagttcggtctgaatcatcgtaggccttgggttaaggcaggttcgtgtgggttcacggccttgtttaataatattgtatagctctagaatcgtgtttacaaaatagctttgagcaactaagtgtcttttaatgctgtttactgcaaaccctaaccctttatattataacgcccttatactcccttgcatttatcctgcacttgtgggtgtgtcttgttgagtacggtggttgtactcagtcttgctcaatttttcccaaacccagaagttgatttcctggaagatgaaggctttggtgtctagctcgtgtctgccgtcaagcgcctgtggtcgtcgccctagtcttccgctgtttcccgtttgtctttgtgtgtgctgggccttcgccgcccatgtaataaattatctatttacgcttctgcttgataaactctgaaatgtatcaacttttggtgtaccttgcctcctgggacaaggaataatacacgcacgtaaggagcgcccgttgggttaattccggtcgtgacaagttggtatcagagcccccttgaccctaggacgagccgtagatcccaagccttagcaatattttcaaaataaaaatcctttcttatttgtgaaaatcctttagtctctctttgtcctgctgcttcatttatcgtcaaaatctgatctttaaaatgttgcttttctcgtttgtttgtagatggccggtagcatcaaccgtcgtggtctggacctgactggcttcgttttgaagctgcggagcatgtgcgctgtcctggggtatccacatggagtggactaccagggcaagtagctcccggagcaggagggtgacgatgcagagccccacgctgcttgggaggttactgcagtgatcctcactggctcatccgagaggacttcgttggcagtcaccgcgggtggagattccttctccgccgcttgccagaacgccgcactcctcgccatcggcactctacaccagcgctacccggacgagttgcagcacttgccctaccgctaccaccctcgtcgcggaggagcccgcgactacgccaccttccgggatgctagctcggaggatgacgctaccatcatgcacctggcgcgcatggtggaggatacgacgcggcccgtatcgacttccatcagatggtgcatcgcgggttggtcgagaacaacatgaagatcctggagctgtgttaggagaatctgcagctgaagaaggacctagacgcagtggaggcgcagcggtgtcaggtcaagatctcccagggagaggtctgtcgccccaagcgtcgccgcgtctgccgcagcctgaagatcaccgcccgcaagagtacctccaggcccgagcttgttcgtcagtccctggcgtggacctgcttcgtcgagacccctcgtgccgagcccacccccatggttcctcaggaggagggagcctctggcgttggcagcacggaggatgcgctgctgctcaccttccgccctggcccgtcgcagaagtagacgagtagttaagtaggcttgcgcgnntgtgttcttctcgntttatttttctngctagagtcgtatggggcatggttatgccggtgtgtggtataactgtcggagcctgtctttattttatttgcttaagcaacttgaaccttaatgaaccaacttaatagcagtaataaattcaagaattatggtagtcgtgggtggttagttttaattgtcagctctctctgtttgctggttctgtgtgggattttcagatggtgacgactaggagaagtgctaataccggtgatggcaaccaacccgaaggtagcaaccacaacaaccatggcagcccacctccacctcctcctccacctccaccactaccaccagacaccaacgccatcctcacccaaatcctcgcccagcaggccaacatgatggctgctttcctccaccacatccaaaatccgccacagcataatgctccaccactacccccacaacactctaaactcgccgagttcctccgcatctgtccgcctaccttctctagctccaataaccccgtggatgcgttagattggttgcatgccgtggggaaaaagttagacaccgtgaagtgcaacgatgaggagaaagtcatcttcgccgcccaccaactgcaggggcccacatctctatggtgggaccatttccaggctacgcagtcagaaggacagcatattacttgggctcgcttcaccgccgctttccggagaacccatgtgcccgccggagtcatggcccttaagaaaagggaattccaagagttgaagcaaggcaaccgctctgtgatggagtatttgcatgagtttaacaacctggcccgatacgccccggaggatgttcgtgaagatgagaagaagcaagagaagttcttggcaggaatggaccctgagctgtccgtgcgtctggtctccagggactatccggatttccagcgtttggtggacaagagcatccgtttggaagccaagcacaaggaactggagtcgcacaagcgtcgcttggcaaatttccgcaatcaacagggggctaaccaaagggtccgctacaccaacccctatccagggggatcctcctcacagcagcagcagccacgctccgcgccctgacctcaattcgtggtgcatgtcccacagccgcagcaacagcagagtcagcaagggactcgtgcgccccgtcctcctacgccagccgtgcagcctggacaaggccacagagacattcaaggtcagcagcgtctgtgcttcaactgctttcgagcctgggcactttgcggataaatgcccaaagccgaggcgccagcaaggccaagcacctccccgccccaacaacggtggtaaggatgtcattcggggtagggtgaatcacgtgactgccgagaatatgctgacaactccagacgtcatcgttggtacgttcctcattcattccatccctgctaccattttgttcgactctggagcttcccactcgtttatatatgtgccattcgtggggagaaatcggttgggggtagaaaggcttaggaaccctctgctcatcaccacccctggaggggttatgacagcaaagtattatagccctgccgttcctatagaaatccagggaattccttttccctcggatctgattcttctagacaccaagaacttggatgtgatccttgggataaattggttggctcaattccaaggagtagtggattgtgcaagacgcactgtcactctgtaccgagggccggaacaaccggttgttttctttgcacccccaacctctgtcggtagttcagaacttcatcagataggactgtcggaaatccccatcgttagagagttcggagacgtgtttccggaagaactacccggtatgccgccgaagcgagagattgagttccggatagatcttgctccaggaaccactcctctgtacaagcgaccctaccgtatggcagcaaatgaactggccgaagtcaagaaacagttggaagagttgaaagaaaaggggtatatacggccgagtacttccccctggggtgctcctgtgatttttgtggaaaagaaagacaagacaaagaggatgtgcgttgactacagagctctcaatgaagttactatcaaaaacaagtaccctcttccccggatcgatgatctgttcgatcagcttaaaggtgccactgtattctccaagattgatcttcgttccggatatcaccaattgcgtattcgtgaagaagatatcccgaagaccgcattcaccacgcgatacggactgtatgaattcacggtgatgtcgttcggtctaaccaatgctcctgccttcttcatgaacttaatgaacaaagtgttcatggaatacttggataagtttgttgtggttttcattgacgacattctggtgtactcacaattagaggaagaccatcagcagcatctccgtctggtgttgggaaagttgcgggaacatcaattgtatgccaagcttagcaagtgtgagttctggttgtccaaagtcaaattcttagggcacgtgatatctgctaaaggagttgctgtggaccccgaaacagtgaccgccgtcactgattggaagcaacccaagacagtcacccaaattcgcagcgttttgggtttggcaggatactaccggaggttcatcgagaacttctccaaaatcgctcgacccatggcacagttgttgaagaaagaagagaaatttgtgtggagcccgcaatgcgagaaggcgttccaaactctcaaggaaaagctggtttcctcgccggttttaatcttaccggatactcgcaaggacttcatggtgtactgtgacgcttcgcgccaaggattggggtgcgtgctcatgcaggaaggtcatgtggtagcctatgcctcacgccagctacggccccatgaaggcaactaccctacccatgatttggagttagccgctgtggttcatgctctaaagatctggcggcactatctcattgggaatcgctgtgaaatatatactgatcataagagtttgaaatacatcttcactcagtcggatctgaatcttcggcaaaggagatggttagaactcatcaaggattatgatgtgggaattcactatcatcctggtaaggccaacgtggtcgccaacgctctaagtcgaaaaagccactgcaacactcttggcgtccgtggcattccaccagaacttaatcaacagatggaagccctgaacctaagtatagttagtcgtggattcttagctacgctggaagccaagcctaccttgctcgatcaaatccgcgaggctcagaagaatgatccggatgtgcgtggactcctcaagaatatgaaacagggtaaagccgctggtttcacagaggatgaacacggaaccctatggaatggaaatcgggtatgcgttccagacgacagagaacttaaacagttgatacttcaggaagctcacgaaagtccttattccatccaccctggcagtacgaagatgtacttagacttgaaagagaaatactggtgggttagtatgaagcgggaaattgcagagttcgtggccctttgtgatgtgtgccagcgtgtcaaggcagagtaccaacgaccggccggacttctccaacctctccaagtaccagaatggaaatggggtgaaattgggatggatttcatcaccggacttccaaaaacccaaggcggatatgattctatatgggtagttgtggaccgacttaccaaggtagctcggtttattcctgtgaagaccacctatggagggaacaaactagccgagctctacttcgctaggatcgtgagtctccatggtgttcctaagaaaattgtatctgataggggaagccaattcacctctcacttttggaagaagctccaagaagagttgggtacccgattaaatttcagcaccgcgtatcacccgcagacagatggacagaccgagcgtctaaatcagatcctagaagatatgctccgtgcctgcgtcctagatttcgggaagaccggggataagagtctcccctatgccgagttctcctacaataacagctaccaagccagcatacaaatggcaccctatgaagcgttgtatggacgcaaatgccggacaccgctattgtgggaccaagttggggaaagccaagtgttcggaactgatatcctgagagaagctaaagctaaagtcagaaccattcgggataatctaaaggtggcacagtcctggcagaagagttatgcagataaccgacgccgtaatctggaatttgcagtggacgattttgtgtaccttcgggtcacgccattgcggggtgtacacaggttccagacgaaagggaagcttgcccctcggttcgtgggtcctttccgtatcattgctcggcgcggggaagtcgcttaccagttggagctgcccgcctccttgggcaacgtgcatgatgtgttccatgtgtcgcaactcaagaaatgtcttcgagtgccatccgagcaggccgattcagagcaaattgaagttcgcgaagacttgacctacgtggaaaggccagtgaaaatcctggacaccatggagcgcaggatcaggaaccgggtaatccgtttttgcaaggtccaatggagcaactacgctgaggaagaagctactacgctgaggaagacgagatgaaggcagcccatcccgatctcttcgtcagttcttccgaatctcggggtcgagattccgtttaagggggtaggtttgtcacgtcccaaaacgactctaaaatacatcctctaaattatgtctagaataattaaaatccgtgtgaaagcctccaaaaattaaaatgtgcaaagttaaaagtcaaataaggcttggaggatttttgtatatttcctaaaagcctaaaatgcgtaaataaattttagtggaattttcagagcacaaataataattattaagaaataaacaaagttaaaatggttttataaaaagaaaaaccctaaaggtcccctttccctccctccccctcttgggccggctcggcccatctccctccccctctctcccctctccccgcggcccactcgatctctccccgcgcgcgcgccgctgacgggcgggcccgcccaccaccctcgctgacgggtggggcccacccgtcatccccttcctcccgccgctcccgccgcctcgcccgcgccctagcgccgccgccgccgccgaatccgccgcatcccgtcatccccgcgtgcaatcaataggggggaattattccccttgattctctctccctttcccccatttttccctctctctctcgcgttcaaacgggcggacttgcccccgcaagtctcgccggcgccattgatggcggccgacatcccgcgccggtttccttccttccccggccgccctctctcgccccggctctatttaaacccaccccgcacctcctccgtccgtttccgcctctcgccgcccttcctcctcaccggaatcgagctcgcgccgtcgctctctctctccgccgtcgccgccgagctccggtccgccgccgtcgtcgccccagaccacctcccacctcggcgccgcctccttcggcttcgccgcatcctcgccgacctcatccacccctccgtttcgctcgccgaccgccggaacgccgtcgaccccgtcgacccgagccgcgccgccgccttcctccgctccggccgcctttttcgtcgtcgccgtggacctagggtgagccgtggaccgccgcctcttttcccccttcccttcccctctctcggccgccgctccgccgtgcctatggccgccgccggctgcgccggcttggctgccctcgggcgcgccgagtggctgccgcgtggggcccggccatcagccgctcgtgccctcgggtgcagctgacgcgtgggacccacggcgctggccggtgtgagcccgggtgcacccggtccaccgtggaccgtgagggtgccgcgtgggccccactcccgtggacccggtccgcgcgccccctcccctcggctgacgcaataaaccctttttaaattaaaatttaaatgaagaaattcgcaaatattcatttaaagagcatataaacttcaaatgaccataacttggccatttgaactcggaattggaccgttcaagtctctaattttttcttaagaagtcaagaacccatttttgtgctttgttcctgcttgttatacggagtttattagagtaaaagccttttcttttccgttggtcgtgtagacgctgcagcttcggaagatccgctcttcgtggaggttgaagccgacgtttgggaaagcgagcaaggcaagtcacatcatccttgaacatattgaatcccagtttataaaattattttgatttaaattattgcattaccgctttatttaaattcccgcgttatcactgttttatctagccatgcctatttacctttgttatgaccttattattgttattgttattatttccttgttcaccctagaataaacaaaaccccaactagtggacactctactcatggtaccactagtatgattttaggtagatgcttcgctgattaattaggcaacattaggtggttttataactctagactttgggaatattctcatcacctggacactatggaatggttggattattgtggaattgggttcacacctccccctctattcaaaacccccaaaatggttttaggctgggctcggggtgcatggttttgatagtagcacctcggccatataaggaccggtcttcgggcctctgttgcaaagcactaccgtacttccacatgtctagtgggtaaggcttagtttgtggctcagtctggttataaacaaaagtacacggatggagatggacgaagtcgggggtcgatggacatctataggacaaatgaaggctacacgagctgcggcccggtagtcgagatgtcatagcacagggccggtgtcctgtagctaggggctcagtcctgcctacctgtcccgggggttccggccgtaggtggggttgggtcggtactctcgtctatggctaggatgggttggaaactatgtcacgtcttccatccgtataccgtggtggtatgtggcacgtggttacacgtgaggaagatgtgtcttgtgggtaaagatgtacacctctggtcagagtataatctattcgaatagccgcgccctcggttatgggcaagccgagcaatgtaccgaagttagtgttttaattcttaaaacctgcttaacaactaaaatgtggaatggttggcctgggttggcttaggacgagctgggacccagggtcgggttgccagttcggtctgaatcatcgtaggccttgggttaaggcaggttcgtgtgggttcacggccttgtttaataatattgtatagctctagaatcgtgtttacaaaatagctttgagtacctaagtgtcttttaatgctgtttactgcaaaccctaaccctttatattataatgcccttgtactcccttgcatttatcctgcacttgtgggtgtgtcttgttgagtacggtggttgtactcagtcttgctcaatttttcccaaacccagaagtggagttcctggaagatgaaggctttggtgtctagctcgtgtctgccgtcaagcgcctgtggtcgtcgccctagtcttcctctgtttcccgtttgtctttgtgtgtgctgggccttcgccgcccatgtaataaattatctatttatgcttccgcttgataaactctgaaatgtatcaacttttggtgtaccttgcctcctgggacaaggaataatacacgcacgtaaggaacgcctgttgggttaattccggtcgtgacaatgacaataaaaatgagaggcatcggacgggtcatatatgagtacaatggcagagccgccaatggttgctaggacttctagaaagtaaaaaatgaattccaatgattgttatgttcgggtttttaggatcccaatgacaataaatagtagtcggcagataggtcgtagaggagtatagtggcagcgtttgacgggatttctaaaagttataaaaaataaaacccaatgaaacaatgaactctaaaaactataaggtctaatttttaaaggttcgggcttctaaaaagtataaaagaaacccaatgataaacatgtttgattttaaattctcaatgacaataaagaagggaggcagcgggcaagccgtaaaggagtacaatgactaagtcgctgacgttttggcagaaattctaaaaagtaaaaaatgaacctaaatgataattatgttcatttttaaaataccaatgacaataaagagaaaatacagtggacgaccgtagagaagtataatggcaatgtttgacaaaacttctagaaattatataaacgaaacccaacgggacaataaactctaaaaattataagatccagtttttaaaggttctaaggagaatgaatagaaacagcagtagatcgagcaagcaaataaagaaggatatatcataagtaagcagtagcaactggtatgacttttaaaaactataaaattagaaacacgagaatgataaggtttcgtctttcaaagtcttaaaacaacgagatagatatttaataaattttaagtaaaaacatatttaaaaatataattttgtatgggtgctagccgcgcgattgcgcgggccacccaactagttattatatactaaaagtccatgaaacttcctacaaacactctcaagccgccacttggcgctctaataaaatagagaaaatcctagatattctaagaaaaaagcaaaacatctattctttgattttcacttaaattggtgggtccaatattatacaccgttagataaaattgatcttaaaacatactaattaccgtgggtcccacctatcctcctcccgtgcattggcatgtggagtatatacgtacatacgtacatacgcttccttcccctccttttcttttcttttttcttatttttttaatttatatatttaatggatatattttttaaataatcattattttacaaataaagaatctaccatcatataatttaaacgggtgtactctttactttgtacaattattttcaaataatgcactactttaaaataaattttacacaattatatcgtatacttatcaaataaacaatatctatattaacttatttatacgtgcacttaagctgatagccccattatataaatcatcggatctactttttattacattgatctattactcttaagtaatgcactctttcaaaataaggtctacaccattatattgtctatccatattgtgtttcataaaattcacggaaatacttgccactaccctcccatctctctgcacctcatacatgcatacatgtatgcatttttgcgagttttaaaatgatttttctcataaactaattatccaatctatgatttgattacaccgttgtattcgttgtaattaaatctttacaacaagatatcacatgattatattttgatagaagaaaaacatatgtttcaatccgttaacactagttgtttcatatgtggtagcgacatgtttcaacgtatatcttcatcatgtttcataaaatttttaaatgtttcagttgctgattttttttcaccatatataatttgatgtttcactgctcaatggtcaactagtaacatttgaccaaccaattttttttggacatcagacgtcagatgggaagattccttatgattgtggagtgaaaaataaagtgcagcaacatgcacatgcacatacgctcagaggttggctgggcgtccgatatttggtgggatatcggacgtccgagccgtagcgctctccgaacatgcaaggcccagcccacagctccacacacacgggaggcaaacagaagtccaaaacgtagtccgccaaagtcgctaaccctctctctttttctctcgattcttcggaaactacggcgctagttcctctttttgcggcacagagcgacggttctttgttaccagacggctaactctcacgcagggttcaccttaccgttttagggtgggttaccgaccccccgcggtaaccgcgcggttaccgccaaaaaccgcacaaattccgcatccaaatttttgaattcaaatcacacggtatgatcgaggttaccacacggtttcagtcggttaccgcggtaagtaaacggttaccgcgatatgtgaatcagaaaataaggagaatgcaaaaaaaaaggagaaacacttaaatgtgagtataatttggggataatagctctaacaaaaaatatatggggataatagctctaacaaaaaaatatatgggagacttgaaaacttaagatgtgattatataatagaaaaattcggcatgacctttcttttctatattgtgcagttcaaatcaatccaataattcataacattataattcaacaataacaatcatcaatctcatatttgaaagcataacgatgtccacatgtagaatgaatagagtccacaataacaacagagtccacaatataatgtccacgattacagttctagtttgaatgaaaggaaataaacaaggacatgcatagctacgcgttccactgattatatgccatattgtactcctctatggacatgagcatcaagccatgtgaatgtagcaaccccgctttgtatgcctcccatctttgaccagtccatgatgatgttgtttgccactgagcgtacaattgagcataccactgaggctcttgccattcatacacccatgtaggcgcaggataatcagaagcttgcggacggttatacacatacgttggatagccactttcaatgctagaggcactgaatgagctggagctatcctgttgtatgtcaacatgttgttgctgttgttggcctctcgatgcaatggtagttcgttgagagcttggagcaccatgatcgtggtcctgagtagcatgagtaaagtcagcctcacctgcaaatgagaaagttgcaagtaaattaactagtactgaattggatggtgaaggttgaaatagcaattaaattatatcacaccagtgaattgaatggggctgtggtgatctaactgttgggtgtgacccctaggaggcacatcagtagttccttggcctccttgaccatcgtcgtctccgtcatcggtttcagttcttgaactactatcattagactcttggtagtctgggcttccttgagtctcttcatcgctatcaacattagtcgatcgtagacctttgccctttgtctttttagatggacgtgcttttggtggctttcgagtcttcctttttccaatatgagtgtcacctacattcttatcagcccactcaacaaaactagaagctcccgtggtcctgtgcaggtcatccaagtccactaggtcggttacaagtggactaggcaagggggcgtcactctcatttgaatcttcatctagttcagggcaagcattcgaccgagcagtgtccatccatttcttgatctgattgttagtttcgtagaatgagaggtccgctaatctttgaaggggatcgtcgtcctccgtcctaacttgggcatttgctcgccgaattcgaaggcgaaggttgtagttcacataaactagcttgttgagcttcttgtgggtaagtctattacgaaccttggtatgtacgaaagcgaatgtgctccaattccgttcacatccacttgaagagcaacattgaccaaccaaacgcaacgcaagcttcttcaaattcggcgtgtctgaggcgaacatagaccaccattgtgctgcaattgccgagtaacatgtcattttataatattgaatacatcaagatcgattggacatatcatagttccatgattagaaacataccaggagacgttttcccatctatggccatctttcttgctagtgcccttccaaattcgcccgtcttacgtcgatacatctcaacctccagcaaagcggcggcggctgtatcgatgtccgtcatccactcgaatgcctgtcggaggtcttggaagacagtggcacttggatagtacgcatagtgcgtcctagggttcaatgcggcagctacaaaacatgtcataggttaagtacgagttacacaatacgacatgtggattatgttatgaccaatacttactggcattgatcagagtttcattggttaggtcgtgcatccttctgttaacaatctccatgtatgcttcaaacttgtccctttgattcgcaaaaatactgccgtactccattttgagcaactgatatctcagaagtacctcactcaaattggggttcttgtcctcgtcagcaaaccgaaggaatgagtacataggttggacagaattcactactgcctctaagttctcccaccaagatatgctagatagacatgcgtgtgcatatctaccttccgttgtcccgctgaatttgctttgcatgaagtcagaggaagccatccattgcatgaaaagatctcgcttcctaaggaaactctggaggaacatgtagttcgtcccgaaccttgtaacattccacttaaccagttcaccacctatagctgtgaccatcatagcatgcaacttgttatgattgtatagccatctgcaaatttttctaccacttgcaatcaccatttcgtggtttggcattttcccaacatccttaagcatcaagttgactgtgtgtgccacacaaggttgccacacaattctttggtattcttgccgaagtagtctgcacgccttcttatagttagacccattgtcagtgataatttgaacaacatgatcagggctgtaacgtcccgccttcccccaggccgggcccgcttacatctgatagctttcatactgtaggataagccaaatggtcaaaccttaaggacaaatcttccgaaaacataatttgtgaaaattttcctttctttcttatctagaattctttgcaaatcgttttgtcgttcttcccccttcctctttcaacttgagtagtcgttaatcttgatggagaaactcgaagacgtcgatgttgtcaacttctgcaagtcaagtggatcgaggaataagaagatgatagtcgaatcttaagtgttcagatagagtgaagtttggaacctatcttagaacctatgccgccaaagtgtctttgaagaatagttagtagggtagaacgcttgttgtttgctttgtgtgtaggtatggttgcattcccatcattggagtagttcattgatgagtgtgtaactatactaggttgcttgcttaatcaacttgaacaatataatggtctacacacatcagatcagtgttaacctggttaaggtcttgtctttagtgtaacccctctccttctaccttttctaatctgcatcagaatggtgggatcatttccggatgaacagagcagaacgacaaccaatcacttgggaagagtttaccgaaggattcaagaagacacgtacctgtaggagttgttgctttgaagaagcgtgagtttagggctttgaagcaaaaggatcgtaccgtggcagagtatcttcatgagttcaatcgtctggctcgctatgctccagaagatgtgcgtactgacgaggaaaggcaagagaaattcttggaaggtccgaaggatgaactgtcagttatgttgatctctcatgactatgaggattttcaggagttggttgataaagcaattcgactggaagacaagaagaacaagatggataaccgtaaaaggaaaatgactgtatcccaggaggcacaaggtagtagccagaggcagcgtatcaagccactccaaattggtgaatctttttctgcaggtcaagaacagtcacaacagttgggcatcagtggtgagatcaactcagatactaatgcaagcaatgaagacaatgatgagcaagctactcaatcagtgtcatttcagcaggatcagtctcaagaagataacagtaatggaagggagcatcgggtgtgtttcaattgttatgagccaggtcacttcgtaaaagagtgtccgaagccgaagcgtcaacagccacaaggccaagtcaacaacattgtcctcacaggagcaaatgcagtgccggttgcgtctcaagggatacagctcagccatcagttccaaagcagcagtagctttctttaaaaccttagaataattattggagttgtggaataaaagatagactgtagtttacctatgcctttttctttctagccgttccgaatctcgggacgagattctttgtaaggggggtagatttgtcacatcctgattttcgtttcaggatttataaattatttaataaattattaatagaatttatattaaacgttcattaatttactagtgaagttaaatgtgggaaataaaatttcctaaatataaagcatggaaggatttaatttttattaaattcttcatggttaattatactctctggaattttctcagatttttcggagctcaattcctaatttttaatcatacaaagagcatttcagtaattacccacatattaaattaatcattaaatggtctaattgtaatttttttaagtactttgagtgtccaagtattttcaggatttttcttgaaattatttgagcattggaagtatttttaataattcaaagatcatttaagtgattattttaattgggaaagtaataaaatcctcctcctcagcttgggccattttcagcccattccttcctttccttcctctctcttccgccggcccaacctgagccgcctcctctcctctcagcctagccagaaaagtctattttctttccctgcgctactgttcatcttccaactcaggcagagcccgagccagccgtgccgtgcacagtgccgccgcctcttccttccaaatctcgcctccccgttgctctttttctccaattttgttgaggggaaatattcctcttatcctcctctatctttacccccaagaatcggagcaaaccgttgagtattttatccgaatcgaactcgtttttgagtttatctccaaaaccgagtttttgatttcccggatcgatttcttgcgggaggagtccgatctcttcaatccaaggctataaataggaccccctagtcctcctctttcgtttgccccctctcccgtcctcttccgtgctccgtagctccgtcgccaccgccgccaagcaaaccgccgccgccggccatctccggtgccgccgcgccgccgtctccatcgtcgtcgccggtcgccgtcaccaccgttgggtgcgccgtggtgaggggaagctcggccacccttccttttccgtcgctggtcatcggagctccgccgccccgtgcaacccgagccgccgccgtcgcctcctcgtcgccggccgtcgtcggtcgttgtttggcacgagggtgagtatcgttgggttcgtctcgtcgtcctctacgtgttcatgtcctccaaatccgcagccggtcgctctatctccggcgaggtcgccatcttggtccggccattgatgatgtcatcatgacgtcatcatcttctccttttccagttttttctaatagattaaatcttcggaaattcataactaaatcatcgtaactcggttttgagtggttcaagttgctaaattcatctaaaatcatgatctacatgtttgtttactttatatgtactgtttatttggtttttattagtctttttcttcgttttgcgtgttagcttgtcgtttccgtcgttgcgaaggttcgtgagtgcgtcggaagtgatcaagaagattacttgaagaccgattattgcaaggcaagtcacacagatcctaaacacaatcctttgagcatattgatcctatatttaaattctctatttatttcatctgtgcatttattttcgaatgtcaccgggtggtgtgaacttattcctttgttatggccaatttgcattgattactttattccttgataccttgggttattataacttgactagttgggctttatatattggttcagctagatattagttatgattgcttagccatgcttagaaacattagcacactattgggatgacttatgactcactattatttaaggatggcttaatgatagttcacgatggttaatcgtgattggttaattaattacttgccaactaaaacttgataatggtgggttgtgagcacatggttttgagagtcgtgctcatgacaattaaggaccggttcgcgagctactgttgtgaaacatttatcgtgccaaccacaagccagcgtgggcaacggctttatcttttgtatagcgtgattcattatagtgcgccagactgagaagtggcgagaagtccacgggggtcgctggggagtccatgcctctagtttttgagggggtgattatgatccaggaaaggtgcgctgtaatggattatgttgtgcatggggtattgtcacaactcctttccgaggtaccgtggtggtattgaggcacatggtgacatgatgtggggttgtgtcttgtgggtacagtggtacacctctggccagagtaaaactattcgaatagccgtgcccgcggttatgggcgggttgagcaatgtttttcgtgattagtctcacacctctcacaataattatggatgttaatacctgataataatttgcttagctcctggtttggagttagatctgtacagccgggtatggttgttcaggatggttgggcctgtacagcatgggtgtgctgttcagtgttgattaaaatttttaattaattactctactgttttactactcttaactctttgctaaatgcgctttcgcaaatgagcctatattatgccatcctttggtattcttgtgcacttgcatatttgctgtgtggcttgttgagtatgtcatatgctcattcttgcaataatcaatcaacctcatttgaagataaaggatccagaaggagaagacgtttggcttataccccagttgagctgcctgtgggagtggagctgaagccatcgctagatcgttattccgctgctgttttcttttcttttgtaagtgtgtaacgttattattatgatggatttgtatattaaattgtcagtttgtgtacctcggctgattcctggacgaggattttatgcacaaataagttcggaaattactagtgaatttccgggcgtgacaagggcctacttcgcgtaccaccttccttatctcctgcattagtacatcacaaaataaaaattagtccatgaccctaacactgacgataacagaggaagaagtaatttgttgcatcaacgacgtcaccttcagcacgaagttagcatcctggctttggcccgtcgcatcaatggacttgtggaaaaacattattccattgcaatatatcaaaaaattgattacagacatacccgtcgggccagtccaagaatcacacattatagtaacaccgtactcatcccagtcattcttgaacctatcgaatatcttcttcacatccttctctgtagaatcaagatatttgccatctatctccctaccagttggagaaggaacactttcacctataattgacgtatgaagtaattagaaaaatgtgttagaaaaatgtaattccttaataaatacatacgtaccccacttttgtgtctcccgaacggcgctgacaaagtatagattatcggcatttctaccaggaatgccggcggtaaagaagaaccttgcccatgactcaccaatggcctgcctagcttgcttccccttctttgtgaagaatcctgtgtcaatgcgtgtctgcacaggggacttggcagatgctagattgtaatctcttacagcaggtgactccctatgagatgtagcccttcgtagcatattggtaattgggttacttctacctttccgtgcctcgggctgagcggatccactcccaccaccatgctcataagtgccaccacgctcctccacgtggctcctgaagttttcctcttgtcgtgaggctgccatggctgcttccatttgttcctcctcgtcggcatcacctgttaggtcataatagttgacccctg

SEQ ID NO: 9913 - DNA, 5823 bp, Oryza sativa
gccggcgtggtcgccttcgggcgcgccccgcgtttgccatgtggggccgggccgtcagccgccagcgccctcgggtgcggctaacgcgtggaacccacggcgccggccggtgtaagcccgggtgcgcccggtccaccgtggaccgtggggctgccgcgtgggccccactcccatggacccggtccgcgcgcccctcccctcggctgacgcaataaatccatttttaaattaaaatttaaatgaagaaattcgcaaatattcatttaaagagcatataaacttcaaatggccataacttggccatttgaattcggaattggaccgttcaagtctctaatttttccttaagaagtcaagaacccatttttatgctttgtttcagcttgttatatggagtttattagagtaaaagccttttcttttccgttgttcgtgtagacgctgcagcttcggaagatccgcttttcgtggaagttgaagccgacgtttgggaaagcgagcaaggcaagtcacatcatccttgaacatattgaatcccagtttatgaaattattttaatttaagattattgcattaccgctttatttaaattcccacgttatcattgttttatttagccatgcctatttacctttgttatgaccttattattattgttattgttattaataccttgttcaccctagatcgaaacaaaaccccaactagtggatactctactcatggtatcactagtatgattttaggtagatgctacgctgtttaattaggtaacattaggtggttttacaactttagactttgggatattctcatcacctggacacactagaattgttgaattattgtggaattggattcacacattcccctctattcaaaatcctgaaaatggttttaggctgggctcggggtgcatggttttgatagtagcacctcggccatataaggaccggtcttcgggcctctgttgcaaagcactaccgtacttccacatgtctagtgggtaaggtttagtttgtggctcagtctggttataaacaaaagtacacggatggagatggatgaagtcgggggtcgatggacatctctaggacaaatgaaggctacacgagctgcggcccggtagtcgagatgtcatggcacagggccggtgtcctgctgctaggggctcagtcctgcctacctgtcccgggggttccggccgtaggtgggattgggtcggtactcttgtctatggctaggatgggttggaaactatgtcacgtcttccgtctgtataccgtggtggtatgtggcacgtggttacacgtgaggaagatgtgtcttgtgggtaaagatgtacacctctgatcagagtataacctattcgaatagccgcgccctcggttatgggcaagccgagcaatgtacccaagttagtgttttcattcttaaaacctgcttaacaactaaaaggaggaatggttggcctgggttggcttgggacgagctgggacccagggtcgggttgccaggtcggtctaaatcatcgtaggccttgggttaaggcaggttcgtgtgggttcacggccttgattaataatattgtatagttctagaatcgtgtttacaaaatagatttgagcaactaagtgtcttataatgctgtttactgcaaaccctaaccctttatattgtaactcccttgtactcccttgcatttattctgcacttgtgggtgtgtcttgttgagtacggtggttgtactcagtcttgctcaatttttcccaaacccagaagaggggcctcaggaagatgaaggctttggtgtctagctcgtgcctgccgtcaagcgcctgtggtcgtcgccctagtcttccgttgtttctcgtttgtctttgtgtgtgctgggccttcgctgcccatgtaataaattaactatttacgcttccgcttgttgaactctgaactgtatcaacttttggtgtaccttgcctcctgggacaaggaataatgcacgcacgtatggaacgcccgttgggttaattccggtcgtgacaagttggtatcagagcccccttgaccgtaggacgagccttagatcccaagccttagcaatattttcaaaaataaaaatcctgtcttaattgtgaaaatcctctagtctctctctgtcctgctgcttcatttatcgccaaaatctgacctttaaaatgttgcttttcttcttgtttttgtttgtagatggccggcagcatcaaccgtcgtggtctggacctgactggtttcgttttggagctgcggggcatgtgcgttgtcttggggtatccgcatggagtggactactagggcaggcagctcccggagcaggagggtgacgatgcagagccccacgctgcttgggaggttactgcggtgatcctcacgggctcacccgagaggacttcgttggcagtcaccgcgggtggagattctttctccgccgcttgccagaacgccgctctcctcgccatcggcactcttcaccagcgctacccgtacgagttgcagcactcaccctaccgctaccaccctcgctgcggaggagcccgcgactacgccaccttccgggatgctagctcggaggatgacgctaccatcatgcatctggcgcgcatggtggaggcgtacgacgcggctcgtatcgacttccatcagatggtgcgccgtgggatggtcgagaatagcatgaagatcctggagctgcgtcaggagaatctgcagctgaagaaggacctagacgcagtggaggcgcagctgcatcagctcaagatcgcccatggagaggtctgtcgccccaagcgccgccgcgtctgccgcagccagaagatcaccgcccgcaagagcacctccaggcctgagcttgttcgtcagtccctggcgtggacttgcttcgttgagacccctcgtgccgagcccgcgcccgtggttcctcaggagggggaagcctccggcgttggtagcacggaggatgcactgttgctcaccttctgtcctggcccgtcgcagcggtagacgagcagttagtaggcttgcgcgtgtgttctttctcgtttgtcttcttgttggagtcgtgtggggcatggttatgccggtgtgtggtataactgtgtcggagcctgtctttattttatttgctgaagcaacttgaactttaatgaaccaatttaatagcagtaataaattcaagaattatggtagtcgtgggtggttagctttaattgtcagctctctctgtttgctggttctgtgtggggttttcagatggtgacgaccaggagaagtgctaacaccggtgatggcaaccaacccgaaggcagcaaccacaacaaccatggcagcccacctccacctcctcctccgcctccaccaccaccaccagacaccaacgccattctcacccaaatcctcgcccagcaggccaacatgatgactgctttcctccaccacctccaaaatccgccacaacagaatgctccaccaccacccccacaacactctaaactcgccgagttcctccgcatccgtccacctaccttctctagctccaacaaccccgtggatgtgttggattggttgcatgccgtggggaaaaagctagacaccgtgcagtgcagcgatgaggagaaagtcatcttcgccgcccaccaactgcaggggcccgcatctctatggtgggaccatttccaggctacgcagccagagggacagcctattacttgggcccgcttcaccgccgccttccggagaacccatgtgcccgccggagtcatggcccttaagaaaagggaattccgggagttgaagcaaggcaaccgctccgtgatggagtatttgcatgagttcaacaacctggcccggtacgccccggaggatgtacgggaagatgaggaaaggcagaagaagttcttggcaggaatggaccctgagctgtccgtgcgtctagtctccggtgactatccggatttccaacgtctggtggacaagagcatccgcttggaagccaagcacaaggaactggagtcgcacaagcgccgcttggcgaatttccgcaatcaacagggagctaaccaaaggatccgctacaccaatccctatccagggggatcgtcctcgcagcagcaacaacagcagcagcaaccacgctccgcgccccgacctcaattcgtggtgcgcgtcccacagccgcagcaacagcagagccagcaagggacctgtgcgccccgtcctcctacgccagccgcgcagtctggtcaaggccgcagggacgttcaaggtccgcagcgtctgtgcttcaactgcttcgagcctgggcactttgcggataaatgcccaaagccgaggcgccagcaaggccaagcgcctccccgctccaacaacggtggtaaggatgtcattcggggtcgtgtgaaccacgtgacggccgaggacgtgctgacaactccagacgtcatcgtcggtacgttcctcattcattccatccctgctaccattttgttcaactctggagcttcccactcgtttatatctgtgccattcgtggggagaaatcagttgggggtagaaaggcttaggaaccctctgctcatcaccacccctggaggggttatgacagcaaagtattatagccctgccgtccctatagaaattcaggggattccttttccctcggatctgattctgctagacaccaagaacttgaatgtgatccttgggatgaattggttggctcaattccaaggagtagtggattgtgcaagacgcactgtcactctgtaccgagggccggaacaaccggttgttttctttgcacccccaacctctgtcagtagttcagaacttcatcagataggactgtcagaaatccccatcgtcagagagttcggagacgtgtttccggaagaactactcggtatgccgcccaagcgagagattgagttccggatagatcttgctccaggaaccactcctcggtacaagcgaccctaccgtatggcagcaaatgaactggccgaagtcaagaaacagttggaagagttgaaagaaaaggggtacatacgtccgagtacttccccctggggtgctcctgtgatttttgtggagaagaaagacaagacgaagaggatgtgcgttgactacagagctctcaatgaagtcaccatcaaaaacaagtaccctcttccccggatcgatgatctgttcgatcagcttaaaggtgccacggtattctccaagattgatcttcattccggatatcaccagttgcgcatccgtgaagaagatattccgaagaccgcattcaccacgcgatacggactgtatgaattcacggtgatgtcattcggtttaaccaatgctcctgccttcttcatgaacttaatgaacaaagtgttcatggaatacttggataagtttgttgtggttttcattgatgacattctggtatactcacaatcagaggaagactatcagcaccatctccgtctggtgttgggaaagctcacgaaagtccttattccatccaccctagcagtacgaagatgtacttagacttgaaggagaaatactggtgggttagtatgaagcgggaaattgcagagttcgtggccctttgtgatgtgtgccagcgtgtcaaggcagagcaccaacgaccggccggacttctccaacctctccaagtaccagaatggaaatgggatgaaattgggatggatttcatcaccggactcccaaaaacccaaggtggatatgattctatatagagtaaatgtggaccgattaaccaaggtagctcggtttatt

SEQ ID NO: 9914 - DNA, 45078 bp, Oryza sativa
atatatatatatatatatatatatatatatatatatatatatatatatatatatatatatatatatatatatttacagcatgtggatgtcattttatcttttaggaattatttgggctacctcattggatgagcatatctaggacacacaaaataaagcatatcatcggcgtaagattaattaagtattatatatattacataacccgtgcttatataagaaaaatatataaaaaggtagaatctagctatttatttatacaaaacccgtggatatattatttcaacaattatatatatctattcaagtaatccctcactacgtacgtacaccagagttatcataaaggaaaaaaaagaagagtgtgtatacgatcagctgcatcaagtagttttctttctttctttctttgcagctatgagattttcctcgaattgtgcatatgagtagcgaccactcctgacgagattgtcgaagaatccacgtcgccacagcaccacttcacgccatctcactaattttctaaaaagtatttgtccatgtttgatgtcacaattctggtatttgcatggtatggggatcgttggtgctagggtatacgcgagactgaggtaaaagaggcggagacagggatttttatacaggttcgggcccctgaattgtcaggtaataaccctacatcgttttggccgaagccagtattgctcttattcatgataatcacaccagtacaatatttggggtagcctatctaactgttgtcgacatggcggtctgacgatctgactcgtagtcgacaacagggtagccttcctcctcgaatccgtgcccggcgagatcagagatagcgctttcgtctctcctgacagtatccagagacaccgtagggtactagccgtgcttatccctgaagtcgatatccggcggcgtgtcttggcgtatgtaggcttctatattgtggcttctatgtcgattgtgttgggtgttgatcctccatggtgggtgtccccctgtcctcctaggggggcttgtatttatacccataggtgtccccttgtccaagcagaacgaatgaaaccaatatggatacaatccgggtagtccttatcgtttccatgtagaactctgggtgtctttccttatccggaactcctcctatatccgaaggttgtttccgtataggacatagtatgtggtgggccctgccgagattcagtcaactattattaggtatgtggtatccataaccctgacaatattttttttactaattatataaaaggcattcacgagcgcatatataaatgtatgcacatccatcatataaatacacatacgcacacctacactaagagaaaaaaaatttgtctccaaaagagaggaacaagtacgtgcttagtatttgccagaaaaaacatatacacattcaatgaaagtgtcttatggaaccacatcatatcttcttttaattatgtcattctcatctatataatgttaataattagcacaaataattttgacaatatagattattctatcttataatacccatgaacatgcataggtgaatcaaatgtataataaaagaaaaaaaaacaaaaaattatgaactcatatgtttacaaacaatgatgataaatgagtttatatataaccgggacaattcttaccgtcgttgtagtttaagggtgtaattcagactttttcctttaaaaagtcatttccacataaggatttataataaaattttaatcatcactaaataagtaaggtgcctgcacatgtgctataaacgctctcaagtcgtcacgtggcactcctttaaatgctcctatgccaccacgtggcattttaataaatttaagaaaatcacaaaaaaatctgagaataaacaaaacatccgtccatcgattttcactaacatgcagtggacccgttgttttctatcattagacttatttatccaaatagataaggataaaaaaaaggcccccatatctcaaacctctcctgtacttactccaaccagtatgtaccttcccagtcccaccaattttccttctctcctatttttctcctattttcatcaatttgttagatggaaaaaatatttataacccattattttctatcattagatttgtttatcaaatagaaaaaggaaggataagaaaacaagccccgcatatccacccctcccattcagtacatacgtgcctccccacctattttctttctcccctatttttctcttttagttagatggaaaaaaatgttttatgaaaactaattttaaacaactatattatctaaatcatatagctactttttaattggtgcacaccattagattatttactataaaatttaaaactgaagatctaagttaagtatattattaaagaaattcattactttgtgtcatatatatactacggactaactattgttcaccgattcatacattttgaagaaaatatcaagtagatttttaaaccttctgattaataacatgtacttcgactagaacaatttaaaacaatctaagtggtttaattagaaaatacaacacccaaagtattttctaatcgatctaaaattaaaattaaatgtatttataaaaatatataactcaaaactaggacccataatatctcttaaaaaaataatatcctaacaaccaaaaatttattaaaaatatgtattaattaaactccctcgcgagcgttcataagtcactctctatcatgtcctaagttaaaaatacaactaaattgatgtatccattatttttaactattagatctatttcttaaacataatcttgaattgtggtgtgccacgtcctataaagcaaagaaagtatcttagaaattcttaaaaaaaagtgaagcaccccatcatcggctatcacttaaatcatttagaaaaattacaaaaataaaatctcttccacctcctcctcgccctcacatgcgcacaacactgcccatccccttcatattgtttagatattaaactaaaagaaaaacaatcaataatgtttgatattttttagaaacatattacaaatataggcactcacaacacatgcacactcacccctatgaatgcataaatacatagcctacccctatgaatgttttttttgaaacacacaacaaacgtaggcgctcacaacttaatggacgcacactcacccctattaactcccaaacacataggttacccccatttgtgtatctccaaaagattagacgacatattttgagatttaagaaatcaccacgggcgtctcgctgtcgatggatacgccacccaccactgaaagaataattagtcgtaaatgcgagcacccatgtcaaagtataggacttgaacccggtggcaagttctaatataaggaaactaaccagttgagctacactcactttacaataatattgaattttaatcacacataatttttaagctatatttttggaatagtcctatgccttttaaatcggtggaaccattatttcttatcgttggatcgatcttatataaaaaacaaatgtgtattcatgctatagtaatatgaatactataacatttcaaaattaatacagcacaattatgttgtcattatagtattcatgttaggctgtgtggagtgtctgaccttgtgtacatgaaatgtttatagatggatcacctctcaaatacatcagttatattaggctatataaacccatacatttagtggagcttcatgtcccacccaattctcctctattaaaccatgataatatatatgcaattaaaaaaaaccttactttatcttttttttgacatgttttctaaagaaaataattctacctacttttcaaatgatggagaagattataaataattacttgtagatattactaaaatatcatataagataaagctcataggttagaaaattataaaagcaattaatgccaacaaaaataatttatggagaaatcgtagcagatgttctctggttaatattttgctgctataagtgtccccagcttagcgtacgatgcatgcccgcgcgaatgcgtgggctaccttcctagtttagaaaaagtagctgtgccttatattatggaatagagggagtattatactataatccctctgtacttataaaggaagtcgtttaggacaatgtttaagtcaaaccttgggaatataaatcatgaataactctcaagcaagttgttaagtttgaaaatataaaaattatatgaatagatttatcttgaaaaatactttcataaaagtatatatatatatatatcacttttcaataaatatttttatagaaaaaaaagttaaagttgtgttttggagaccgtgtcgctgttttaaacgacttcttttacaaggacggcgggagtacgataccttttattatcacgagttaaatctgaactgatatcgatgtgttatatttattttgtttatgtttagatagagagaataagccaacaattactcacccatcattgctcacgcacgcgtgctgcccgctcgtgggccgtgcgcggcgcggagagacgtacacgagcggttggccgtgccgctcgcccgccctcgcgcgtggaagtcacgcaggctcgcggggaaaattgctgccgcccaccgacgatggccggtcgaagtggacgtcgaaaccgtgcgcgcgagcggcagctggctgctaccgatatcattcaattcgatcgggccaaaaccgacgatcgcttttgtcatttgcccttgtagatcctacgctaatctagttggcaatgggaagtttcaagggtagatgactcatggtgtgtcagcaggaatcgcaaattccaggtggaattgaatgagtgtgctgtgacacacttgacagcgacgtaacttgtagatagtgatctcgttgtacattagtacatactcctccattcttaatacatgcagttcttagagaaaagattctcattttcaattatcttgttagttaaattttgatttttaaattgtttggatgcctcccataagcacctaattggctgaaatcactactggagaagtgatgtttgttggttcggtccatttccacaataatcctagttgctaaaaatcgggagtaaagatctttactcccggtttatttgtgcaagaggactatgcgatctttaatcccggtttggtaacaccaactgagacttgatctttagtcccggttcaccttgtgtcaaaggctgtcaggtcctcagagatctttaatcccggttgactaaagatcgatcctaactttagtcctggttgttgttccccaccgggactaaaagtttttatagatctttaatccctaaaaatcaatataccttatataatccctttgcacttatcctcaaaaatttctatctcctattccttctcactcttatcctctctttatcttcctattcctcctcctcctcctttctctcacacagtcttatcctctccttttctcacagagctggcaaggtgcgggcggggcgcggtggcggggccagcgaggccggcggtggggcgcagcggcggcggcccgcgcgcgcgaaggaggaggccgggagggcggcgggagacggcggcgggctagcgtttttttttttgaatttgtgattggatctgagatgtatttgatttgtgtgtgatgtattcatgtgatgtatttgtggtgatttttgtataacttgtgatgcaatgttttataatttatgatgtatttggagattatcaatttgaggatttggagatatcttttgttctgtgatctgttggatttgtgatctgtgatgatctatttagggatggagtgaaatcaatattcaatgttaaaaacaataaaataaagtagcaatcggtcctggcctggctacatcttaccgaccgggactaaacatgcatctttactcccgggtatttgaaccggcattaaagaccgccatctttagtgacggattctcccttccagttcgctacccgggagtaaagggggttgcgaaccgggagagaagagggtttctccggtagtgaatactgaaatctttttttttgaattaaaaaaaatactcggattcttgtgtattagaattaatcaatgtccctgaaatatttatattgtgtaaactccaaatattagaaatactaaaatttgagaacggtggagtatatgctttcgtctattgattaagaacctacgtcatgtatttgatcggaccagtcaacttgtaagccgtatgtatcacggcgttgcaaaagtgatgacaaaaatatgatacttggtgtaaccagcatcctcaaaaatattaaacccgaaaaattccaaaatattctagtaagccattgtttcgattcaattcaaggtttatggagggatgtttcactttttttttatctttttagtaaacgtattcatagacttaaacaaacttattctataaataatcgttttcgtggcacaaacaacattggcgtcgtggttcaacatgacaacatcaaagacgttggcgtcattccctagcacccaaatagaaactaagtcattaatgtgtaggggatagcgccaacatcattgacgactaggatatatttgtatgtttttttgaaaaagtacctatttatagaaaagcacttatttgtaataaaaatatttataaatagatccttgacgcaagtgactgtgccagcgtcactgtactgaggatctatttgtaaatatttttttattacaaataggttatttttaattattttacaaataggttcttggcaccaacaatattggcgccgtccctttcacactacagtgacttagctttcacctggaggcgaggggatggccccaatgttattccaatcatcatgttggaccacaacactaatgacgttggtgccgcgaaaaggagtcgaataagttgttttagtgatttatttgtagaataagtattaaaaagaccaaaaggtgaaaaatccagggtttatgatgccgaccaatagagcttaccccaatgatactctcaaccagcttcacccctgcacaggaagaataaagatgatattgcaaatattggtaatacttagaaaacttttacggtacaatatattgccagtatatactggcattatatagacgggtaaatagtattatggcagtatatagatgagtaaataggagttttatagaaaattaaaataagactttttgagtaatttcatggttgagagttaatacggtctagttaggacatactcatgctcaatcactaaatattttttataaaaataatagtctaaagtaatggtctattggtttaaatataatttagtcaatatagatcttaaataatgaatttagtgggtatagaatataacagtgtaaactttattttcaaatagcgtgttattcgaaaataatagaacaaaataatgggtcttccgtttaagcgaaaattatcttataatttagtgggtaaaaattttcagccatgtccctgaacaaaagtgcataacagtacacccttccttcatgacatcacgaccctcttctcttagcaacccggaccattgtcgagcacagtacaccctttaaaataattgttttttagtaaaataattgttttttagtaatttcaaaatattcgagattacaaatgtagatattgacagtttgatgtgttggctgacttgaattatttatttttggtaacattagtaatgtagaaaattaaccagccacttgatatgctttagtgaaaaataggatttagttaaagattagagaagtacaacctagattaaaggtcctcctccccaggttatgtgtaatatacgtggtcctcaaaatttaaagcctgatgattattccctccgtttcatagttttgactttggtcaaaatcaaactgttttaagtttaactaaatttaattttaaccaaagtcaaaacgatttatagccttccccgaaaaaaaaaagatttataacatgaaacgcagggagaagtagagtcatgtaccacaactccagtaccacacattgtcacgttcagtgcttcctgtcaattcttacttcttcgccaggattggttaccatccttgcgatcgatacggtatcacctcattccagtttacgtgcgttcaattattggcgagtaaagtttgatgatgggcaccgtacattatcttcaaatagacatcctaataatagttacgtaccaaagaaataaaaaaaatgtccatattcaaaatatatatcacttagaataaggatcgaaaaggacatgagcaaatcaaaagtaaagttgagatcgcagctcgaatcaccacctgatacctcaaatcttgctagctacaaggacgcggcaaagcaaacggttgcagaatccagattcttctttcaaaaatggtccgtttcactagcatccagcaggaacccgccctgagcggtccaccgtcctagacacaaacggcagcgcgaacccactaaatagatccatgccactacaaatatgttgattcaaacaaataccactagtattcgtgatatgtaatacatgccacgggaattttgaaaaattggaaccatgccactccgtcatgttttcttcgtctccggcacatacgccaaccaccatcaccaccagcaatggcggtggcatcacccctcattcaccggacctcaccgccaagccaccccttcacgctgaccgcaagccgcgactgccccaaccaccatacagacacacattgtgccgtctccctcaccaccatcgacctcctctatggcgggagggctcgggcgcctctgcctctctcgccaatgacgtcactgatgccatggatggggtcaaagatggtagtggtggccgataaggtcgaagacgatggtggcgacggcggtggctccaaagtcctcacgccgtgaaggaggtcaacgacagcccgccgcgaccgtctctctcaccgtcgtcgacctcctctgcggtggaagggctcgggcgcctctacctccctcgccgatgatgtcaccgatgctgcggatggggccaaagacagcagcggcggcggaggccaatggggttgaagacgacggtggcgacggcggtggctcccaagccctcccgccgtgaaggaggtcgatggcggtgcaacggcggtggcttctaagccctctcgctatggaggttgacaatggccacggtggtggctccaagccctcgcgcgacgaggtcgcgtcgacaacagcccgccgtgagggaggtcgatggcggcacgacagtggtggcttgcgagccctctcgccttggaggttgacgatagccgcggcggtgcctcccgagccctcacgttgtggatgggatcgatgatggcagcggctccaagccctcttagtggtggaggatgatgaccatcggagatagagtgaagagaggtaagggaaagaggtgatgaagatggaactgacagctaggtcccacatgcagttggggttaacggagatttttgacagaaaacgtgacggagtggcattgttccaatttttccaaaattccagtggcacgtagccgatatcattaatagtagtggtgtttttttgaatcaataaatttgtagtggcatggatccaattaacccaaaaaaaaagctcaaaaccgtgatgggtcatccgtagttttgcctctccgcactcatgacagattcgaccatcggtaaatagcctctacaattccaattgaagaaaaaaaaatacaagtgaaatctttgcttgatgagataatccattttggatagaatgtgaactggatagatttttactggaatggtggtagaaaaagaccattcaaatatcgttaagattgaggaaaaaaaagtttgcaaaaactcgatagaaggcaatcaaagttgattgtgcaccgaactgcatgcccatgtaacgcgccaaccacacaagcacatgtcgctgagagtggaacctagcactaaaccgaacaccgctatgcgtggccaaattccactggcctacaacaatctccactgagtctgcacactatccagtgtgtagactccaaacacaacgcctccatggaggttatgccattgatgatgcgctgactttgcctatccaagatggacatggttttcaccagagactcttgccaagaggaggtaccttggcagcgccctcaggagggttacggtgttcaaaggtgtaattgttgccgccccagtgcaacattgggcgaggcttttgcctagaaccccctacaacattgaccgtggttcgtcacccatcatctcagtttccaccatccaaacgttgcatcatatgcagtggcggagccaggaatttcgtgaagcctgggaaagcctaaccaaaatggctatccacatatataatgtctataccttcattttactactaactaaagacaaaacaattttgttagtttaaatgcatgtaaattttcaatagttgaagaaaaataatgttattgtaaaacagacgatttatataagctcgagtgcgtcacatcatccattgtgattcaggtaaattggcttctggtgaacagtacaactcaatttcatgctatagggcttacaaggcttgctgcttgtacggtccaactgaagtaattgaaagtttaatctactagatttgttgggaagtcattaaatccatggattttaccattcttgttcacactcacttttactagatttgctgaaatcagtctcatttgcactcgtgcagcccgagcaactgtctgcccaagccaggcggtgaatccgccactgatcataaggcctctgccacatgggaccaacaaccctccgcaagccaacttccagtcctactatcagcaagaccgctgctgtgcactgctattagcaccctttagcgtgctgcggaaccaccagtttggctgacctgtgggtgccactcctatccaccgtctttcaccaggagatgattggtgggcccctatgggggttgaggatggtttggtcctagtttaggttggttttgactatcatgattggccggaggtgaatttcatcgtatggtgggtgtaatttcttccaaaaccacctgcatacatatatttaccaaaactcgtggaaacggtttgtaattaacccctaccactaagtttgatattttattttgaattcttttatgcaagagttaacggttaaagtttgcacttatcgaccatcaacactctctccggaggactaacacatgtgaagggaaagagttgccaccagcattgctacaccaggctggcacctcaactgctcctccgctccaacccatccctaacgccaccaacttccatctccctagccagccagccgtcatagctgctcatccgtaacgaccaagcatgagaggatggtaggatgactgccatcgacgccaccacggtgctttagctgcaactccgcacaatccgtcgccccaccaccaatgccagcgctatccttagatttgtctaaacaatggcaacatccatgccgtcggctttgagctcaaggtacaataagaagccatgtcgccactatccttgcagacaccaaggggagaggaaggggaggaagtgggacgacggtgctgcggatagttatcgcccgtaagtgcgacaggtggttttttttccttcatcattttctatcactagtaaaaaaagatttttgcatatctcaacaacagattttcgttggcagattgaggaactacatgcccctttaatttgtaaagatcggcatatttttgggcagcacaaccgcatgtgaaaagtgattttcattggcaatcaagttatgccgcccacctgaaaaaatatgcataaaaaataaaaattccaaaaagtcgcaaaaccctagcttcaacagcggatcagcccctcccaaggtcggccgcacgaagttgctgtcgctcgggcttagtcgttgtcaccaaagcctaccactccactcctctaagcgcccgtgcacgaagctactgtcgcatgggctttgccgctcactagaagaccaccaccttcttactgccggatccacgcagctattgttgttactgtattccaacccccttctccttggcccgccaccacccagatccagcaatggttgtcgtcatttctagatcgagaggagtttggagagggagatgggagattagggtggatgccaccaccacctccaccattgtttggacttggcctccccactgctccccaaccagtcgccatccggatcaagccaccctgccgcttcctagctcactaccatttggatccagcagccgagtagcagtggtcatcgtcgtggagtcggacccaccaccgacgccgagtcggacctgccagtgcctctccatgtccactgatggcctggttcggcctctttgtcataagatctagctagcttgcaaatagttatggttttgtgcttttggttgcgtgtaaaaaaccgtttttctagtagtgtcatgctcattctacaagattagttctatgtgtcaagggctgttattatattgaaaatgggttttggcaagtttgaatttgaagaaaaaactaagttgaataatccagaacttggattcacgtatggactgagagtgttagtagatgctattaagttgaataatccagaatttggattcacgtatgaacttaaggctaccaaattaaccgaagaagaggatacctgtggagattatgggtaccccatacccacacggcatggttatctgaatggttatagggataacttatatctatataaaatatgtaacggatcatgacttgggtattacgtttcctagtataatatggaacggcctaaagtcctggtttgttaatattgtaaagtagatttaggaagccggtaccgtattggttaaggtttctatcttgtaatcctgccccccatcctatataaggtgggcaggaggccctctagggggcatgagcacatatgatcgtcagatctatactatacccggcggattcaaatctctaaacaggagtagggtattacctcttattgagagggcctgaacctgtctaaatcctttgcctccgcatccatccacttttaggtctcgtacgctacccccttttattattgccgaattcatgtttcgacagttggcgcgctaggtaggggttgcgtcgaattacccgtcgaaaagtgcgatggaatcaactccatgagtcaccggcttcgtcttcacttcgggattgtcgcttcctcgtcgccgacaacatcaacaagctctcgttctctgacttggattcaaaccagtcaggagagattcaatctaactaagaaggagatgccacttttaggagttatctccccgacgaggcctcatcagttccgcccgaccggagaacgccgccactgccgacacgcaaggagggagatcgtgtgctgcatgtgcctgcagcggtgtcagcggtggcctcgcatcgcgctcgcgatagtgctcgtggtgacctcgcgctggtgtcgcgaggcagcaagaccgatctctccctgatggcatcctcggatactccaatctatcatcattagattgatttctaatcagattaatttgctctgttctgctctctgtttttgcatgtactggtgacgagacgggcggcatccaactgaggtcatctctgccacgtattaatccatgcatgtgttgctggattaatgccgaccaaatctccagtcaatcatgctattagcaaacgaaccaacatgcatgcatactgcatatatgcaccgacacgtgcattatatctacagagcattaatctctaattactaattagatttatttataatcacaacttaactgaagcttgtgttcgctattttgttcgcatgtttggagattccacacgcctgggggctgcgggccagcgccgcctttgcgtgcctaacgcggcctgactgctcctagggcacgcacgacctggatgcgacgccgcatgtcgggggcttcggtcttcgcccggccaacacagcccgactacgcctcttccgccgcgggctagggggttttgcctttgtgcgccgccgcctcatccaccgccgactggtgtcctcgcctacacggttggttggtcacaccaccgttcataggcatccacgtcttcaacgactggctggatttcgtcaccgccgactggtgttctcgcctacacggttggttggtcacaccaccgttcataggcgtccacatcttcaccgaccggttggatttcgccaccgccgactagtgttccacctacatggctggcctattatgccgtcgttgttgggcgtctacgacttcaccgtcagcctgccttcctcgccgccgactggtgtcctcgcctacacggttggttggtcacaccaccgttcataggcgtccacgtcttcaccgaccggctggatttcgccgccgccgactggtgtctccgcctacatgactagcctattatgccgctgttgttgcctgccttcgtcgccgccgactggtgtcctcgcctacacggttggttggtcacaccaccgttcataggcgtccacgtcttcaccgaccggctggatttcgccgctgccgactggtgtctccgtctacacggctggcctattatgccgccattgttgggtgtctacgacttcaccgttagcctacctttgtcgtcgccgactggtgtcctcgcctatacggttggttggtcacacccccgttcatgggcgtccacttcttcaccgatcagcttgcctttgtcgccgccgactggtgtctctgcctacacggctggcctattatgccgctgttggtgggcatcttcgctttcaccgtcgaccgccttcgtcgccgccgactggtgtctgtattgttattgatggacgacttcgttcccacatccacatcggctacttctattgtcaccgagggaatacgaaaaagctaagtcctcattaattttctttatatgatattttccttttcctctgcctcactacatcaactggtttaccgttgactagtgaatcgggggctacagatgttatatcatattttttcaacaattttcataatatttatcttgattgtttgcgacataatccgagtacaaagctacctatcgagttatggagttctatcttcctatgctttccgtttggtttgtcaatggatagttgcctttgggccgattcctagcacccgggggctcgttggatggaccgagtaacacaaagtgctaagtattactcggaataaatcaaaagtatagagataagataatttattttctactcttaacaattgcaaaagtacccgagtagtaaactctgatccgtgaatctttgttccattaatgacgaactcatgtcactcgtatgcatgtttgggagtcattcgctatgactagtcgggcagagtgtttaaacgtaaggagtcattcgctcggggaaatcaaaattgacaagaggagaaatacatatttataaacattttaaaaatacttgaattctcctcgagtattatatttacataagatactactcatcctatatgtttgttctgcaggatccagatccaaatatgcataaaagggattcatggttttaagcttatctcttacgctccgggaatggatcagtcagaacatcaccaccggcttgctgtcgccgccaccgactagtgtcctcgcctatacggttgggtggtcacaccgctgttattgggcgtcgttgtcttcaccgaccggccgcctcgttcgccgccgattggtgtcttcgcctacatggttggttggtcacgccaccgttgttgggcgtctacactttcactgttggcttgcctccgtcgccgccgactagtgtttccgcctgcacggctggcctattatgccgccgttgatgggcgtctacgtcttcactgaccaattgccttcgccacctcgtatgatgccaactggagctatcgtcttcacagctggccacgtcgctgccactgctaataggcgtcgtcatcttcaatgcaagctgtctatgtctgctgccgactggtctcttcacttccatggctgcatgattctgccagtgttgattggccttatcgtcttcattgccggtcgtctcgtctgctgctgactagtgccctcgcctctacgtctggtttataccgctaccactactgatggacatcatcatcttccgtcgccgactggttatatcgccgccgactggtgtttttatcttcacaactatgcgtcttcgctacggtttgcttccgttgccgccgactcgtgttcacttcgtcacggctatgcaactttgtcaccatggtggagcgacttcatctttattatcttcggcaccggcaaacccaattgtcgcaacttcgcatgttttgctacttcaccaaccacgtctacaagagcttcgacatctcggcatgcacttccatattcgatgccgtgttattctactacaacaagtggttccctaattttcaagatttctattcggacatcctcaacacatatctttactcgtgcaatgagtactcgatgacaagaagctacagttctcgactctatgttcagttgccttctaactaaccaaagagtcgggggctacacaaatacaagactctcaaaattcaacaagctgaagaaatcaattaatcagccaacgagtcaactccaggagtcgttatcttcatctttgcttcgaagcagatattctacttcagcaactccaattatttcactagcaattttggtttctggacgctgccataatctactccaaatttctcaaagtatcaagttcaagatttaatctacatgttcgagagtttggagttatcagccaatcagcttggtttagacgagttggacaacagcatctactttcctccaagtgaagcatttacaacagctataacactaagttctgcagtcatcttcgtacatcaagaagcgttgcatcagtcttctttatgcacacgctctcgtcaaggaaactacttgagctttgatatcttctgaacagtttgatggattattgtcgctgacatcatcactagcacctctgcttcattagccctgacatctccgctgttgctaatggatgactatgtcttcgccgacttattatttcaccttcacggttgacctacaatgcaaacgctgatgagcgtcttcgtcattatcatcagttgctacaccgctattgactggattaccaacatcgtcatcttcatcaacatcctgtcaagcctcttcaacatagcctactctgctgccgttgatgggcaacttcgtcatcatagccggctatctctgttgccgctaatcatcattaccgtcggatgcgtttgccatcgccgactattttcttcatcttcataattggtggatttcgccatcaccatcgatgcgtgtctacttcttcatagtcggcttgctttcgtcgccaccgactgctctgtcgttgttgttgggcgccttcatcttcactgctagctgacctgactactgtcgactagttttttcgcctcgatggctatgcgacttcatcatctttgattggtgtcattgtttttaccaccaccaacattttcgtcacctctgacgggcgatatcatccccatgttcgtcattttgccttcatgtcgactgcataagctattgccaatggaaaattttgactatgacagaaggacaagttatatatgctcaggggcttatcaactcaatcacaaggatcatatcttcaatttggacttgttccggatacattcaacatgaatttatggtcacgagtcgatttcatatgcttaacggctggactattcattattccccacaagggctatcaaccgactacttgcgctagtcgggattcaatttttatatctattttggagtatcccataagggataatcactcagatcagaagctattcttatgagctacagttggtctatatcacccggaagatttattactcaggagcatgttacatgctccatcctttaaagggtgtcaaaggcatatttttttgcctaggcctaatatgtctgcagcccatattttcaggtgtggcctgtcacattcttttatgtacttaggcacctttcgcttaggccaaagtgcgcgtgatcaaatgcccaataccttaaaatccttttatatcgcagttactcaactttttaggagttggtacaatgcattttaaaaggtgcccaacagtgaagtttctcatagctgccccgctgacttttttatatagtcaatgcgttgtttgggtttataaagcaattgattggatacactatcattgctttttgtcacgtaagtgtgcattattattgaccaatattatggcttaggctgattaaataatgtggtcatttttcagacggttggtaaatccttatgagtttatttactcggattttacaccacataggccatatatttccaggtgtggtgaaaccatgtgtcttttagagatttaagcacatctgttaaagcagtgtgcgcatggtgtgtgcccaataccttggaaatttctttattcacaacatacaagcttctttagagctgttttgctatgtgaattttcaatgatatagtcaactttagattgcatgcatcatgctttacaaagcatttggtatatcacatagatcatgttattcgggatttcataccgcatatgctatatattgatatcaagtcacttggttgactataattatcaaaaatcactctcagttggttggattatttattccttgactatatgcttggtttgttcaactaaccatagtcgggggctacacctattaggtgcatctattagatgcacctgaccttatttttcagccctccacagtcctctgatttggtaaaagtactcgggagaccatggcgaagatgattgaagcactcggctttagagtaatctggttcgaggaaagattatcttctcgattgtgaaggtcttaggggctactgtggagattatgggtaccccatacccacacggcatggttatccgactggttgtaggggataacttatatctatataatatggaatggcctaaagtcctgatttgataatattgtaaagtagatttaggaagccagtaccgtattggttaaggcttctatcttgtaatcatgccccctatcctatataatgtgagcaggaggccctctaggggcatgaccacatatgttcatcagatctatactatacccggcggattcaaatccccaaacaggagtaggttattacctttcattgagagggcctgaacctgtctaaatcctttgtctcctcattcatctacttttaggtctcgtgcgctaccccttttattattgccgaattcatgtttcgacaataccaaattaccaaccgaagagacaacttctcaagaactcatttagtacggaattaataactgaaagaggtggctacgatcaatacgaatattcgaaattgacagtagcagaggctgcaggcgctgaggacggatggccactggcactactcagtgatgagaacaagagagagggccatggcgacgatggattgaatggaaatcagggtgaaataattgagctgagggcgcacggccgcgtggggcggcggacatgggactggcttcgcccttttggtgccattgccacgcatgcatgccagatcgaactagccataaagcggccggcagggcacaggacgagcatgattaataagcctcacatgaatcaattccatcgaatgtacgttccaaggaatttcacagaaaattgttatgttgcctgcagtacgaaattcgtacgtaggtatgtacgtactctatatttgtaactgggaatttctgatgctacgtacgataaccacatcatattcttcttgctaggccatcagtcacgagagagtgcgcggaatattgcggtgcgttatgcggataatgtgataattggtcatgcatgttaattaattaggggctatattaattcaactttgcataatttctattgctaacagcaatataattaaccacaccgataatctcttggcattttatattgcaaggcgactcgatgtatataagcacgtgtgatatttcgcatttcatgtctccgcaatactttttttaattacatgcgttggcgcgcacacacgtgaaaatataactctctaggacattcttaagacatacttcctccgtttcacaatgtaagtcattctaatattttccacatttatgcattcattattaatatcagtatgaatgtgggaaatgctagaatgtatctatctagatttattaacatcagcatgaatgtggaaaatactaaaatgatatacattatgaaacagagggagtaaatgataattaaaagatagatccatgaagtaattatactagtgatgctgttggtaacaaaattcagaaattaaagaccgtaccaggcatgaaagcttagcattggttggaaagatgtctgagccgtactattctagccgatggaatcaaaatcatgttctctctcctaagtctaaacagctggaggcacgacgctctgtcctttgtttcatggatcatgccaagattgttcgtcacgtgttgcttaactgaattcaaggccatggggctagaatttgttgctggcaactttgaattcctgtgtgtagggccgaatcaagtctatctactgcatggaagaacaatctactgccaatattctaccatcttgataaggtattaggaggtatcacattttctattataaaacttatatcacatccttataaaactatgtatttcgagttatcaaaatttgtaaaattttgttacgtataaatatttttaatattttccaaggaccgtaaaatttatccccttttaaacctctgaaggtacatggattttaaggccaagccaaagaaattaaaccttggagttacaaaataaggccatatattaagaaacaacaatagcaaaaatgtaatgtttgtttcgttacataaatgcaaatgtaacactaagaattgcattaagcattcgtcctaaaagagtattaagtaaagatattatgtaaacacttactgatatcttaaaaagtctataatacccttgtaaagaattcttcaatgttatattatcttatatgactaactacttctccattcttattttgatcaattcctagttcccttcctaagttaaaattggccatttggtaattaatcttctcctatttgaaaaatggatttatttgctttttttaaacaacttctatatataattttgttaaaaaaacatatcatttaatagtttgaaaagcatgctaacggaaaacgagaaaattaaaattggagttgaagaatagaaccaggcctttgtagtatatacttataactaaatatttggggtcctgttctatcgccatattaaacatgcttatacacagcttaaatgtttttgtttttcacttatggtacaaataattataaatattctaaagtatgccagaatacgatatacacatggagaaagaaaaatatcagattagacttgaaaaaacatagtcacatttgcaatttgaattttttttgtccatgcatattgaatttgattttgcaagtttatagggacgtctacaatcaataatccaagttttctaatgtttctagaaaaaaaaatgtaagaaacgagggcttaaaatctccatcctattatcccagtatcaacggaaaaccatctagaaacattaatttgaaccatacaatatgctttcattaactttgacatgaaccaaaataaagaatgtaagtaggtaggtaggtaaaccaggacaaataaaggaatatatgataattataagctgcaagaaacatgcacaccggctcttctgatagggctgcgctgaaaacatgtcatcaccggttcctatcatgaggtaatcgatcatattcggtacgtctctctcctctcctggagtaggcagacgcaatcttacattcttacctaaatcactttctctaatccgccattacagccatgaattggagtaaagcagcttggtcagctagcactcatcagcaaaaggtcttatgctttcctacaggaagaagcagccacatgaaagagctgaaaaaaacagagcaagaaccacttcctttcggttttctagtgtagcactggcaaacatttttttcactaaccaaactcaagattagtcggctagctagtgattattgcagaatggttttgttaagaccaccctaatctataattaggagttaggcttagccaaaagtttgatcatggaagcacaatcacttcatgtctgcattcgtgttacaattttttttagataatggaaatggattacatctccggtttctgtcataagacacacagccataagtttaatagtaataaaaaggtaagataaaagtaaatcaaaatgagaaataaggtgatgggacaaatccccaactctcctttattattgactagcgttaaatcacataaaatattttagctagcaattcttatagaactacgctacccatagtggaataagagactcttggctaccgattccaagagtgtagcaccattgcgcatagtattctgctcctcctgtggtagcattgtagaccagaagtggagccagtaggaagacatgaagataacctgcatagggttagataattgtttaccattaaaaactttatcattgcgacaacgccaaattgaccaacatacagcgctagctccaattagaatcatcttcttaatggacctagatacccctctaagccaattaccgaaaatgtttttggtgttacggggtgggggatattaaaagcaaaaaacacacatctccaaacaaactaagcgacatgacactcaaagaaaagatgttggattgtctcttgtgcatagcagaaagaacattgtttgtctccccctccccccaatttcttttagccaggttatctttcgttagaattactttcttgtgaagaaaccacataaagaccttgatctttagtggaattttcaagtcccacagaattctctttttatccaaacattatagttcatgatcgcggcatatatagatttgacggaaaattgaccattcttatggagcgaccatacaaagcagtccttttcatttgacagagttatattagctagcctgaggatcaaatcgttccactcaattagcttttggccaacaatagcccttctaaaagaaatatttagcggcgttgtgctcatgacctctgccacagtagactgcttctttcgagccacattatataatgtagggtattaatctttgaaagcacgcgatcccaaccacatgtcttcctaaaatcttatgtttaccccattgcgacatctaaaagaaccaaacctaagaaattggtctttgactttcattaaaccagcccagaactgagaaatacctatcttgctggacataccagaaagaggtttaccctttaagtattaatttcccaaaaggtcttgccataggccttcaccattaaacaactagaaaagccatttgttaataagtagctattacgataacagagaacttttacgatgatctctactggtagtatcacggacggcacaatcaacggcgggcgcttcaaaaacgtgaagggaagtgggagtatttaggacccttcccagcaatctcacccatccctccccttcccctgcttcggcagctgctggtgtggtgatacactcgcctagctttggccaccactaatctctgctctgctttttctcctctgctccactgatcatccaattcttctcttcctgattggccattctgattggctggtgacatgtcgaaggtgagcctttcttgctcttggattctgatcctgattagctcgtgtagaatcaggatcatcatcttttcttcttcagatcccaacaaccttttttcttgcttgtcttcctgaattgtatcatgttcaggtgtttgtgattcacacattgccaaccttaaccctctgtttcacatgttgctctgctgcagaaaattgtggtgaagctggacctgcatgacaacaaggacaagcagaaggccatgaaggccgtctcctcggttatcggtacgaacaatcgtctcgaatctcgatcgatgcatccaccatttctgtctgtgattctgtgtacatcaacgaactctctgaagtctgaacatatgtctgattgattgttgtgtgtgcgtgtgtcaggaatcgacgccatttcgatggacatggcgtcgcggaagatgacggtgatcggcacggtggatccggtggacgtggtgagcaagctccgcaaggcgtcgtgggcggcctacatcgagtcggtcggaccggccaaggagccggagaagaaggaggagaagaaggaggaggccaagaaggacgccggcggcggcggcggcgacggcaagaaggaaggaggtgacggcaagaaggaggagggcggcgacggcaagaaggagggggaaggcaagaaggaaggcgacggcggcggcgacaagaaggagggcgaaggcaagaaggaaggcgacggcggcggcgacaagaaggacggcaacggcgacggcaagaaggagggcgacgcgaaggccgccaagaaggaggaaggcggcggcggcggcggcgacggcggagggaagaaaccagccgcggtggcgccgatgccgatgccgatgccgctgcaccacctcccaccgcagtacttcaacatggagtacatgaaccagtatcaccggccgccgccgccgccgccggcctacccgtacgtgccgccgccgcagtactactacgtccgcaacatgagcatggaggagaaccccaactcgtgcgccatttgctgatcgaaaaaaaaaaacgccatggcaaatgagcaccatgaatgctttgcatctcaatgcatgatctgtgtgcacttctgcagcaggtaggcgacgcgtgcgtgcgtacacgcttgtgttcttgatcgatcggccgtgatgtgtatagtataagatctcagtgtttatgatgagaagaacaaattaagtttgcgtgatcgaaccagtacgtacatagtagtaagttcgttttttttttcttttcgacaaattcaaccaacctcttcatcggtggatatatccggttaatgaaatatatgatgagaccaacaaagtttgcaagatcaaactagtatacatagtatgtttacggttttttcgacaaaggaattcaatccagcttctgcaggatgtattttggccgaattaagtactaccttcttctcaaattttatgggtaaaatctcttatattttaagacagaagatttacgtacaatttgtaattggaaatttgtgatgctacgttctgtctgacccaggtgcatgcttcctactataaccacaccatcctttttctctaaaaaaaaccacaccatctttttctttcaagcaaagagaaccagcagtaggagagatagagagagatgggcatgagagagtggggaatatgcagcgcatgatagatgagtggtcatgcatgtggtgggtgctgttcagactttgctttctagctaggagcattagaacatcaccaataaaactttggcattttctctcccaattgtagctcgatgcatgtgtattaccagcctagagatatggagcatattaatcatgtttctacagtttcttgagaagaaattctcttggcaagaccagtcatggaaaaagttagcatctgttggcctgaaagatctctgggccgtacgatttatttttttttgaaacctaagttggaactttgttccacttttatatttagaagaagagaattgacccagtttataaggaaaaccgggcccgaaaaccatacagttgcacggttaattacgggaaaccggctaaaacccaccacacagaagaaagcaagagacctaactacaactagcatcgacggcggagcccaattgtaccacatcattgtcaagctaaaacacagaagcggcctaaacagctctaacatcacagaagaggtgttatcgttgccgagctggccgcccaagcgacccagcagcgccgacttcacaaccgcagcgacactggagccgcgaaagtcaccagagcgaaaagcagctccgacatctaacaatggacatcagccaagccaccaaagagccacttccttcacacggccagcaccaaactccttggaagagactgcaacttgtcatcgtcgccaagcatcgccgcaccccatcagcgagcagctccgacttcatcagcagaagcaaccgaagagcgtgtcgcccaccacaataacgaagcggacccaaggaggcgaaggcctcgccgaacgccaaggtatgaaagtttttgaaccgaaaaagaccctccacggtcatcgatgcataggaactcctccgaagcgacgcccccaagaaggacacgacgcgtaacgtcgccgcctctcgtccgaaatcggaacaaggttttcacctggagatttgtgggaaatatgaaagaatgccatgacaatgcctccaaggaggtttacggtgcccatgagcgtcgtcgtcgttgaaccggccaaaggcacggcaaggctttcgccagcgtcttcacatcacgcacacaagcaccccacatcaacgaccatggaatagtccatgacgtctcacaagcagtcatacctcgacgtaaccaaacacgccaacgcatccacatccacacatcacgagcaggaggctcgccgccagcgagcaaccctgccggagcccgcctcgacttcgcgcagccgctgagcttgccagagccctcttgagccgtgcaacgccgccacacgcaaccgccgcccacgccacgcccgctcccggtctcctcctttccagccgcccaactccttccccgccttcatatgctgccgctaacgtcgacacgccgtctgtcgcacggcgccaccgtcgccagccaacaccaccacggccgccgccgtcagccgccgtggtccaccggtcatctccccgccaccatcaccagccgcggccgccagccgccaccatcaccggtcgctgccaccagccgccgcccgtgcagatccggccggggtggcgcggatccaggggacggagcacgcctcggtgccgggctggagcgagacgaccaggacgacgcggcggaggtccctgccgtggcgtcctggtcgcgccgcggtccaccaccgacgtcgagtcgtcgtggtccgccgccgacgttgccttcagtcgccgaggtccgccgccgtcgtcggcaccgtcaccgtcaatccccccgccggccacccccctccagatccggccggatgtggcgtggatctggccgccaccgccgccgccccggacagctcccccagccgccgagcgtggggtgggcgaggcgagaccccgccgccgccgtccttgcggctgcgcggctttgccggcacccgctcgggcggcggcgaggtggaggagggggcggtgggaggaggaaagcggcggcgcgcgcgtcgcgccgcgagctgcccgggggagggcgacgcgagggcctatctccctaataagctgttcgccgtacgatttatagctggtaggaatcaaaatcatggtctcctatcagctgaatgcactccactttgttctttgtttgctgaaccataagtcaaacaccatttgtttaagattttgacagttcttgctctttggagagctgaaatttatgtgtaaggggagagtttgtgtctagttgacctatatatactccctacatccataatttacaattgtttggccttaatccgaaattgatgtactagttatctcataatcaactctaattctattttctatacgccttgccccccaataaacattccactcaccactgtggaaaaatctaatctaattgttgtattcatgttttctctaatctattacattgatcctcttatggggtatatatagaagtacataagggatagagagtaccccctccattccaaattgatctacatatagttttttgaggttattgctaaatgatctacatatttgtgttcattcatgaagtatattcgttatttgtgcattggagtaaatggatattgatgcatgcatccatgcacataagtatttataacccacatgcaatatcttggtttgctattggctaggaaatagtggggatggtgcatgcatagagtttgttgctagagtaaatatagtatgagagagttattagctttttttggttttggtgtacctatgaaatatgtagatcaatttagaatggagggagtacaatacaagtaagagtcgatttatctctagaattctatctctaggactctatcttatatctaggattctatctctagaatatatcttatctctataatttgtatttgactcttatctttaaccgtcatatttatacttctaacaacgatcacctcttgtttaatgagacatcctagtttttttctttatccttgatccctcaaaaaggacaaaatctcttcttatattacaggaaagaggggagtaatatatggtaaaactcatcggaacgcttgagtagcgcgtgcgcacggtggttattatatcctactcctgatccgtcccagaatatagcaacctaaaaccgtataggacatatactagtactatgaatctagacagagagatatccagattcatagtactatgatacatcccatccggtcctagattgctatattttgggacggaatgagtatattctgggacggaaggagtataacgttagcagtttgatcctatcggatgctaccattagaaaattgtcttgagccaaatattataattcttttgaattaatttaataaattgttttgcaatttcaaatatttttaactgattttctgtaatttctctcaaattctgaaatttcagaaatcttaatttccagcccccatctgactgtttttatcatttccttccgcaacatctcgtgtgaacatagcacatactctactacgatgacacattacacatatatgttactgaatttaatttgctaattcagcagttccatctatgatgtcatcgtttagcacttaatttcccacatgaaggatcacgctaattaaattgaagattagtagtgcgcagctaggctgtaggaccacacactaattagtagtacgtgtgcatgcactccctagaaaaactgcacacggtaaccacacatataaactatgcatataagcttcctaagtagggatgtaaacggtatgaaaacttttcggattccggacctattttaaaaaacagaatacgtcggttggaacttttcggaaatggaaacgaattcggaaatattttctcggaaacgaaatcgaaaatgataagggcagtttctgtcggaactcgaaatcggtcggaaaactttcctgaaactttctcagaatttctagaaattttgtgactgaaataccctggattcttttttcttaagcactgaatagtgaataccatggtgattggttgttattttttaaaaaatatttgttatgcaaatctaaaattacataagaatattttttttcatgcattgggatttatcaacagcattactctcttaaacatagataatttattccatagattgtgttttgtaatgtacgattggtacttaacaattggatttatataattgtgttttacgatgaattgttgaccgttgagacttgagaattggatttatcactttaagagattttttattccgataaatttttgttaccgtatttgcgccgattcatttttgctccgttttcggtttcgataatattcgattctgttttcgtatccggggttttcgattccgaaaataatatgaaaacgaaaacgataaagatggtttacgtctgtttccgtaccgttttcacccctattcctatgtataccttgtacctaccaattaacaaatatcccagaaaattctaaaactaatctgacatgtactcttaaatagtattacacgtatctacaaattcgtatatttaaattcattatatttttgccgtcaaaaaaaagaaaaatctaacggttttaagagtgaaaatctatcagaattttatcttttttttcgtctaaaatatattgagtttgaatatgacatttcacatataggtataatactactgaaaatattatctatttttttcttgaatttttccttaaatttattagttgatgtgtatgaaacatgcacgagaaacttgtgtcatgttccatgtatataagacttatggattgcaatctaggtttgtttaatttaataattatcacttagcaaagaaagatgtcatgtcatcacaatcaccagggcatcaaaaggttggtaggttttaatttacaacaaaactaacagaataaaatatatgttttgggggaaagtcatatatatgaatgcattcagaagcgagcatgcaaggttgtgatttgtgtttagcgataaaagtgttcatgaaatttttcgaatgttcgattgtccttttctatataaactaggaagtagcctgtgcattcgtacgggcatgcatcgtagactatgtttgagaacttataatgatgaaatattaatctgaacttataaaagatcattttatttatttggattatttgagcatatttagaaaaaaaaattaagtaattggactattttctctaattaaaggaactcaatgttttatgtagtggctcagactattcatattttagttagttattttttttacgaagtgtacgtttaatttagctatacatgtttcaaaacatagcatggtgcgactctatgttgttgagttatttctttttcttttggcaaattaaatatgaaaattttattctggtactatattgatttaatttagctatgcatgtttgtagaatttttcataatgacataatatttattgtcaaaattttaaggtatttagatgtggtgcaaagtgcatgggtggactgtgcccaaatgctataattcttatacagtaaaatataggcatatataaatattacattgttagtttaattaatagatagagaataattagatagaaatcagacatgtataggttataaaaaattgtagttgtttcaacattgattgtttatcgtctagattagtagctacaaaaataaggaatgggagggcagtgttctctacatgtggaggaggtggaaggattttagtgaaaaccaatgagagatgtttcttttttctcagcatttcttttattgtttttatagctggtaagacatgacacgtgttgtcttatgtttttttttcccaaaaaatagatgacatgtgtacttatggttctttcaaaaatagatctaattgatgaaaataatgaaatccatcgagttaagttggatcgttttctattttttgagacatgatacatggttacttacaagtgcaatatgggacgtttaatcaaattttatcaagtagactgatttaatataacataatgcatatagtcaaccttttcgaaatgtctcattcctatttggtttccatgcaaaacataggtgccaatgttcaaaagaatttaaatttataataaaaatatggataatatggaacttgaattatttatttagttataaataaaacaacaattgaaactaactaaaaataagatacaacttttaaaattataatcattaatctttctaattattgttttttcacataatgttgtccattgaaaaaaagagaggatgtgaagggagagaagcagagataatgtacgtatggagacgtcacttgaacacatacatgacgtgtgaaggggtaggaagtgggtcttttccgtttttatattgttaagatagcagtagaaaataataggtacaccgtgtttaaattaaaataattgatggttaggtgtattatgtaatttctttaggatttctaggatttattgtatactactggagaaacaatctttggtcggtcgccaagaaaccacaataatcctagttcgaatagaaatcgggactaaagattatttttagtcccggttaaaaactttttgatctttagtccccagttgatgttaccaatcgggactaaagatcatttttagtcccggttcaaagaagttattgggtcgagttaggccccaattatcttagatctttagttccggttctttatatcaaccgggaccaaaaatactcccgagcgcacgtcgagtcctctcttatcaataagaccgataaaaaccatttgcacttcctctctcattataaaccatctccactctccagcctcctcgatcccatctcaatctcaggcgttctccttctcgatcggcctcctttgtccgatccccctctcctctccccttcctcccacttcccctctcctccccctccccgcctcctcctcctaccacggcctctctgggtcagcggcggccggtcgaggtcggcagcggtggcggccggctggccgggctggggaggcgcgcacggcggccttcggaattgattttctttttttgaggaattgtgatgattgtttttgataatttgttatgtgattaaatgtgggaaaaaaatcaattacacagtttgcgtgtaaattgcgagataaatcttttaagcctaattgtgccattttttgacaatgtggtactacagtaaacatttgctaataatggattaattaggattaataaattcgtctcgcagtttcctagcggaatctataatttgttttgttattagacaacgtttaatacttcaaatgtgtgtccatatatccgatgtgacaccccaaaacaaatttttttgggaattaaacctggccttagtagagttctttgtggaggttcagtcttttatctttatgaatttataatcggatgaattcatattgttttaatttacttaatactatcgttctaatttatttgtgatggtttttcaaaatttgtgatgtaattttttttagaatttatgatgaatttgatttggggatttatctgttaggggatgtaatgattagtgaaatccatatgaaaaaaaaattaaaaaaactgccaaccgccggttctagctctagcatttttagtctcaattagtaacaccaaccgtgagtatagggggttacaaaccgggaggaaagaccatttctccaccagtggtagtgtcacatggtggcttaggtgtgttcgtaggagtcccgcgtggtggtttcagagtattttgtgggaattttagttgacttttagcatataatagatagatatggcgcaagttgtcgaaatgtgcctaatatatatctacatgtttctttagggaatatatttctacaagtaaaattataccggtgtaaactacatttttctgacattgtagaactattttagttacatgccagtgaagttattatatagcatgaaacaatataataatggtcactttcttttcataatttttacaagctaaattatagttaagaggtgtattaaattctaatttgtgattttagtcataataatgacacaatagaacatgtaatttcatccgatagcaaaaaaaaaaaacttccttaaaagaaaaacggagaggagttatgtacatgcatatgcacgggaagaggggatgcctctttgtaagaaatagaaaaatcaatctaatccaagtatccaacggcttggagtgatgggcctattaatattaattttagtgaaatcaaaagctgggtttttttttcagatttttcctaatttattggagcgccacgtggcattataggagcatttatataagcatcatgtgacagcttagaagcatttataaaatttttcacggactttactatataatagatagattgaatattatcgatataatttagtgaaacatatttgtagaattatttaaggtgacatataatataccaaccggagatgaggggagagagggagtatgtacgtacagaaggccaggaggggaacatacttgtggtggggaccggtgtggagaggaggattttatttattttatttgatctaatggttaaaaatgttagacccaccaatttaaaagaaaatcaacggttagatttttagactgccacttggcgtcttagaagcatttgtaggagaacacgtggcggcttaggagcgtttttaagaagtttaatggacttttagtatataatagatagataaatggtactgtttaagaacttttagctatctgtaaaatttaaatgttctattctttttagcatcgttttgatatcaatataaaacacgaatattagaaaatgatctaatatcatattgtattatttcgttaaatatgatcgatcgccgatcgaccgaggatcgttgaggctaccgattctgacagtcttcatctctagttgtggtgtccaaatttgcatctgtattttgcatatcccagctgctcgatctcctagcccaaatcaaaataatcaaaacaaacagatggtgttaatcgcttgtcaatttttgcggtgcggatgagtcggatgatcccgacgtctcgtcgtcccctgacgacagccagtcgtccgggccggcagtgacagcttatagctctttcaacgcctcatggacctaatgaaaaaaaagctgatgatgaggtaaaaggcgacctatccttttcgtttcgataaagaatgatagctttcagcctgatccagatgtgtcactgaactaggcgttgttaattgtgaatttatgtgggtgatgcaggttttactattaaagaatatgatgatactgtgaagtcacgttcagcttctgatcatccactcgcaatatagtactatataatatgagaacgggaaattagcttagctcgggaaatggagcgacgtgtggtgcctgcgtgcgtgcgtgcagtggactggtcggtgacgatgttgactgaagaaaatctcagagacgatggagttgaaaattacctctagctcatgcctgcggttttttcagccgcacctgcatgccgctttcattgtcacacttgcgagcgtggagataggccggtaagaaataacagcacgaagaaaaattgccatatatgagtgtggtataagtaggtggctagctgaaaatatacaacgttcagtcaatgcccacgttaaatacttttgaacggagaaattatatcttaggctctgttccttaagattattcacactgattatttgttttatgttttgaaaatatgttttccaaatgatctttcttctactatatcgcttaattagaccactcattttaaactatttgtatgaagtatatatttttaaaaatatttgatttattcctatagtcaagtagataatccattacaataatttgaaaagaaatggcccttaatatatcttaaatgtattaaaaaaatagacctatccaaggcatgaccttaaatacctagtcttgtttgtgaatgcattgcagagccagaaaaatatcgagagcttaggctaatctaagcatatgcatggacatggacatatgcatattcagatttgtaccaggattggattttttttttacatgttagatggagtcacatgcaaaagagtatatagagttcaagcatgtaaaatttcttgatccgtgctttaacctcatgatactgcgaatcaactactcctatgaagttagcggacgttgacaattgagtgtcccgaggcagtctatgtcagaatgtcagatgattgtagtgtaccgactcaggggctcagggcgatatcactgacagacagcaacaaagcagccactgttttctgctgttaaatcgtaaccaccggctggcgtctgcatttcagatcgatttctgtcatcgcactcaagcaaaagccatttttgcagcgtcggattcgatgttagtgtttcacgggaaggcgtacggtacttctttttgggacagtaaacatcggcatttgcagcagtgttacgggtacgtcctgattcctgatggctaactggcctttttcgtcagtaatcgcaggagtcaccaacataatgatggtgcacaccatacgtaccagtttaccatgggaatgtgggagtcgcatccaaagtatttccccattattttgaagttgtttggcggaaatcaaggttgggaagaaaagattttcctgtgtataccctaattaaatgatcaatggattaagataggagaatagttgagattaagatagaaagaaatttgaacgaaaaataattggtagaataaggagttatttgaatgcttatattggtggataaattttaatcccttaacttatattgatgaacatatgaagtagtttgacatattagtttcagagggattttatgggtgtgtttagttcacgctaaaattggaagtttgattaaaattgaaacaatgtgacggaaaagttaaaagtttatgtgtataggaaagttttgatgtgaccgaaaagttagtagtttaaagaaaaagttggaaactaaaccagccctatgtagcatgaacgaatcgaaacggcaacctgcagatgtctcattttgattttaaggaaaagctaccggcaggcacatccatgactgaatattggttcagactgaattcagtagtgcagatcattggcattatactaggagtaccaatttagcaacttgcaataccttgaagaaacaggacaatctgcagatgtcaaagataaaattgatctgtattccgcggagttgatgctctggaaaggttcagtgaaatgccaatccaacttgttagaatgtagattatcaccagaaaattagttcaggttaagtcagtcaatttgctttatttctgcagtcttgctttaacctttaggatggtaagtaataataagtacggatcgaagacactatggttggcagctcaagtatcctctggaaactaaaagagtaaaaaaaagttaggtgcagatggaagcacgcaatattcttagctgcaagatttgcaattaaaattcaaaatcagtctatactctttagaagcacattaattcctctttgtttaaaaaatagagaagtgtgctttcagaaggaatcgagatggcaacgtactctgcatttctggaacctgcagaatgatctggtaaactggttctagatattggttacacattaaattcagtagcgcagatcattgattcatctagccattgagataaggggctccctacttatatattaggtcatttgcccttccacaaccaatgtgggactattcaacacatccggcccaggtggcgttggccgaggcccaataaattaaggttgattcatcattcatgggcattgatatatccggcctaggtggcgttggccgaagcccaataaattaaggttgtccggaccccaacagttcttaggcacacccactcgggaaaatgaccaatctccctaaaatacagtccaatagaggaatggtggctctcccttttaaggtggcttaatcctcccaagctaagcaaggtgggattattcagaggctcacacggtcgccgcccaactacaactggaccacttggccccttattgcgtctttgccagcggttaatagtggaggatatcctcatcaggcatagtacttcttcagataataatgacaatttgcagatgccaaatatacaattatcttatctgtattccacacagttgagatgctctacaaaacttcagtgcaatatcaaagaatgttggcatgcagattattattagggtaagtttatcatcattgagaagatacctagagatatcatattttctagtgtaaaatttgatacttctatatactaattcccaaaagtaccaaaatttaagtatctgaaggtactttcttaatgaccataaaattcctcttattattaactcttatgaacagaatatgagttcataacttcaggttaagtgggttattttgcttcgtttcagcttgaaaccttcgatgtgttgacgtttttttacagagtttactcagagaactcggaacatggtgaatcaattaaggcccggtttagctgtttagttcaggaaaagaaaatttttgggtgtcacatcggacgtttgaccggatatcggaatgggttttcggacacgaacgaaaaaactaatttcataactcgccttgaaaccgtgagatgaatttattaagcctaactaatccgtcattagcacatgtgggttactgtaatacttatggataatctaatcatgaactaattaggtttaaaagattcatctcgcgattttcatgcaaactgtacaattagttttttattttatctatatttaatgctttatacatgtgtccaaaggtttaatgtgattttttggaaaaaaaaatatgggaactaaccaagccctaaaccaaggtagagtatactgcaatatgtacagtaaattaacgcattcaggtttcttgccgccagtaagtcaaagtatgataactccatcgatcaagaaagacgacgtgggttagccacataaaatccaagcagaaccgtgtattagtacatgtcttcaattgtccattgaaacaaaaaagagtgaagtagcacagtaacatgaatcatgcgaattccgaaagggtaaaggaataatacctcagatatcatataaaaaatgggcgatggaaagtacaagctaacacacatactagtatttcttagcgggagctgcaagcctgtaagtgatttctgcactataggaagttatgcttcggtttacaatattcaggattatacagctatctcagcagcacagtaccatcaaactctccctatcagccactcacttcattgtaaacatgatagaggactaaattaaatacgcataaaaattaaattcagcagtgaagatcataagcactataacatgattaacacgttagtaacttagcagggtagcagtcataaagaaacagaataatctgcagaacaaagaagcatgaactgaaatgcaaatctgttgacacgtgtataggaaactaactgaacggcaattcatcatcttcagaatttcttcactgaattaaggaatccttcatcagcttacaccagcaagaaacagtttctacacgagatcaccatcgaactcagcgagaagcttgaaagaaacaagcaacacacagaactgatgaaggcatcaagcacattgatctctaactaatcacctgatctggtgcccaaacttgccgcctcacttaagggagaatcctcaatggttggtagctcaagtatcatctggacaaaggaaaaggataggtgctagatcaaagcacacaatgttcttaggtgcaagtgattgttttctgcggagggactctagaagagtgactctagacagtgcgttgcggcttgcgttgtgctgggccggtgatctccaagacaggcctatctgaaatctcatagcaggccaagatgggcttcttttgaagcgagaaagatccatcggagcattttgggctggatttcttcaggtccattaatctgttccaagccaattgcacacaacacatggtgacatggagcagtgtagctgggttcgttttgagcttttttttttttactttttaaatttttaattctaaaaacaaactctccaaaaacttagtttcaagtacgaatctttttgtcatgccagtcgaactgactacagtgacgaaatgaagcttccatgctgacgccctcttgggggtgtgtattgttgtttaacacgcttggcggggtggcatggtcaaaacgtttatgaggatttatttttaaattaaaagtaaaataataataaacattatcgttggaatgttttagtagggctctaggtcctatattctggtcttatatagcaggccggtgcttaagcaaatggcagtccatttagaacattttgaagaccatctcatattcattgcaaaaattaaattcaggagtgcaataaccgcactgcccatcaatccatacgaaattattcataagcctctgatccactatcctggctgatcaatagagccatgcccactcacccacacgctttttattttttctatctttttaataatggaatgaaacatcttggcttttgctcaagagctatagccaattattacaaggttcacacaaaaacaaactcacacagtgagtatgtagccagtagccaaagtaacaaaaccaaaagtagaagcaaactaataagaatcaaacaaggtaaagacctcataactactgaattctattgatgaatctccacttgaagttggcaaagagcttcatgatcgtcgactcaaatatacgacacgcatcttttattagcttgatatgatcatcatgtctttgtaactgagcccattcctagagccaatatgttatcctgaaaagtgcctacaaataaaattttgaaggtgatctatcaaaaatcatttcatttcactaagccagagagcccaacatacagttgaagctccaacaaaaataagttccttgatctttttattttttccatttagccactcctcccccaccgctagctattcttctccgccgaccttctcaatgtaggatctgaaacaccaagcaactgacgaagtggatgaacaacatgttacccacgtaggacaccttttatctcgccaccgcaaaaccacaatatgcggaagataacaatcgaaccatcaatgtcagttgaaagcaaacaggatcttcataggatcatcctctttcccttttatgtgatcgtgccaaatcataggaagaatgggtagctagaccctcacatagttctagctaaagctaatttttattcataatattgagtctcccttacaatggacgcacacctattgcttatatataacaatcctaagacctacaaacaagaaacaaactcgttagatgacttggacacgaagaaaaaaaaacttttgttgcagcaaccctatgctagtttggtagattaccgataaaccatgaagaatgtgaaggtgggaccaaaccttgacatgagtcataaaattagctttccaacaagtaatcaaatgtccaaaatagagtccgtatgtgaaatccacgactgtttcatcataggcttgtccaggctgttcgaaccgaatagaaaccttcttattgtaatatcaaggagttgatttatattttgtgtgatgaaaacattggtggttttcgatatatcatgtgtgaaagattggtttcttatgataagatttcagagtttaatagatgattgattttgtgaagtgatgtttctgttgaccccgggtgtcgcccgtcagaccgtatgtcatgcagccgtcagactagccaacccaatggtatgaccggcaggatcctgatcattattggtttcgggttatcttgttggatttggatgttttcttcgaggatttgacttctagatggtttatatacgtatggatactattgttatactaatgtgagtcaagttgggataaacttgtgctcggaatatggtttcttggttgtttgcatgtgcagatgttgcttacggcctcgggagagtgttgccggtgatagatcggagttgacttgggagaagttgatgtctagggatcaggagatcatgtgggatactaaaaggatagagaacaatgcacgtggtgatgaagaatccatatggtatgcaagagggattgtgtatgtatggaaagaggagtcaaatttggaagggagtccaaattctagaagattgatagagataaggaaagggataagttgtatacttgcaatagagggtttcccacatggttaggagtcctaagttgtgtttgctttgtaggctttgcacagcctacctcgtgtataaatagaaagggaaggtgtggcctcccggtatcggttgttgagagacttaagttgagagaaagttagggtttcgagtttagttcgagattttggtgaggaatgctgttggtgcactttgtaaacactagttgatgccaaaaagtcgaaagtttcaatcttcatcttcgaatttgtcatctgtcagtgctttttgggtcctgacggtctatccgcatgtgttcgggtggtctaaccggtgggatagcggcgatctgaccgcacgtgttcgggtggtctaaccggtggcaggtgggcggttcgaccgacgacaatagtgcttcgtcatctactctattcgaggtaaatcttttattccgcaaaaaggttttgggttttaggttttccctaccattcaccctccccccctctggtagatttgtttgatcttatgtgatccttcaattatcttcgaatttctcatttggaaacaattcaatccgtgcagatgagataattgttgacttatggattatggatagtgttggaatagacgaaaactatctaatcataccgtagaatccacaaactctccaaacagagcaattatgtcgtgtcacttttacaacatgggcaaccttcagtaaaattgccactacttttgattggaacatccaaatcatatgactttgatctgttagaaagacgaattgaaaacctatctaaatatgaccttttgatactttgaattcctataatttgatgcacaaatcttcagacaattgacggctagtactgcaccatatcctcatcaacctcccctcctcctcccaatggcatggaaaggttcgatttatttgctgcgaattcagggcctgatgatcttgtggcggtaagctcttggccaccaaatctggcttgtccatgtgattctggcacaagaccatggcaacggtaatgattatgacttcatccgatgcccaaattcgtccactccaaggtgagtgctagcataggtggtgatgggcacgataggcaatggaggcctatagtgatattcccttcgtcccacaataagttaatctagtaatggatgtgacacattctaattttactaatctggataggagcctatccagattcatagtactaggacatgtcacatccaatactagattaacttattattggacggaagtagtactttgtgatggtgatggaagtatgagatctatcaaatgaatggttgacgactcggcataggtgactcatgccggttgggaaccggcgataggtggcggatttcccaaccagtaccctgcaagcaacacctttgaggttcttggaatgcaaaaataaagccggctccccatcaccactgagatcaccgtcatgcccatcacccaagaacatgatcacaaaatcaaccttgaaaaacaaaatttgagagggatgatcaaaatcaacaaaatcacatagcgaagaacacacatagaatgccacctttgccgatgttgccttcgtcgagagggccatccctgtggttgcgatggcggatccacccacccccgagcttgcggcggcgtatccgtccaccaccaaggggtgggcgcaaggcggcagttctgcccacccccgagtgcacggcggtgaatacggcagctcctatgctcgtggagtagatctagccagcctcaagagagaaatgaagcgatgtaggcgaggatttctatcggtggctgtggcaaagaggagacaccgtgagcgaagacgaccgtaagtggttacggctgcatcggtggagaggaggagacgtcatgggcgaaatggaccggtggtggctgcggtggaggagaggaggaggaacaatggtgggggcgaacgatgatgatgggcgaggaagagctagccaccgcccgtgcccgagaggtggccggccatcgtccgtgctagagaggtctccgagacaggagatgaggagtggagagagcagataaggatggggagagcagcggtctcttctactaagtggaaacggtgaccgtaaaaaaaaccggtctcacccatggccggtcttggctcgctctagtaggtgtcgtctttttttaaaaccagcaccaataacactattataagtaccgatttattaaaaaaaggtacaaataattattagtgctggtttaataagaattaatggtgccggttttcaatttcagacgtcccatgaatggaaagggatcatgagtgccaattttagataaatcggtacctttagtgcgtatcacggccggttaattgatcggctttgaaggtgcttgggcataactgcttcccctttcaatgattcggttcgtgggctccaaatccggcgttggttgcagtttgcaactcgggtatgcgcgcagtagcaaacgaatcacgaaatgttcgtaaagccctgacgactgccactggtggagatgtgctttttagtcccggtttgtaaacccctgtagtcctgttttttaaaccgggactaccaatccgggactaaatatcgctatctttagtcccggttcaaatacctaggactaaagatcgatctttagtcccggttggtatcaaccgggactaaagagaggggatctttagtctcggttgctaacaccaaccgggactaaaaagagggaagcggcagtgagatggtccccttttcttttttttcttttttattttctcccgaatcgagtgggatatatatcccaaatcaaacccaaatccccaaatcaaagtaacatctcaaatctacatcacaaatcttaaagttacttatacacacaaatcaaatacatcacaaatcctacaaaaattacaaacatatcaaatacatcacagatccatacaaacgtgcaatgaatcacaaaattatccacacaaatatgcaaatgggctgccgctgccgccggccgcctgccagccgccgccgggcgtggccccaccggccgccgccgcacggccgcctcgctccgccgctgccgcacggccgcgcggccgcctcgctccg

SEQ ID NO: 9915 - DNA, 41859 bp, Oryza sativa
tgaggctgccatggctgcttccatttgttcctcctcgtcggcatcacctgttaggtcataatagttgacccctgccgcttcaacccttctattgctatcattctgacgcttgtcacctgtttgttttatcctctccaattcacgcttgaagaaatcacggacatccggaggcactgaattgcaatatgtaacccccttccctttgtgtcccaagtgcatttttagtcgtgtggccccaccacctttcttcctctgatggcaatacttacaacgccatccaggtgcaaaattctccccgtgctcccacacaaggtccctactttctgccatctccaccctatatgaaatgcatgaaaaattatcactaggaattataaacatacctctcataacgcaataatatgtatacagctaagctttcacccaaattcgggcatgtatacaacaaaacaatcaaatgtacttcacatgcatggttttaggcaagtacgggcaaccaaattcgctaataaactcatattcccaacgtacttcacataatccccaaatataattcatattcacaatgttttcacctaatatgttcatatgacagtataaaaaaacatataccacggtttcacgcacggtaaccacagtatcaaccacggttaccgcggtttaaacaacgattaccgtgctcaacaatagcagcgaacgtaaataacaggctacggtttctctcccaaaccgcacggttaccggacaaatctcgcggtaaccgccccctctcatgcgcatacctgttggtgggcgagccagtcggtaaccgcctcctaccacacggttaccgctgcataccgcgcggaaatcagccacgccggcgcggaggcggcggatctggcgcggcagtcctcgtcgccccttcgaagcaatgcgcagctgtgagagagagaggaaagaaatagaagaacgcgacagaaaccaggaagagatgcggtagatattttccccccactgttgggccttattgggcctcctgaacagtgcatatttggcccattacattaattattttttctattttctaatcgacattagtttttgcgctcaaatttgaatttctcttactatttttcaagaaatttttacaccataacaacatacaaatcaagctatacatccatgatttttttttgattttttttggttatttttgaaaattttgaatttgagcaaaatttgctcaaaccctaccgtcggtaagggttaccgaccccccgcggtacggccggttaccgcggtaaccgcgcggtaaccggcggtagggtgaaccctgctctcacgtggccagatcaaacccccacctctcgttaaccctaccaatcagctgcttcggtaaaaaaatgaaatcccaaacaaaccaaaccgattttgttcggtcttctcgtgtcggttttattttttctacaactagaaaggtagcccgcgcattcgtacggacatgcatcgtagactatgtttgagaacctataacgatgaaatgttaatcggaacttataaaagatcactttattttttttgattatttgagcacatttagaaaaaaacattaagtaattggactattttctctaattaaaggaactcgatgttttatgcagtggctcggactattcatatttcagttagttatttttgtttatgaagtgtatgtttaatttagctatatatgtttcaaaacatatcactatactctgtgttgttgagttatttctttttcttttggcaaattaaatttgaaaattttgttccggtactatttatttaatttagttatgcatgtttgtagaatttttcataatgacataatatttattgtcaaaattgtaaggtatttagatgtggtgcaaagtgcacgggtggactgtgcccaaatgctataattcttatacagcaaaatatatgcatatataaatattacattgttagtttaattataaatagagaataattagacagaaatcagacatgtatagcttataaaaaatctgtagttgtttcaacattcattgtttctcttctagtttagtagctaaaaaaataaggaatgggagcgcagtgttttctacatgtgagatggaggatgaggtggagggattttagtgaaaaccgatgagagatgttttttttttctcagcatttcttttattgtttttataacttgtaagacatgacacatgttgtcttatgttttttttttaaaaaatagatgacatgtgttacttattgttctttcaaaaataaatctaattgatgaaaataatgaaatccatcgagttatgttggattgttttctattttttgagacatgatacatggttacttacaagtgcaatatgggacgtttaatcaaattttatcaagtagactgatttaatatgccataatgcatatagtcaaccttttcgaaatgtctaattcctatttggtttccatgcaaaacataagtgtcaatgttcaaatgatgtatttaaatttataataaaaatatggataatatggaacttgaattatttatttagttataaataaaacaacaattgaaacaaactaaaaataagatacaacttttaaaattataatcattaatctttctaattattgttttttttacataatgttgtccattgaaaaaaagagaggatgtgaagggagagaagcagagatattgtacgtatggagatgtcacttgaacacatatatgacgtgtgaaggggtgagaagtgggtcttttccgtttttacattgttaagatagcagtagaaaataataggtatactatgaatgagttaaaataatcaatggttaggtgtattatataatttctttagaatttccaagatttattgtacattactagagaaaccatctttggtcagtcgcccaaaaaccacaatagtcccagttcgaataggaaccggaactaaagattatttttaatcccaattaaaatatttttgatctttagtcccagttggtgttaccaatcgggactaaaaaaacatttttagtcccggttcaaagaagttattaggtcgagttaggccctaattacctttagtactgttggtataaacaatcggaactaaagatcaaataactgggactaaaaatagatctttagttccggttctttatacctaccaggaacaaaaatcctcccgagcgcacgtcgagtcctctctctcggtcttaccggtaagaccgataaaaaccatctctacttcgtctctcattaaaaaccatctccactctccagcttcctcgatcccatctcaatatcgggcattctccttctcaatcggcctcctctctctgaccccctctcccctccgaccccccctctcctctcctccccctccccgcctcctcctcctcctaccacggcctctctgggttagcggcggccagtcggggtcggcggcgggccagccgggcgctgtactggatcgggcgggagggcaggaggggcgttggattgggcgggagcggcggtgcctctggctcccatccgccagatccggcggcggtggtggaacgacgacggcggcggtcgccgggctagggaggtgcgcgcggcggccttcggaatttgttttctttttttgaggatttgtgatgattgtttttgagaatttgttatgtgatgaaatgaggggaaaaaccaattacaccgtttgcgtgtaaattgcgagacaaatcttttaagtctaattgcgccacgatttgacaatgtggtactataataaacatttaataatgatggattaattgggcttaataaattcgtcttgcggtttcccggtggaatctgtaatctgttttgttattagacaatgtttaatacttcaaatgtgtgtccgtatatccgatgtgacacccaaaacaaatttttttgggaactaaaccgggccctagtagagttctttgtggaggtttagtattcttttatctgaattaatttataatcggatgaattcatattgttttaatttacttaatactatcattataatttatttgtggtggttttttcaaaatttgtgatgtaatttttttggaatttatgatgaatttaatatgtgattcggagatgatttggggatttgtctattaggggatgtagtgattggtgaaatcaatatgaaaaaaaactctagacttatatctatatattcatagccaatgctagaataacttacattatgaaacggaggaagtacatttttctgacattgtagatctattttagttacatgccagtgaagttattatatagcatgaaacaatatactaatgtcactttcttttcataatttttacaagctaaattatagtcaagaggtgtattaaattctaatttgtgattttagtcataataatgacacaaacagaacatataatttcatccgatagcaaaaaaaaaaaaaaaacttccttacaagagaaatggagaggagttatatacatgcgtatgcacgggaagaggggacgcctcttcgaaagaaatagaaaaatcaatctaatccaacggtttggagtgatgggctaggttttagtgaaatcaaaggctaggtttttttttctcaggttttttctaatttattggagcgccacgtggcattataggagcatttatataagcatcatgtggcagcttagaaacatttatagaaattttcatggacttttactatataatagatatattggatatcattgatataatttagcgaaatatatttgtagaattatttaaggtgatatataatatgccaactggagatgaggagagagagggagtacgtacgtacaggaggccaggaggggaacgtacaggtgatggggaccggtgtggagaggaggattttttttatttgatctaatggttaaaaatgttagacccaccaatttaaaaggaaaatcaacggttagatttttagactgccacttggcatcttaagagcgtttataggagacccaccaatttaaaggaaaatcaacggttagattgttagactgccacttggcatcttagtagcgtttgtaggagaacatgtggcggcttaggagcatttgtaggaagtttaatggactttttagtatataataataactagaaaggtagcccgcgcatatgcgcgggcatgtgcgtaaaattttattacgaatgtccatgtctggatggttttatatcaaaaatattcttttactttatcataaactaaaatttaacatatttaacgtgctttgaacgttggttacttgctaacatataaattgtgaactaaaattacttcaaaacagtgttcttttaattcatgagaaaattttgtatcgaaacaattgatgtgtttcctatgaatgtccaattttttttttggttaaattctatttgaaattttaaatatattcatttgattagtcctggtaaaatgtttggatatttctatttagaatgggttataaacccaacgaaaagaaatttaaaattagataaattttgtttaattttcatttctttttatcttcatttttttggacaaatccactttatgaagcatcttgaaatgctttgatctatgtaaatcgggatgaaaatataagtgggttgatcctacaacctagcatggggtaaaggcatccattctaaattatctcgctccaatcaactaagaaaatttaaaatagaggccatagtattttcttagcaaattaccactgaactggagcgtcatgtaataattacacgtttctagattgttctatgctatgtcacaaattcgcgatgtactgtagcaagttttacccgaaaagtaaatggatacggtcttttaattcctatctggaattggcttatatattattgaggccacataatggttgttttactcttaagattccttggtgcaaccaacgtgcttagtatgatcggtatgttgttcaactggccacgtgacttcatagatcatatatataatatagatgatatgatcattttaagattatgtatttatctcctaaaatgatcatttattcataaaagcatcaatatcaaaatgtatgggtaaatagctcctgtatactcgctgaaaataaaattaattaagttgatagaaagttgttagatgtctaacgggatataagtaatggatctaccagttttattaaaaattaaggtgggatactttgatttttagtgagcaactttagtattttattttatttagggtaaaatttgctacaggacattaaaaaatgtaattagctagggacaccgtaagaatgcgtatcagctgtaggacaccgaaaaaactgctatttagttgctggacacccgcaacattattttataatgtccaatggaaatggagagagaaacaataacaaaagtacaatttttccccttgcctaccaagtccggctcgcatacacctctgacgcagcaaccggacccgccaccggtgaggtggctatctagaggggggagggggtttcaaggagagcccatgcgcctgggcccgtagctacatgtcgttcccgcactcatcgtcgctgcagcgcgagggccatgccagtgtcgatgctctgccacacaccgcgcttgagggtgagcacaacatggagcacctcctgatttatgtcgagcagggtgccgcagagcgctggctattgttgtcggtctcacagccacgccacgccacgccacgctgccatatcctccaccgttcatgtcgtgactacaatggcgtcagacctatatgcgagccgcatatggcaggaaggggcaaaatcatactttcatgattgtttctctccctttcctttcgatgtaaaaaaataatgccacgggtatccaaccgctaattaccattttttttctgtgtcccatagcatatatatgttcttccagtgtctctcaactaactacacttcttttatgtcctgtagcaaattttatctttattaagtagaggcttcaatatggatgtgggttcataaagtaattttttttataaaaattagcacttaaatatagtcaatatcggtattaagttattgtttccacttaaaaaaaaatagccggctagacctaatagatggagattcatttgtggtcttttctttgcccataaaaataattttaattttaattttcatagagacagaaaaaacagagaaaagtaacgctgcacaccgcatggggacggggatggagggaggtttggtatgtttcttttttttagaaaaaaaatgattgatctgacggcataaaataatgtgttgaagtttaagccaaaatcgatggttggatattattttttttctcagatttattataatcttttctaatttaagtgagacaagtagcagcttggcaaaatgcccatagggatggagaggaagagaggaagggaagatgatttgaggtgtttttttagtaaaaaaaagatccaataacgatgtaaattaatgtgtccagatttaagtggaaaccaatggatcgatgtttctctaatgtcatacaacgatttagaaatatttatagaatgtttaatggactttaacacctatttatgagattgttttgcataatcataattttaatttaaattgtgatagggataaaaaaaagagaaaggaacaaggagcctggtcgcacggatatgggaacgtgggaggtgtgggaggttttggttttctaccatagatctaacgatatagaataatgggtccactgatttaaatgaatatcgatatttattgagtgacttgagattatttatagggtgccatgtgacggtttgggagtgtttgtagaaagtttaatggattttatttattatataatagatagatagatagatagatatagatggtactatgtaagtatggttttttcgctttatcttatacggtagaaaattatattctatatttttcttccgatgatactttgtttgtattctttttttttttgctttatctctattttaatacggcctggcattttttttcttccacgaacggaacatgagcgctttttttcctgaatcatacgtactggagatacttgatttatttttgccaaccgtaggtactttcactttttatacagggaagatattatatatacactaatgattaatctaaactaatgggtacaccaatttaatgaaaataaacaatacatatatatctaatctaatagaccaaaataacaggtccaccaattaaataaaaatcgatggtgtgattagatagtgccacgtgacggtacatgagtatttattgtattttttttgctttatctcttttataacatggccgggtaatttttttttcttccggcgaacggaacgtgaacgcttttttccccgaatcatatttaccggagatacttgattttttttttgccgacgtacgtattttcacttttataatgggaaggtatatacatttgtcagggatacgggttaggcatactctttacccttcgatatacgtcacatatcggtacagtatacccacgcgtatacggatacttactgcgtattccaaggaaatccttcacggaatctacggatgggaagaatcctactcggacaagactgggtcgttgatgtatcgtatagggtctgatatctctgagttctacttggagacctccagatctgcgatataaaagggaccccccggggagggcttaaggcatcaaatctcagagccaacacagcccacacagcctacgaagtcagagcctgcaaggagccaagccatcgggatctagtcgaaccaactcgactacgatctcgccggatccgacaaattccattgtcccctttgtaacctgtgttttccaccatataatcccacatcaactgaattagggctattacctatcaaggggcctgaaccagtataatcctcgtcttttgtttgcttgatgtcgtattacgtagatccttataccaacgtaccccaataccctctatatccggtctacaggtaccatccgtcgacagttgcgcgccaggtaggggcacttggtacttaaggttctactactatgtcatccagcttcgtcgacaacagcgtcaacaccaacctcagccaagtactccctgctttaacgatgctggtgtggaatcaagtcggcgaaatcgtcttcccggtttacaccacgacgccgatctcaaccgatcccccaatgaccggaaacgagaacgcagtggctacaaaccaacgagactccatgtcgaaaaatcctcccgctgagacggagaacggagcatcgacgacatccgagctcgagaaggattctgatgtggccaaaccttgtccttccgacataaaccgcgagccgacaaagatgacttccgaagccacaaggtcctgttgtcctatccacaaaaccaagaaacacactttgcaagcctgctgggttttcctcaatgtccgcgctgaaattcgcgcctgcaaagagcgtgggattcagcgtatttctccaattcgcgatgtctattatcctattcacaagataaagaatcacgacatctcaagctgcgaggtctttctcggcgccatgaaagctccgtctcctaagtcatacgtccccatcagggataacgacaagtaacaaggagcgactccaacttcagatcgattcgttggggtaatcgatatcgatcctcacgaaccatcagtcttacaccttctcgaagactatgggtcatcgacaacgagcgcgccgtgggaggtattggccattgatgacgttggcacgtcagcccatgccaacgcagaagcggggaatcaattgactacaccagcccagcacattagaaccgttcaagctatactgagggaaactccctacgatcccgttctgaacgatgacctcgagcattggatagaacgactacgggaatcagtgaccaacctcagcaacgcgttcgaagaagccgctaccgcagtgcacccggagcagccaccaactggcgatgccaatggtgaaaacccggaacggagggaataacctcaacgagctacccctccacctcgcggcactagcgatctccgagatcacatcaacagccgccgagaggcacaacgcacacgagacaatgtgaatcattctcggcgtcatgtctcttcacagcgccatgataacgaaaatcgagaagaccgctcaaacgacgaccgagaccaggactaccaccacgatcacaacggtcgcaaacgacgggtgccagacaatactggttgaggccgtcgccataacgacgacgatgacggagatcggcgccgagacaacagcgggagacgacgacaagattcccgagatccaggccgacatcctcgtaatcgtatgccggaaccaagtgacccatcgtcatcgtcatcatccttgtcctcctcatcgtcagacagacatccacgaaggacacacgaccgccgacaacccaccgcccccaacgctgggtgtagggctttcggtcgttccctgcgtgatgtccgatggactgagagattccgacctggagcaatagaaaagtatgatgggagcaccgacctagaggagttccttcaagtctactccacagtgctctacgctgctggagcagacgacaacgcgttggcgaattatttactgtcgcgtcccaaaacgactataaaatacatcctcaaaattgtgcatagaataagtaaaatccatgtgaaagcctccaacaattaaaatgtgcaaagttaaaagtcgaataaggcttggaggatttttgtatatttcctaaaagcctaaaatgcgtaaataaattttagtggaattttcagagcacaaataataattaagaagaaataaacaaagttaaaaaggttttataaaaagaaaaaccctaaaaagtttcttttcccaccccctctccctcttgggccggctcggcccacctccctccctctctctcctctcccccgcggcccaatcggccccctccccacgcgcgcgtgccgctgacgggcgggcccgcccgccaccctcgctgacgggtggggcccacccgtcatccccttcctcccgccgctcccgccgcctcgcccgtgccctagcgccgccgccgccgtgaatcccgccgcctcccgccgtccccgcgcgcaataaagagggggaaatcactccccgtgattccctccctctttccccccacttttccctctctctctccctcggattcgttcggaaagtttgcccccgctaacttcgccggcgcatcaatggcggccggatcttccgtggccgattccccctcatccggccgctctctccctctcccaacactatataaacgctccccgtgcctccctccaccgtttccgccactcgctgctctctctccccgtcggaatcgagctcgcgccgtcgttctctctctccgccgtcgccgccgagctccggtccgccgccgtcgtcgccccggaccctctcccgtttcggcgtcgccttcttcaggttcgccgcaacctcgccgacctcgtccacccctccgtttcgcccgccgaccgccggaacgccgtcctcgtcgacccgagccgcgccgccgccttcctccgctccggtcgccgttcccgtcgtcgccgtcgacccggggtgagccgtggaccgccgtttcacttcccccttccctcccctctctcgggcgccgctccgccgcgccggtggtcgccggcggcgagcatcggggcgcgggtgcgccgcctcccgtcggctgtgccggcgtggccgccttcgggcgcgccccgcggctgccatgtggggcccggccgtcagccgcccgcgccctcgggtgcggctgacgcgtgggacccacggcgccggccggcgtaagccgcgtgcacccggtccaccgtggaccgtgaggctgccacgtgggccccactcccgtggacccggtccgcgcgcccctcccctcggctgacgcaataaatccgattttaaattaaaatttaaatgaagaaattcgtaaatatccatttaaagagcagataaacttcaaatggccataacttggccatttgaactcggaattggaccgttcaagtctctaatttttccttaagaagccaagaacccatttttgtgctttgtttctgcttgttatatggagtttagtagagtaaaagccgtttcttttccgttggtcgtgtagacgctgcagcttcggaagatccgctcttcgtggaggttgaagccggcgtttgggaaagcgagcaaggcaagtcacatcatctttgaacatattgaatcccagtttgtaaaattatgttgatttaacttattgcgttatcgctttatttaaattcccgcgttatcactgttttatttagccatgcctatttacctttgttatgaccttattattattgttattattattattaccttgttcaccctagaataaacaaaaccccaactagtggaccctctactcatggtaccactagtataattttaggtagatgcttcgcttttaattaggtaacattaggcggttttacaactctagactttgggaatattcatatcacctggacactatggaatggtttggttattgtggaattggctgggctcggggtgcatggttttgatagtagcacctcggccatataaggaccggtcttcgggcctctgttgaaaagcactaccgtacttccacatgtctagtgggtaaggcttagtttgtggctcagtctagttataaacaaaagtacacggatggagatggaagaagtcgggggtcgatggacatctccagggcaaatgaaggctacacgagctgcggcccggtagtcgagatgtcatggcacagggccggtgtcctgctgctaggggctcagtcctgcctgcctgtcccgggggttccggccgtaggtgggattgggtcggtactcttgtctatggctaggatgggttggaaactatgtcacgtcttccgtctgtataccgtggtggtatgtggcacgtggttacacgtgaggaagatgtgtcttgtgggtaaagatgtacacctctgctcagagtataatctattcgaatagccgcgccctcggttatgggcaagccgagcaatgtacccaagttagtgttttaattcttaaaacctgcttaacaactaaaatgtggaatggttagcctgggttggcttgggacgagctgggacccagggtcgggttgccagttcggtctgaatcatcgtaggccttgggttaaggcaggttcgtttgggttcacggccttgataaataatattgcatagtactagaatcgtctttgcaaaatagccctgagcaactaatgtctttaaatgctgtttactgcaaccctaaccctttatagtataactcctttgtactcccttgcatttattctgcacttgtgggtgtgtcttgttgagtacggtggttgtactcagtcttgctcaatttttcccaaacccagaagaggagttcctggaggatgaaggcttcggtgtctagctcgtgcctgccgtcaagtgcctgtggtcgtcgccctagtcttccgctgtttctcgtttgtctttgtgtgtgctgggccttcgctgcccatgtaatagattaactatttacgcttccgcttgttaaactctgaattgtatcaacttttggtgtaccttgcctcctaggacaaggattaatgcacgcacgtaaggaacgcccgttgggttatttccggtcgtgacatttaccaactgcgttgaaaggttctgcacgttcatggctgatgcatcttcctccctactcaatctcttcgtgggcagacctgtggcaacagttcgtcgccaatttccaaggaacatacaagcgccacgcgatcgaagacgacctatacgcgttgacacagaactcgggtgaatcattgagggaatatgttcggcgcttcaacgagtgcagaaatacaatccccgaaatcaccgacgcttctgtaattcgcgccttcgattccggtgtcagagattgctatactacccaggagttggcgacaagacgcatcacaacctctcagagattgttcgagattgttcagcgatgcgcccacgcagatgatgcgctaagacgcaagaacgataagccgaagaccgggggagagaagaaaccagccacaaacgcatctgagtcaagcaagaagaaaaatcgcaaaaatgggaaaaggaaagctcaagcggaagtcctcgcagcggaatacgcgaaccctcctaagcgaccagacccacaaagtagcgacacaaggaaagcatggtgccccatacacaagacgaacagacattctctggaagattgccttgttttcagaaaatcgctcgagaagcacatcgcatttgaaaaaggcaagcgagtacgcgtggtcgagaagaatgaggaggcagttcctcacgaatcggattcagcatttccagactccgacttccacgtttcacacatcttcagaggctccacaacgtactcctcaaagcgagaatacaagaaagtggaacatgaagtctgttcgacttggcagggggctgcacccaagatgaagtggtctgagcagaagatagagttctcggaaggagaccaccccaagaccgccgtcatcctaggacgatatccgatcatggtcgaacccactattcggaacatcaaggtagcgtgagtcctcattgacggtggcagctcaatcaatcttcttttcgccagcactttggacgcgatgggaattccgcaaagcgagttgacaccaaccgatcaacccttccatggaattactccccaatcatcgtctagaccattgggcaagattacgttgcttgtaactttcggccaagccaacaacctccgaacagagcagatcacctttgatgtcgctgaattcgatacagcttacaacgccatcatcgggagaactacgcttgcgaagttcatggccgcatctcactaagcgtatcaagtgctcaagatgccgggaccgaagggaacaatcactattcaagggaacgcaaaactggcggtgcagtgcaacaagcggagcctcgacatagtcgagcaaacgcccaacccacccgccacgactgagccacccaagaaagtgagcaagacaaacaagacgccgaaaccagatggcgccatcaagatcgttccactttccagtgccaaccccgacaagactgtcaagatcggggcgacactaaacgagaaataggaactcgcgctcatcaccttcctccgcgataatgctgacgtgttcgcttgacagccgtccgacatgccgggggtccccagggaggtgattgagtacaaactcatggtgcgacccgatgccaagccagtaaagcaaagactgcggagatttgcaccagaccgaaaacaagccatacgagaagagctcgacaaacttctcaaagctggcttcatcagagaagtactttatccagagtggctatccaatccaaccatggtgtggaaggccaacggaaaatggagaatgtgcgtcgacttcaccgacctcaataaggcatgccccaaggatcacttccctctccctcgaatagaccaattggtggattcaacagccggttgcgagctgttgagcttcctcgacgcttactctggctaccaccaaatcagcatggcaaaagaggacgaagagaagacagcattcctcacgccgttcggggtattttgctatgttaagatgccgttcggactgataaccgcagggaataccttccagcgcacggtccagggcgcacttagcgaccagctcagcaataatgtcaaggcatatgtcgacgacatcgttgtcaagaccaagacaggcgactcattgattgacgatctgcgggaaacgttcaacaaccttcgacgatatcgcctcatgctcaatccagagaagtgcacgttcggagtaccgtcgggcaagctgctcggattccttgtttttggcagaggaatagaagcaaaccccgagaagatcaaggcaatcgagaacatgaagtcgcccacaagactcaaggaggtacaaaagctaaccggatgcatggcggcactgagcaggttcgtcgctaggatgggagaacgaggacaacctttcttcgctctgctgaagaaacaagacaaatttgtatggacacaggaagccgaagaggcattcgttgcactcaagcgctacctatcaaacccccctgtacttgttgctccccaacctaataaagaattattcctctatattgccgccacgccatattccgttagcaccgtcattgttgtcgagagagagaaagtacaacgaccagtctattacgtcagcgaagctctccacgacgcaaagacaagatacccacaaatccaaaagctcctttacgcggtcatcatgacatcaaggaaggtatgccactactttcaagcccacagagttacagttgtctcctctttctctctcgacgaagttgtgagaaacaaagacgttatcagccgcattgcgaaatgggtagtcgagctgagccagtttgatgtccactttgtgccacgaacagccatcaagtcccaggttgtaacatcctcaaattttaaactaaaatttgacggcatcatgctggcttttgattaaatttgtttggttcaaaaatctatttgatttttatttaaaattggttcaagtattagagcccaagcaatttactctaacttattccctttattctaaactctagtgaatttgagcaaattctctcaaattcaaaccatagattatttctttagcttatcctaatattagtggagatttgctatactctaaaccctagtgaaaccttttcaaactcctagtttgaattcaaatcttttctaggaaatattcaaaatttctgaattctactattcattgcacataaggtgttcggaagaatgtctagcccacctagagcagcccaactccatccaatcttgcacaaagtttagatttgatcctagggaccacaccccactcaaaaaccgtggatttcattgcttcttcctccccttgcacgcgccgcactggcatctgattttgccgcgcgccgtgtcaccgcgcgtcggcctcggggccgtttgcatgtgcccgactgccttggcgcgccgtcgcctgtccgccgccctcagcccactgtcgtcgcaccaatattgacgacgacaaagccaggactacgaccgctgcaagaaatcaccgctcgacgccatgcgcacccgtccaagccaccgccgagttcgatttcgcttctacccggggtgaatcgcgccaattcttgccgcacggtaggattggagatagacggtggtatcccctctcacaattcaaaccattcacccccgagccagccattttcaccttcgccgccgccacgcgtcacgcccggattggcgccaacacgtcgccagcagattccaaccgcggtcaagtcaatccttcgctggtaagtattcgaacgtgacctcccgcctctcaaatcgatcttgcccgccctctctcagcctctgccacctttgcctcatccaaatcccgagctcatccaaggcgatgaaggtgcccgagctcatccgttcctcctagccctatgaataggaccccaatcccttccctgtccagcatcgatcatcaacaaccatagccccacaaccccgaagctctgcttcaccaatccatctcatcaaccaccctcgcccgtcggtcgagcaccttgtgcgcgatcgactccacccctctccatccatcttccgccctaaataacccttagaacacctatatcctaccatgttctagcataataagccctaaccaaagcactgcgtcgagttttacctcgccgcaccaaaccaagcaccgccgcccccacactgctctgttcttcgccgccgcgaagtttttccggccgcaatccgtcgtttcaaccaatctcggtgagttcttctgttacaaccatctacatactacctagattccattttagcaatccctttgcactaacatgccaccctctgagctgccgacgtgagcacggccgccacctatggaggcgctcgtcggcaactatgctccgcgccttgtcaaaggttggcaagctgtcggaatccctctggacacctcgtagatgctctagaaccccttccctagccatgtctaactcttatcaccttgatcactatctcggcctaaccgtgccaccgccgccctagccgctaggccgtccacgcatcaaattaactcctccgccgccgctcgccgtcgacggagatccctagccccctcccctcctcggccgcaaccactttcttcctctaacgctgccgcaatcctaaaccctagcgccgccggcccgacttggggaacggccggaggtagaagaagagaagagagagagactaacaggtgggacccacacacagtgccatttcacatttatttgattttcaaactttagaagcccatatattttaaaatatagatccaatttcaatgaaacttggaccaatattcttctaaaatcattctctatcttttggaccccttttcgctatttttttcattttattttattttctctatttttcttatttttggattttatttaaactcctttttgaatttgaattttatatgtctaaccctaggtcttgaggattcctctgacattctagataatatcaatcaatctcaggacatcgagcaaggcaagttaccatatacctgttgatcatttaagcctatattttataaattatttatttatagccttctattcaatattccattttctatgcataaattaatcatagaaacccaaataatttagtattgcttattttgcttacaatctggttaaaataccctatacttagattgagacaatacgtaagatttggatgatttccgggtggctagtattgtctcaatcgatataagttttactaggtacttatgtcgaacgaacgagtacgaccgcagtttctaaaatggggacagacctatttattaggttaattggcattatggcacctatgtatagtggttcttatttctaagtcctcgcgcaggaggcaactatagccgcgaagggcaactttaaccattaccatgtacaggtaaatggtttgtgatactcgagtataaactatatggtatatttctaaaccctgatcgagatgacgtggtgtcatacgatcagttcccgttaaatacctcgggaacgccataactcctcttactgctgttaacattacgttcagaacatatgaggatacaagttcatggaacaggtgccataactgttaatgacttaatactgggccatgactaaagctgataattatcagcaaatcgtggactgcgggtaaagcgtacatcatctgcagtagaatatctttgaaactattcgaatagccgtactcatggagttgagtaccgggactcatatggtactctggttagaaatataaagtttatatgttttataaattctgctataacttttccagattgtccaataccgctttttgcaaagaaccctattatatgtcaattcataacatatttccatcataacttgctgagtattgtgaatactcatccttgctcttataacccctttttcagatctgggtcaagaggaggacccatatgactattactacgaagaccccgataacttagaaaatccctgagggttttacctcactagtcagaatgtatagaacttccgctgtgtactaattagataggtgagtacctattattgtaaaacccttagtattgtaagactttaacatatgcaatgaagaaccagttatattgtatgtatcaatttttactgatccagggattgatacattaatctcagtcggatccaagttgttagttttgggctccgacacaggtactcgccgatttcgttgccgattggactatgcctgataacaaattaaacaaccaagtcgacaacgaaacatggacaatggctttcgatggcgcactcaacagccaaggagcaggggcaggattcatcttgacgtctccctccggagatcaattcaagcacgcaatccacctcaacttcagggcgaccaataacacagccgaatacaagggactactcgccgggataagagcagcagtcgcacttggggtcaagcgactaatcatcaaaggggactccgagctagtcgcgaaccaggtgcacaaagattataaatgctctaacccagagttatccaagtatctcgcagaagtcaggaagctagagaaaagattcgatgggatcgaagtccgacacatctaccgcaaagacaacatcgagccagatgacctagcacgacgagcgtctagacgagaaccgctcgagcccggcacttttctggatatcctgacgaagccatcagtgaaagaggttagcggcgaagttagcccggacacccccgacatcagctcggaggtcacaaaggcagaacgcgctgttgccgatatcgagaccacagacgactggcgcatcccactaatcaaattcatcatcagcaaggagttgccagaggacgatacagaggccgagaaaataacccgtaaagcaaagatctactgtatggtcggcaacgatctatacaagaaagcgccaaatggggtacctctcaaatgcgtctcgtccgacgacggcagacacctcctcctcgatatacatgaaggcatttgtgggtcacatgccgtcggtcggacattggtcaggaaagcttttcgacaaggtttttttctggccaaccgcccttaaaaatgcatgcgacatggtccagcgatgtgaagcctatcaattccacagtaaacacacaaagctacccgcgcaagcactccagactatccctctgacttggcagttctcgtgctgggggctagatatacttgggccattcccacgaggacagggcggctacaggttcttattcgtggctatcgacaagttcaccaaatggatcgaagtagtacccatgggggaaatcaaggccgacaacgccatcaaattcatcaaagggatattttgcacatacagactaccgcaccgcatcataaccgacaacggctcccagttcatcagcgccgatttccaggattactgcatcgggttgggggtcaaaatatgcttcgcctcggtctctcaccctccaagcaacggacaagtcgagagggcaaacggcatagtactacaagggataaaaacccgcgtctacgacagactcatgtcacacgacaaaaaatgggttgaagaactcccatcagtactatgggccgtacgcaccacaccgacaacgtctaacaaggaaacacccttcttcctcgtgtacggctctaaggccatgctccccggcgagctacgacattagagtacatgagtacagaagcactccgacgaggaccaggaggaacagcgagacatcgatgtaaatcttctcgaggagcatcgtgaacgagttgccgttcgagcagtcagctatcaacaggccctccgccgttaccacgagaagcgcatccgagcacgcatactttcgatcggcgactctgtcctccgacgggttcaaagccaagcagggcggaacaagctctcacccaattgggaaggaccttacacgatcacataagtcttgcagccaggcgcattcaaaattgcagacggcgaaggtcgtgagttagcaaattcttggaacattgaccaactacgtaaattctatgtatgagtcaataccatccgtacctgtaagacagcttacagtatcaataaagccaattcttaggcccatgttacaatcaaagtgtttttgcccaatgatcccttaccctgatgacacctagcgttgaaacctgtcctcatgtccctttacgctgtcttgacaaggcctccgaggaacctaagggatcttcggctggggacgcccagtgccgataaggccttgtcagatcctgtagagacgaaagactatgtaagatctggtcgtgtaagagttctcaccgtgcgtattaaccaagccgtgaaatcggaaatcaactttccaacttcacagctgggggctaggatcagagcttattcaaaggtccaagagccttatcctccgagaaaattcctccgacgacaaggctgggggctagagagagtgtacgactcaaacggctaactaaagtcgtgaactgagaacgcactcttacacacaacatccagagtaagaaacatttgttaatgatagatttcttttctatttcacaaaatacttcttacagtttttacacaaatcttttgctacattacacctttttcctaagatatctgtcacagggtacgaatactagcaagaaggccaacgccagtccatagactggaagatcttctcggccaacggcgacatcgatctcgccagatggtctatctccgccgaagtcctccgagaacgagcaaaaccctcacggagaaattcgaggtctaagcgcgggcgatgatctcgtaggcaagccaacaattgccctccggcgtatcggctcgatcgacaacactcctgcttcaaggcctcgtcaatacgcttgccaatgccatcgagttgagcacaggccccgttcagccacgagatgtacacggccgccaactcctcaggatctccgtggaccactcgaagttctctacagactctggccatggatgtgcagcaactcttcaagtacgagttaaaccacacctcacaaccttggagcgtttccacagcctgctctttcttcactgccagcatggttctctcaagttccgctacttcaaacttcgtcttccagtattggatacgacgatcttggccagcaaaggcaccctcgagatctgcttaatgtgataacaactaagtcaagcggtacacctcttttcgagaacacagttgatctagtcgggagggcgtcaaggggtgaatggactactaacctgaggaagtcgtcgccatctccgtctccgtaacaagggtctggtccacattgtcgggcgacacgtgtggttcaaactcgagaaccggaattatcgccggtgactcgggctgcccgcgctgctggacatcctcgtcatcagcatctctacaaaggacaaaagttcccgaggtcaacatacaaaagtaaaatgataattgcacgcacgaaggtggtcagaattcaaatgttacacatcatgtcttggaagtacaagaagtcctactcttcaaatagggggagaatagactctcccagatcaccgacttcttccatcacctccttacgcgtgttgcaggccgccccctgatccaagatctcgcgtagatcgtgttcaggacgcgacagcttcacacacgcgaggacatggcacgccccggtgtaaatccagttcgacgtctcctccacgatcctggccgcatgcttggaggggatctcccccatcaccgtcgccagttccgcaagggaggatgttagcgataactcgtcaagattcaccaggatggtagacttgatgccgcactccccgacgagctagtgcaggccagtgtaggtgacccgcagcgaaccccagatttccgacaggttgttcccgagttccgacatgcggtccttgagcccctgccgttgtcgctcgttgccggccaccaattccctcatcttcgtgaggtcttcacgggcttcagccaactcgcgcaccagccggtcagcacgcgcgttcgccagcactgcttccgaccacgcctctgcaatgtcgcggccgatgtcgcaagcaccagcttcgaggaggcgccccatctcgacttggagctcctcccaggtgaggacggcagctggtggatcacgacctgccgcgggatcgctgactgggccgttgggcgtcgcctcccggctgcgagcacgacatccgtcgaggccgcgcctccgtcacgacatccgtcgttcaggcgatgcgctggaagtccctccgacttgtcttgggcagcctttgcccgcgcctccctatgggatgaccacgaatcagacaatgcttgaatagaatcacggaaacctaaaaattcacctacttacttctcgctaaccgtcacaagacgttgtcgtcgtggaggcaggggagacgcgtccgaggcctgaaagacaaccaatgcggagtaaggcagaatccttctggctgcaggatctgacgacaggataacttaccgagggggtcgacgccttgcgacgatgtccgcttacagaggagaacttcctcccctttgtcggaacattgccaccgctagtggtggcagcagcagcatcagacgcctccttggctaccttctcttttagagacgccgccacctgatggtccgcgagcggcccgatgatgtcagtcagaggaagagcctacgcttaatcaagtcataaggtgatctcgaagggaaaatgcaggatgccaatcgagtacacttacgttgatagcgtcattgcgttcagctgcccccttctcacaaaggggcacggggatgtcactcgctgttgtcggaccactgatcatcacctagccgacacggcgctccatggcttcgctgttcagacctgtgaatcgagaaccaaatttcgataaatcaagaggaacgcgaacataaacatgccaggataaatgcgagaaagataccccgaggagaaacccgggtcgcgtcctccggtccggaatagttaaaggttggatgggcccgagcctgcagcgactggatccgcctaccaacgaagtctgcaatgacttcataccccgacaagccccgtactcggagatcgtcaatgatgttgataaacgactgaagagaggaggtcaaagggggctttgcggtccaagacgaaatcttgtctggttgctctttgggaacaacgaagacagggtccaagtctttgatctcaagatagaaccacctattccgccacttgctgcgagaagaagggcactggaaggggatataacgtgacttcaggccatcccgaagtcggaacccgacgcaaccagataccctgttggactccatccaacgcagctcgtagtagaagcgaaagagatcaaggaaaggctctaccccaatataggcctcgcaaagatgagcaaagatgctaagaaaggcgataaaattggggttcaaatggagaagagaaagaccatagaagttcaaaactaggagaataaattcgaaaggcggagggagaaaaccgcagagaatatagtcttcgatcgcaaccatgtgacctaagacgggctggggattagtacatcctgcttccctctccatggttccaagaccaggaggggcgtcgtcttcctgaagcttcttcagcgacgcactggtggaagatgatttgccgaggtccatcgctgatcgaagatcgctagagaaagggcctaggttgatgaactagggtttcttgtggcggcgaagaaggcgaagagcgcttacaggcggaatgttttcagcacggtgggcggacttgaagatggacccccaaaattcctttaaataggcgcactaccgacggtgcgaattccaaggaatagagagagatgcccgccggaaatttctgggtccgttacgcgcggcagttttttggacttcaatttaaattcgctcgtgaccattgggcttcaaatggcgtgctcgactacggcctgtctccgcggtcctcgcaccgggaacgacaacagtctcgacacccgaagtcgcgaatggttacgcgagctcattttaagcagatgtcgagggctactgtcagggttatggttaggcataccctttacacttcgatatacgtcacatatcagtatggtatacccacgcgcatacggatacttccttcgtattccaaggaaatccttcacggaatctacggatgggaagaatcctactcggacaagactgggtcgttgatgtatcgtatagggtctgatatctccgagttctacttggagacctccagatctgcaatataaaagggaccccccgggaagggcttaaggcatcgaatatcagagccaacacaacccacacagcctatgaagtcggagcatgcaaggagccaagccatcgggatctagtcgaaccaactcgactacgatcttgccggatccgacaagttccattgtcccctttgtaacctgtgttttccaccatataatcccacatcaactggattagggctattacctatcaaggggcctgaaccagtataatcctcgtcttttgtttacttgatgtcgtattacgtagatccttgtaccaacgtaccccaataccctctatatccggtctacgggtaccacctgtcgacaacactaatgattggtctaagtaattggtccaccaatttaataaaaatcagatctaatctaatgatctaaaatagtgggtccaccaattaaataaaaatcgattgtgagattaaatagtgccacgtggcggcataggagtgtttagagtgccacgtggcggcttgagagcgtttttaggatgtttaatggacttttagtatataatggaagatagatagatagatagatagatagatagataatagataatagatttttctcggcttgtgttttagagaaactgatgtataagcaaaccgaagaaaccgacccgagtaaccaagtaaaccgaacgcccaccccttagtacatcgatctacgactgaatgaatatttgatacatgctaaattcagtagtgcagataattggtattgtacgtattttcaggaatacgtggcattgtatgttctgagataatataaaccgagtaaattgcattgaagatacaagaacataacttgataggtgggtgcagtttaatgcataaacttgaaaactgagtaattggtacaccaaacttggttagatggtgcgcttttggtcaaagtgattgccacatggaatctttttccaggtttgcaagacacgtcgtcatttttgttacatgtttctactggttccttggatcggaacagcagtagactgaaggtccatttcagcaaatatccccggtttaatgttaacaacatcaaatcaaaagcactaaaaatctagatttagcaatgatacagggcaccgtgatctctttgatcgatacatgaaccaattcatagttatactgtcaattgaacaatgaagctagatggcgtctaagaaaagcagcatgaatgcatgatctacattcagaagctttatagttgaccaaaagcaatggatcaacctaggaagcacgagttcctgataaattgaaggaagccaacattaaatatacatcatgcggaacaaagagaacataaaaagtggtaggaagtctgtttcaaatttattggaatgcgagagaagcgatcttgtgcacctgatgtcccctgctaatgtggcaaaagaataataatgtgatattcactttgcctaaaatgcactataaagctaagttaatgcaccaatatgcttaaatttcaagttcttatactagaacgcacccaccctgacaagttcttatatcgtgagtgcaatttactcatataaaccagtacaaggtttatgacgcgtggagcgatgttgggagcagctaactatccgaaaggatgctgtgtatgcaacgttccttttgtttggctagtttggctctatgcaatggtggtggcaacagccagcacagcacagtcgagtgcacacctgtgctcgacgcgtggtccggcgttcgtggcggaagcttgtgctcatcatcgccgtcctctgtttcgggcatggccacggccgtcgagctccaggtttgacggaggcaggacaagccatgtacattggcagcgtaccactgatggtggagtgactgatgtgaggatgtctggtgagcatggcgcacaagaggcggcaagcgggtatccgctgcccgctggacgctggtggccatgaacgaccgattggcgtgtcatccgcagcgagtcagaacaaagcagagtggcgccgagcgcgtgccaattgccaattgttcggtcggcgcgcggtctcggttcagcaggtcaacaggaaggaacgaggcttgggcgcagtggaggggaaggactacggcgatgtgttcaaacggtgtctcacacgcacgagaggtttgatcggtggcggctacaaggcaagtagaacagtggtcatggactcacggctgatcttggtcttgggcaaatttttcttcatgacaccgtgaagtggtgtggtcatggactcacggcttgtcatggttaatgataagggataccttctatcctacaacttagagaatatacaagtatggtatatattcacgtacacgggttgtttccttatgtgttgtaggaatccatcacgaattatggaaaatatctttacgggtcgaatgatttacaaagtcctacccggtatggatagagtttctattgtatcgtacgggatccaatgtctccgagtattacttgaagatcaagatgatccactgtataaaagggaccccctgggggtgcaaggcatcgaatatcatcgcatacacacccaccacagtttacgaagccagagcatacggagccaagtcaccgggagatttcgtcgagtctattgactacgatctcgtcggtatcgtcagatctatctactctcattgtattacgtggttcctccatattaatcccatataaactggactaggactattacctgataaggggccagaaccagtataatccttgtcttctgtttgcttgatatcgtattatgtagatccttgtacctacgtaccctaatacccaactcgttcggtctaagagtatcactcgtcgacacggcggaccttagtcttcagcaaattttgctacaggacaccgtgacttttacggttttagctgtacgacacgacacaaaataacttttgggagaaaacactcctaaaagttggatatttgctgatagataccgcaccattaaaataataattttcggttgaggatgaaagagaaatcgtgtgaaatgtcaaaaatgtcccagggtccacatgtcaactctctctctatcccctccttctcttctctccctatcccacatgttagcgacgacggcggcaggcaaggtccggtggcggtgggagggctaaggcggagcggccgcgacgatccgtggccgagggtgaggtccagcagcggcggcggcaggagggcgagggcggagcatccgctgtgccggccagacagcatatgaggttcggcggtggcaactgcgagtggaggagcggcggcgcggctggacagcgatggcagcggcgcgcggagtgaggaggcgtcccacgccggagcgcagaatgtggaggagccggcgtgtggagtgaaaaggcctccagcgctgtcgccgcggccgctccgtactagccctcctgccactgctggacctcgcctgccgccgccttcgcggacatatgggatagagagagaagagaaggggatagagagaagagagatagaagagctgacatgtgggtcaaaggacatttttaacatttcacacaatttctctctcatcctcaaccggaaattattattttaatgggtgcgatgcacactagcaaatatccaacttttgtgagtgtttccccccaaaagtttttcgtgtcgtgtcctatagctaaaaccgcgaagtcacggtgtattatagcaaaatttgtgtagtcttaatattgcgccgtctttggcctcctatggcatcaagacggaatgggccgaggtttaggggggccacacgtcgctcgacttgcggtgtgatgatacgagatttaagcgtgccaagtgtttaacaagtggcaccaccgcgaggttggattgatgctgatgggctcatagtggccaacgcgagctaagagaaggtataatagtgggctataagaaggctgaatgctgaggtggatgggagaaaagaggagagagatgagaagcgggctgtaagtttacaaccggcttaggcacaggaaccaagaaaatctgtgagacagacatgtggaccatatatttatagtaaagagttaaccactatatgagtgagctgatagataggctataagtaagcagctggctgtattattatcctcgctctaacggctgggctggaagcctgaaacgaggttgcgaggtggcacgacaccagtggttaaccagtgcaaggatggcgtcgaagtcgcgggtcggcgaggacgcacagtgccactgtggaggagctgcgctgtggcgtgtggctgacgcggtcacaatgcgtctgttggtggcgagtgtcgtagtgtgcgtcagcggtggcgcacgattggcacacggacacgggtgtggcgcgatcgcgcgactgtatcgctcgttcagacacagcggtgcgtgcgagatagtgagaggggccgaagcacggtttggcgccatttggcatgctggcggcatggacgtcggtggtatacaatacaagaggtgcactgtgcacggccgatacacaacgctgcgcgcgtggagcgtgcttgtcgggttgactggttgcatgcaagatgaaatggatcgatcagtgcgacctccgtgtggtgtggcaacacgacgcggccgcctggccagttcggcctattgagcagctggcgccgcttggcgcttggctggtcctggtctgctcggtttggctgcagttggaggttacctcgtgtaggtgttacttggttggtccaggcctgtatcgagcaggctcggctagcctcccatccagcaatccagcttgtggactgatacatgaagaacaatgccggctgggatttacacggaaaaaagaggattttttatattttattaaaatatctaaagatatattttaaagaacttttacaaataaatacccccaatgctttagtgggacaacttttatgacttgttaaatagccattggcgcgagctctggctattttactagcgaccccttgcagccctaccaaaaataacgcctgcccattttacaggacctttgcatgcaaaactagaagataaccctctaaggccatgtacaatgggatgcttaagtagacgcttagagaaaaaaaccgggtttttttttaccaggccggcgctacgcgagtcgcccgtcgccacgcgaagcggtcgtcgcttgggagcacttgcgcgaaaaaaggaggagcgtagcaagccctggcgctcagtaccaactaactaatcttgttttaggcatatggatcacacatggaagtattttagtacatcacctttgtcataaagatgacaataaaattaaaaattggttgacaatgagatagtaaaataaaaaaaattggtagactcattcactaccattgtagcacctagatgcttagatagactcttaaataactaagcatctgtggaatggattctcttcattggagattaaggctcttcaacagatgcttacatacttttttttctaagcatgtatctaagcatctggaccattgtacatgccctaagaggatggcaaaatgaccagctctcgccattagcacacgtcgatgattgtttgctacatcatagaaaacgccataagaaaatatgttttttttaaaaaaaacgtcctccaagaaacgtgagggatatagatttgtaaaggttttaaaaatatatattttgcaaatatcttaatgtaaaaatataaaaataaaaagaaatcgaaaaagagaagaagtaaaaggccaaaagagtgtgtttgatccctgcataccgtccagcctggttcgtatcgttcgattgagcctgctcagaatgtgcaatctcaatgggaataagtttatctgaggtcccttaacatctcgacgaatccgattttcgtctttcaaccaaaaaaaccaaatataacgggtccctcaactattaaaaccagtgcaaaataaatccaaaggcggtttcagctaacatggcgcctacgtggctaatttgatatggtcttcatctaacgtggcattgacgtggcacatgaatcaaaatttaacaacttaaaaaataaaacaaaatatgtggacccactgttgatgaaaaaacacactagcctgggagatctgcttagctctagtgcaggtctaaatcttgatgagatgcgggcgtgccagtcagtttgatcctgcaattgacaagatatgcaaatagtagatcaatgagccgatcggcggacaagccaatggagtagttctagccgatgccgataccagccgataacgatagggttttgagccatcggctatatgtccaatgtagataatgatataaaggcaatcggctgatgatagtatagtataacaatataatcgagtagaaaccaatcggctagcagtatgatataatagaattagcactgatccgaaggttaaagcatacatcaactggagatccgatatcataaaatccacaatattagataacaataaagtctttgttgtcatcggctaaatattatatatatatatgtatatatatacaatccttaaaagccgatgcaacgtccagataacttatcggctagcaccccgataaaacattagcatgaacctatcggcttaacatgatttatattatcaacaacaatctagtaggtcgaacctaaccgatgcagcacgagattgtatatgataatataatactcgatgagccgatagatctgtctaacgtgatggatatgacagatctatttacaacagcattgtgattgtagagagatatcggctaagatagaagatcagacctaaccgagacagttccaactaaaccgatgcgtctccaaacacaacacaattagagatagaattgagatatcaggtaggcaaatatatcaaccaaaccagagcgatccaagagatcgaagcgatgcagccttgaacaacactaacgtatccaatagattcaccaaggccggcggaatgtaggacttattccttcaccggagatagaactgaaccgatgcagccccgcgtcaggtgccaaattccaccagatgataagtaaaaacctaaggaaagagggtggcgattcgccgagagtagttgtattgatcgagagatatcttacaatgaccccgggtgtaaatatttatactcatggggagatactagtccttatagaacaagaatgaaactttcctaaagataaaaagaaaacataaagtccttacatgacactaaacacactttcctaaagataaaaggaactaacaaattattcctaattaatatataaacttgccatgccgcatccttcttgaactcgaactcttctgcataaatttcctttaattaatccgactccaccaagaacacaactgctggcgatttgacgactcccatcggccgattccaagactctaaagccggtactaactctaggcaaataataacttcgggcttaccaaattttggcattaacacccacatgtgattcaattaataaaataaaaaaaatagtaggacccacatgtcattgggccccacttactccacctcatcccctctcttctctatctcctcccctgctccttctcctctgtttcccttcttccctagattgtggaatttggacacctgcaggatgtcgcaacaacactccacaccaccgtcaatctccgccaccgcaggccacggcgccgtcccccttggtgggccacgacgctgtcctcctccgccaccgcgggcaacgacgttgtcctccctcgccgctgcgggaggctgcgggccacagtgtcgttctcctccgccactgcaggccacggcgccgtcctcctctgccaccaaccatgccgtcgtcctcttccgacgccaacctcgtcgatttctccctcggcgctgtcttcctccaccgccgcgagacacaccgccgccccttctctgtcatcctcctaagccaccggtcacgtcgccgtcctcttcctccaccgccaccggtggcagagccctgggatggtggtcgtgtcagctcgtgtattccacgatgggatgagggggggagatagagaagagagaggatgagttggaggaagtgggtctcattatttttaattttattatttgactgacatgtgggcccacatattttgttttatttttaaaattgttaaatttggcttcatatgccacgtcagatgaagaccgagtcaaattagccacgtaggcatcacgccagctgaaaccgtcgtccaaaccgccttgggacttgttttgcaccagttttaacaattgagagacccattgtatatgattttccagttgaatgatgaaaatcggattgatcgacaagataagggacctcatatgaacttattccatctttgtttggttatctgcacggagatttttgggtcctaaccagttagcagaccaaggctttcccagccaaccaaagcatcaaaatcctgcaagcccaatgacctcttttgcaggcaaccaaatggctgcttttgagtttaaattaaattcggaatttaattgtggaacttcccttttattcagaaaattgaaaattcaaaatattaaatgaatatggactttcaaatttcatttaaaacgaaattcttttatttagacgatttgttgatttttttttcttgaactcgtaacctggaatttgataactgaactaaaattttattgttttagtggagtattagttactcctactgcatgtttcagaacaaaaataattactcctactgcatattaatgatatttattgcactacaaatcattttttccctcctaagtggtatcagttttatttacaatcgtattgatacagggctcgagttcatgcatttcattattatttaggagcttgtgaattaaataaaaatttcattcccatttaacatttcttgtttgtatcagatacactcttgatccatgaattgtactatggtgtactagataccaacttattatttttcttttcacatatattgagtttgctttagctgagattaataaattggatttatgaattgctttaattacagtttgatgttcttatatttcagaacatatataaggaatgacgccatccttcatcctaaaaattttcagcactgaatacaatcggtttatagatttcaaggagaaaagaagaaaactcttggggtagcaagccagacacaaagggatgactgagccggtggtaatgggccaacaccattagcctatggggccgatctataagatgcaaattctctgtagtactgctgatacagtagcagtggctgacatatgggtccgggcccacacgtcggtgactgctactgcatcagtagtactgcaggcaatcccaactggttgagctgaatttcacacatttattttactttagctaacaaagattgagtgggcaacgaaaggatccgtgagttgtggcccattactgttgagttgtgatccaaattcatttgcacttaataaaggccagcttctgcctatatatatacctcatcatcccttttagggttccactatatatatacctcttgtaagccgccgtgcggcgatgtaacctcacctcagatatagtgaagatattttgctggctggcgcccgtggttttttctctcctgttttgggagggttttccatgttaaatctcgtgtcttttgtgattgatctattgttctttatcgtttgttcgcctatcgtttcctaacaagtggtatcagagctggttcccagattagggtttcgcgatggcgtcgatgaagtatgatctaccgctgctagactacaagacgagattctcgctgtggcaagtcaagatgcgagctgttctagctcaaacttcggatcttgatgaggcgctggaaagtttcgggaagaagaaaacgactgagtggaccactggggagaagcggaaagatcgtaaggctctgtcgctaatccaacttcatctatctaatgatattttgcaagaagtgttgcaggaaaagactgctgcagaactttggctcaaactggaatcgatctgcatgtctaaagatctaaccagtaagatgcatatcaagatgaaattgttctcgcacaagttgcaggagagtggttctgtgttgaaccacatatcggtcttcaaggagatcgttgccgacctagtgtcgatggaggtacagtttgatgatgaagatttaggtcttttactgttatgctcactgcctagttcatatgaaaattttcgtgacaccatacttttaagccgtgatgaactaaccctagcggaagtttatgaggcgctccaaaacagggagaagatgaaaggtatggttcagtctgatgcgtcgtcctctaagggcgaagcattgcaggtcaaaggcagatctgagcagagaacctacaacgacagcaatgatcgtgacaagagtaagagtagaggccgttctaaatctagaggtaaaaagttctgtaagtattgcaaaaagaaaattcacttcattaaagaatgttggaagctgcagaataaggagaaaaggaaatctgatggtaaggcctctgttgttaccagtgctaaaaactctgattcaggagattgtcttgttgtttttgctggttgtgttgctagtcatgatgaatggatacttgatactgcatgttcgtttcatatctacattaacagagattggtttagttcttacaagtctgtgcagaatggagatgttgtgcgcatgggaaatgataacccacgtgagatcgtgggcattggctccgttcagatcaagactcatgatggcataacacgcacgctgaaagatgtgagacacataccagggatggcgagaaatctcatctctctcagcacacttgatgcagaaggatacaaatactccggttcaggtggagttgtaaaggtatcgaaaggttctcttgtttacatgattggtgatatgaattctgcaaacttatatgtccttagaggaagtacattacatggttctgttaccgctgctgctgttactaaagatgaacctaataagactaacctgtggcacatgcgtcttggacatatgagtgaacttggtatggcagaattgatgaagaggaacctgctggatggctgcactcagggtaacatgaagttctgtgagcgctgtgtttttggtaagcacaagagggtaaaattcaatacctcagttcatcgcaccaaaggtatacttgattatgtacatgctgatttgtgggggccttctcgtaagccctctctcggtggtgctcgttatatgcttaccattattgatgattactctagaaaagtgtggccttattttctgaaacataaagatgatacatttgctgcttttaaggagtggaaagttatgatagaaaggcaaactgaaaaggaggtaaaagtacttcgcactgacaatgctggtgaattttgttcggatgcttttgatgattactgcaggaaggaaggcatcgttaggcatcacaccatcccgtacactccacagcagaatggtgtagctgagcgcatgaatagaaccatcatctccaaggctcgttgcatgctgtccaacgctcgcatgaacaagcgtttttgggcagaggctgctaacaccgcctgctacttgatcaacaggtcgccttctatcccacttaataagaaaactcccattgagatatggtctggtatgcctgctgattattcacagttgagagtttttggatgcactgcttatgctcatgttgataatgaaaaattagagcctagagctattaagtgtctatttcttggttatggtttaggagtaaaaggatataagttatggaatcctgaaactaacaagaccttcatgagcaggagtgttgttttcaatgaatctgttatgtttaatgacagcttgcccacagatgtcataccaggtggttcagatgaggagcagcaatatgttagcgtgcaggtagagcacgtggatgatcaggaaactgaaattgttggtaatgatgttaatgatactgttcagcactcacctcctgttttgcagccacaagatgaacctattgcccatcgcagaacaaagaggagttgtggagctccagtccgtcttattgaggaatgtgatatggtttattatgcttttagttgtgctgaacaggtggagaatactcttgagccagccacatacactgaagctgttgtttctggagaccgtgagaagtggatctcagctatgcaggaggagatgcagtctcttgagaagaatggcacatgggagcttgtgcacttgccaaaacagaagaagcctgttcgttgtaaatggatcttcaagagaaaggagggtttatctcctagcgagcctccgaggtttaaggcaaggttagtagcaaaaggtttcagtcaaattgttggtgttgattataatgatgtgttctctccagttgtaaagcatagttcaattcgcacattcttcagtattgttgctatgcatgatcttgagcttgagcagttagatgtgaagacagcatttttacatggagagcttgaggaggagatatacatggaccaaccagaagggttcatagtacctggtaaggaggattatgtttgcaagttgaaaagatctttgtatggtttgaaacagtctcctcgtcaatggtataaaaggtttgattcatttatgttgtcacatggctttaagaggtctgaatttgatagctgtgtgtatattaaatttgttaatggatcacctatatacttgctgttatatgttgatgatatactgattgctgccaagagcaaggaacaaattactacattgaagaaacagttgagtagtgagtttgatatgaaggatcttggtgctgctaagaaaattctaggcatggaaatcactagagacaaaaattctggtttgttatttcttagtcagcaaagctacattaagaaggttcttcagtgttttaacatgcatgatgcaaagcctgttagcactcctattgcacctcattttaaattatcagctttacaatgtgctaatactgatgaggatgtagaatacatgtctagagttccatattctagtgctgttggttctttgatgtatgccatggtttgctcccggccagatttatctcatgctatgagtttggttagtagatacatgactaatcctggtaaagaacactggaaagctgttcagtggattttcaggtacctcagaggcacagctgatgcttgcttgaagtttggcaggactgataaggggcttattggatatgtggattctgattttgctgcagatttggataagagaaggtcactcacaggttatgtgtttaccattggtagttgtgctgtgagttggaaggcaacattgcagcctgttgttgcctagtctaccactgaatcagaatacatggctattgctgaaacatgtaaagaatcagtttggctgaaaggattgtttgctgagctttgtggagttgattcttgcattaacttgttttgtgatagtcaaagtgctatatgcctcaccaaagatcagatgtttcatgagaggacaaagcacattgatatcaagtaccattatgttcgcgatgtagtcgcgcaaggtaagctaaaggtatgcaagataagtactcatgataatcctgctgatatgatgacaaagcctgttcctgttgctaagtttgagctttgctcaagcttagttggtatagtggtttagcccgagaggctatttgacgccgaaagtgtttttttttgtctttgttgtgttcaggatgaaggattgattcacgctacaagaaggaatttgtctcaaggtggagtttgttgagttgtgatccaaattcatttgcacttaataaaggccagctcctaataatgtacggatcatcatcccttttaggttccactatatatacctcttgtaagccgtcgtgcggcgatgtaacctcacctcagatatagtgaagatattttgctggctggcgcctgtggttttttctctcctgttttgggagggttttccacgttaaatctcgtgtcttttgtgattgatctattgttttttatcgtttgttcgcctatcgtttcctaacaattaccaccccaaagttggtggtgctacacgttcttcgcggtgggcttgttcgccttctccttctcacctgcagagttggaggaggagccatcgattttcttaccagacttggaggaggagtcgtcgatgtgctcggagttggagcaatgggacccgatcccccttctattggtagggaagatcatgaagacgaagcttgacggcaccgccatccccagcggcaggttcttgagcagctccttgtcgttcttgccggtgttcgggaagaagcatttctggaggccgacgtcgctgaagacgacggagaggaagacgacagccgagaggaaggcgtgcacgaagtcgacgtagccgaggtcccgctaatcgagctcgggctctaggtccttgaacagcttctgctcttctttcttgttcaggttgaagaggttgagcctagtcggcagggcgaagccatagtagaccttccccttgtagaggacgctgtcggtgaaggcgaagaagacgcaggcggcggagaggaagacgacgaggccgaggcttagccaccggttggcccggaagcactccccctggttggtgaaggacgccgacagcgactggtatgccagcaccgtccccgtcggcagaagccgcgccaagttcgccaacaccgcaccttgtcggttgccacattggcagcgtgtgccctcgcctcatcgctctcgctgattggcagttttggatcaatattggcggccgatgctttgtcttccttgttctgcggcgccatcgttgctggccgtaagcccttacttacctacgttctccgatagtgtgtgtcactgtgtgtaatattgtatagtaggtgtttgcatgcagatgcagctccaagagctttgtgtgtgtagtgtgtgtgcatgtgtgtatgtatatatatagaggtataagctgtacagtggtcagtggggcgtcactactgcgagcacgcaaagggcaaattcacgtaatattttgctttataccttcagcctggaaagttaaaaaaatggatacgtacgcacgtttctttagttgtgcgatttgtttattcaatttgaaggaggtttgacgttctgttcggggtaacaatgattaagatatatgcacactggagaaaccatctttggtcggtcgaccaaatttcacaatagtcccggttgcaataaaaatcgggactaaagatcagaaggaggtttgatgttctgttcggggtaacaatgattaagatatatgcacactggagaaacgtcggtcgaccaaattccacaatagtcccggttgcaataaaaaccgggactaaagatgatatttagtcctggttaaaaaaatttaccaaccgggactaaagattatttttagtcccggttcaaagaagttggtgggtacagttaagctccaattatctttagtcccggttggtataaacaaccgggactaaagatctatttttagtcccggttgtttatatctaccgggaccaaaataaactgccgatatctcctcggtatcccctccccttttttctctccttaaaaacaactgagacttagtctcggtatccgcctcctccccttcttccttcttcctctccccttcctcccccttccagccttcccttttcctccgatcccc

SEQ ID NO: 9916 - DNA, 54743 bp, Oryza sativa
ttgtgaaagagatccgtattctcgggcctatgtaccttcacaacatgtttccttttgagaggacatgggcgttctgaagaagtatgttcgtaaccgtgctcgaccagaggcaagcatcaccaaggggtatggaacagaggaggtcatcgaattttgcgttcaatttatcgaagaccttcgcccaatcggggtacctgaatcacgccatgaagggagactacggggaaagggaactctcggaaggaaagcaataatgacggtagacaacaatttattccgtaaagcccatttcactgttctgcaacactcttcattggtagctccttacatcgaggagcacttggctctagttcgcgccaggaacatcggtaagtccgatgcatggattacacggcatcacattgatactttccccgcgtggctacgacaacatctcatgggtaacgagtcgatcaaccaacaacttgccttcctggcgaggggaccgtctgggtcgatcgcgacattctagggatatgagatcaatgggtacacattctacacgagagcccaagacatgaagagcacgaaccaaaacagcgctgttcgtgtcgatgccatgggacacgatggaacaactgccacgtattacggtgccatcgaggacatatgggaacttgactatggtcctctcaaggttcctctgttccggtgccaatgggttaggttgactggtggaggcgtaatgattgatgacagtgggatgacaactgttgatcttaacaaggttggatactcggaagaaccttttgtccttgccaatgatgtaacgcaagtctttttcgtgaaggacatgtctagcaaaggaaagaagggcagagggcctgatgagcctaagcgtcaagtggttctcccaggcaaaagaaaaatcgtcggagttgaggacaagactgacgaggattacgatcagttggatgggcaaccccctttcacggtgacgattgaccctagcatcctcctatcaaatgaagacaccccttactcacgcagcgatcacaaggagggaacaatagtgaggagaaagtacgtgcggtcaaccgtcaccgccgatgtaatgccgtaattattgtgtacacgatgtaaactattttggatgtattgattatccatataaatcaattgatgtatggcatatgttaattacgcacgattattagaggtttcaacaagtttaaatcatgtatatgctagttatatgtgatacttacaatttttaaaagttgtaaatcacacaggtggcaatttcatatgtatgttaattagagtttttaacatttaatttactagcattcatatgctaattataattgactagaggatttttaaaagttttaaatcacgcaagtggcaatttcatatgttaattagaatttttaacatttaatttactatcattcatatgctaattataattgactggagaatttttaaaagtattaaatttaatatatttttaaaactatcattcatatattagagtttttcacaatttaatttactatctttcatatgctacttatatatgactattcgaatttttaaaaggtttaaatcatgcatgtggcatttacatatgttaattagagtttttagcatttaatttaatataattcctacgctaagtatatatgatgattacaatttttattaattttaaatcatgcagtatgtacatacatatcttaattagagtttttaccaatataataatatcattcatatatatgctaagtatatatatatatatattggaatttttattaattataagtcatatatttgcttattacgatttatccacttaatttattacagacaaaaataatttttcgaagtaattgtcattaatctttgtactttaaataatgttaatgcattaacttctattttataaacacatatgtaagcgaaaatcatatgcagtgctataatctttagtcccggttcttaaccctaaccgggtttaaaaagaatttcgaaatagcgggaaaagatatttactcccggttgttctcaacaaccgcgactaaagatatctttagtcccggttgttctcaacaaccgggagtaaagatctttaggtatatatattcccggtgcgccctcgtcttcttcacaaacacttagacgttttcggccgatcgatctctctcggcctctctccttcgccgccactgcctagggcaaatccccgcgccgacgccgtcgtatctcgccgtcgtctcgagctcgtcgtcctcgccgccgcctccgcctcctccgctgccgccgcatctctgggctgagagccgccgccgccagatctaccttcatctcgatctctccgatctcgatcgctctccgtcgcgccgcccgccacgagacgccgcgccacgacgacgacgcgccatgccgacgccgcgccaagccgccgccggcacgccacgccgccgtcttcgccgccgcgcgcgcaatgccgccgccggcacgccacgccgccgccttcgccggcgcgcgcgcaatgccgccgccggcacgccacgccgccaccttcgcccccgcgcaacgccgccgccgcatgccaacgccacgccgccgccgccgtgccacgccgccgccgccttcgccgccgcgcgcgcaatgccgccgccgccacgccacgccgccgccgccacggccccgcaacgccacgccaccgccgccgtcgccacgctgccgccgccgccgccacgccgccgcgccaaccgccgccccgatgccgccacaccgccgttaacgaacgagaacgagaaggatcgaacgaagacaagcgagaacgagggaacgaacgtgaaggagaacaagcgaacgaacgtgaacgagctagggaacgtgaacgagcgaacgaacgaggacgaacgttaacgtgaaatgcaatatatatatatatatatatatatatatatgttacttcgcatttatcctaatacatctttttgtatcttgcagaaaagacgtgttgtcggagtgtcgttcgtcaagcctgagtggaagagctagccctagaagtaattggagcaggcaagtgacgtaataatataaatgattgttatatttgtaatgcaattaattaagattattagacctgtaattagacttatcatataagattgtgtagtggtctaatattatttgagtttaatataagattattttattgcaaattagacttagtatgacattattgactacggaattggtgcgactcctagcaattgactattgtagtcttaattagacttagcatatacgcacgaaacacttagcatacatgactattttagtcttagcatgtaatattatttgagttttaatataagattactttatttgtaattagacttagtatgtaattattgactgcggaagtggtgcgacaagtagcaattgactattgtagtcttaattagacttagcatatacgcacgaaacacttagcatacatgactattctagtcttagcatgtaatattatttgagttttaatataagattactttatttgtaattagacttagtatgtaattattgactacggaattggtgcgacatttacacttagcatacatgacttagattgttaaaacataaatgtctcgtgacttagcagatgtttcttgtatcaacagatggctgaccgcgatgaggaacagatattgtacgatacaatcgcggagggaagcagccagtactggaatgaagaagaggggaacgaggatccaaaccagtacttgaacgaggaagggaacgtggagagggatgcggaggggaaccagcaggggcacgtggaaagggatgtggaggggaaccaggaggaggaggctagtggtagtcaaccctccgttggacagaagagggcacgtgggcaacgaggtgcaacgaagaagcttgagggtcggcacatcataacggaagtggaagaagatggacgtcctagtgccccggccgaagccgccaagaactatgtacgtcatagcggttgggttgtgcgggataacgtgcctgtcagtacggtgtactggcgaagaacaagggcacgcagagatcatgagagctttgtcccagattcggagaaagagatgctgtggaccacaatgctcgagacattcacccttcctgtgggtacagaggacaaagtgaaaaggtggactctgaagaaaatggcagaacagtttcagagcttcaagggagatctgtaccagaagtatatactgaaggggcagacaccgaacttcgacacattcccaaagctaagggatcactgggacgagctcgttgcatataagacaggtgaacaagggcaggcgatgatggaaagaaacaaagaaaatgccgccaagaagaagtaccatcaccacttggggtcaggaggctatagcgtcgcgatgccgaagtgggagcagatggaggctagcttgattgagaggggtatcgaaccggcaacagctaattggccggaacgatcgaagttctggtactatgctcacggtggaacgctcaacccagctgatggctcactggtcttcggcgatcagatacgagaggctgcgcgacgactaacagatgcagtggaagcctcctctcagggcacgttccgaccagacagagatagggacgagctgacactcgcactgcagactccagagcatccaggacgaacacgagggaaaggggtgattccttggaagattggtttcaaggaggacatccacacgtacaggagtcggatgaggagcaagagagataccgaggcgaagattgcagacctagagttccgggtatctcgctacgaactcaacatgcaagaggagatggcaaggaaggttgatgaacgcatggccgcacatcggtcccatgatccccagccgaccattcctcctgcaatggtgagcccgtcaggaaaccgtagcagctgcgcctcaacggggcaggtagtgtcacagagcatggacgccatgcaaacacaggacgaatcgacctgtcccgttgatgacatcactcagcggacaccatgtgagctgcatattcctttcaagaacttatcaataaaggtaagatttagccattccgctagttgctgcttatatatgttgattactaataaataatctctcacaacatgaaggtggcgtcgggcatggccatcccaacggaccctttaggtacttaccactgcaggccgattccagcaggatactcgaaggtcgaagttgagttggtcgaaggcgcgtacgaggacctcgagctggattaccctggaggagacggtgagatgcatctacgagacacatgccatgccattattctatcgcgcaggcggtacatcatcctccctgggcgacaagcggcgtctcgtgcaccatctcctccggctccgccatctcctcctcaggatcctgcaccgtctcctcctcatgctccgccagcaccgtctccacctcaggctccagcatcgactcctcctcaggatcctgcaccgactcctcctcgtgctcctacacctactcccccgcaagctcctcttccggcaccttcaaagtcaagggcccccccagctccaccgcctgcccacacaaggacccgaggtacgattgcacgcaagaggagcttgacgcttacgttgcatcagaagtcaagagacaattcaagcctcgaagtccagaaaagaagattcctatagaccccagtgtcagaaacttctttaggggtatgtctgcatctgtcaaggaggccatcaagctatcggactatgagcgaatgctgaagaaagcatcttctggaaagtccaaaccagtccctcagcttggagagcaaccaaaccaggagatcgagcagttggtgaccggtaaagaaatgacgatagaacaatttattactgacaccggtctaactacggatcaattgctaggagtcgcaccaatcgaaaaggcggaagtgaaatacatgtacgaactcggtaaaccgcttgtcaagcctgagctgctgcagtccctacccacacaaatgtacaagttccatcagctgtacatggacatgagcgccaccggtagagagatgatcgaagcgaggatcagggacacggacttcttgcaaggagatgacattctctggatcaatttcaggggaatctacgaactataccagctggacgccctcgacgtctctattatgagttgctggattttgtaagtatatcgttcagttagatttcttactatacgtctcctttaattaattaggtccttgtatataagtagactatagaaaataatatactcccttttatcgttgtagaaaggagattcaaagggcccgacggcggagggttttcgatactggattcatcgaccctcggaaagtaaacgtcgcaatgctcgaccaatatccacaagaaacagaggacaatctcgtccatctcctgaaggcgcagcattacaagacgttcatactgttgccatacaacatagagttagtttaattttacagtcttcctacataccaaatttcattcccgtacgaacttgctaagtgtttcatatgtaatgcatcccacgcacattgcagattccactgggtgcttttactcttcgacctggaggcctgcaccgtcaacgtatatgactcaatggataaaaaagagtctacgtttgacaaggttttcgaacttatagacaggtaccgtcataagttcctttgttaattaagaaaatcttgttatgttaattgctactacgaatcatagctttaaactccatgtagggcttggtatcggttccatcatttggtccgcggcaaatggagagaaagacttaggcggaagttcaaatttcctgtgagtacacatgctctacatttatatttctccgattcaaatacatacaagtgtatattaatttgatctctcgttgtttgtcatttatttgtagtgcgcaaagcaaaagcagggaactaacttgtgcggcttttacgtgtgcgagtattgccactgccttgcagaccaaatcatcaccacaagagagctcgatgtacgtacaaataaatttaaaatttcattacgtagcgatttcttgtttaattactaatcaatttcatacattcatatagtttattcgcatgagggataacctgaccacacacaaggaatttatcgcggcggttcaagaacaactcatgggattcatcaacaaagaaatccttgatcccaagggtgaattctactacgacggaaacacaattcaccggtccttagcttctgagctagcagcgactactactacgtcgaaatcgtagctagctaggacatataatggattgtaattaatacatgactacatatgtttctatatacatgtgtacacattttctataatgtaaatatattttggtcatatatatatctatatacatatgcatttgcatatcatatatatgtataaatacatatatattatgcatgtatatacatataatataatatatatatatacatatatatatatatatatgtatgcatatatatgtattgaaacatatatatgcatggtttatatataaaccatgcagcaaaagggccatgcaaaaaaaaaaggtcagctcgatctttagtcccggttggtaatggctcagccggccacgtggctaagccatctttagtcccggttggtagatcgatctttactcccggttatttcacccgggactaaagatagcgatctttagtcccggattggtactcccggtttggaaaccgggactaaaggggggttacgaaccgggactacaaagggtttctccaccagtgatacttttccaatctcaagccatcaaacatgataattttcttttgaagtgaagcaaaataataacaaataatatgataagaagattttatagtgagaataattttatttgattcttgagactttaaagcgtacaacaggttctgttatttaattatattgcaacacgtgagcattcacctatttattttataggaaggaagaaataagccatatatcccattgtggatgagaagttggagatgatcgaacacgatggataagagggtggtttttgaccatcaccgaccagtgacgaggcctacgacctagctatggacacacacggcgcggcactgtaacgaatcacgtaacctaaagcaaaactccacagtatgtatgcatggagccccattcgtccgtccctgcagctgcagcagcatttaccttttttcctttctctgttcctgatgaattagttcaagatggataggaaattaggagtaggacagggcaaaatctttcttgcctcccctagctacctagctagtggaccgggcctagttccttttagcaaagtaatcgatccacttttctctacaatgcaggggtgacctgatttcctaaactgccggtaaccacgtagttaccgcgcttactgtggatatgataaaagaaaaccacacttactgtggatatggtaaaagaaaaccatagtaacctccttaaattcaaataaatttaaaaataatttaaaattttaataaattttatattgtttcgtacagcttctcatggttaccgcgcgataactgtgcttactgctggggcccagtaaccccggctccggtggtttgggtaaccctcttcttgcacgttcagtgtgacagtgtcaacaaagtcatcacaagagagactgtatttttgaggcactaggtaaatagaagaagctcgctgttcacacaggcatgtttattgcaacgggaagaaaaggcaaaaaaaaatgaggaaaagttaagaaagattcacattatacaattaattaaaatacaaatttcccaaaatacttgggtgtgtataattaaattaatttacaagtaaaataagtgtgggaaataaaataacatggctggattttatttttattaaattatccgtgattaattgcactctctaaattttctcaaaattttcagagcttaatagctagtctattaacttaataaagtaatagaaaaaaaagccaccatgttcattctcgcggtctagatattatcacgttaatcgaagaaaaaaacaaaaaaaacaaatggacatgtattcttttggaaatgtgacataccagaaacacactcatgcattgtataggtttaggaaactgatcacaactcttactcggatgaaaattagaagaaaaaacaaacggacatgattctttttggaaatgtgatataacaataaatacttgtggagattatggatatcccatatctatacggcgatgatatttggattgaatataggataccgagtatagatagaatatcttatgtgtatcctgggtttgtttcctaacttgtatatcaaggaaacaccttgagacttagtcggtcacgactgtattcagttagggacatagattatcttttgtaatccggactccttcctatatataaggggggtccgggtgcctttaggggcagatgttgattttctctaaatcatacaatcaataatacactcggcggattcatccccggacaggagtagggtattacttcttttataagaaggcctgaacctgtataaatcctttgtctccaaacccatacacttttccagcttgatagccacccccttttattattgccgaaatctagtttcgacagttggcgcgccaggtaggggccgcgtcaagcttttcgccgatcagtgcaatgggttccacctccggcatcgacgacctcgtcttcccgcccaggcagacgtttcggttcggcagcctcgacttcgtcaccaacaacttcggcaagatttctctcctcgactcggaatcagaccagtcgggagagaaccgaatttcggtcccgtttggattcccgaacgcggctgaaagctacttcaagaccatctcaaccgagtcggcttcaaaccacccggccgagatcgcatcttctctaacgacaccagatcaagatgatggggcttacccaccagtcctgatgaagctccccgacgatttagcggccgtctccaccacgactgcggcttcatcccgtaggcctaggcggaagtcggcttcaacaccgatttcgcctagcttcagggaagtcggcgtcatcctccaaccactcggcacggtttcgacggatcagctggatgactacaacagctctcccaccgtcgactcacgtcctactgatatcgtggagtacgacgaatttagttctcgctacaacgacttcgacgacttcgacggaagcctagatgacaactacacccctctctactttggcgttttcatggccaataatgagacggaggagcaacgccaagcccgggagaccgaagaacgtcgccgactggaggaggagcatcaagcacaagaacaagaacggctacggcgtgagcagcaggaccgtgagcagaccgcgaaggaggctgaggatcgacgtcagcgagctttggaagcagggcgccgagcgcgtgatctcatcggccagcaagatgtcgaagggacaccggttttccgcacccctcaacagaatgcggttgccgcgatcacccttctcgacatcctcctcaaccaaaacgagctcaatcgatccgaccacgtcgtcaacatcttgaaccagacgaagaccatgattgcggcttcggtcccagttaactccgaaagcgtccacacaccgactggcagccgagttccccacttccgatctcatgactaccgtcatccaagcctcagcatcaccggcgcaggatccaaccgcaggagcaggggtcacgacgagcggtctgttcactcacctcccgaccttcatagggagcgccgagtggaacggcctcgctcaccacctcgtcgccgccccatcgatcttcgcgacacaatcatacagcgccgagcagctcgaggctaccatcactcgccagaccgccacgacgacgaccttgacggagtagcagccttcaccgacgacctgcgtcgagtggattggccagccggcttcaaaccgactggaatagagaagtatgacggcaccactaaccccgaatcgtggcttaccgtctacggtctcgcaatccgcgcagcaggaggagacaacaaggccatggcgaactatttaccagtggctttagcggattccgcccgatcttggctccatggattgccccgtggtacaattggatcttgggccgaactacgcgaccacttcatcgccaacttccaaggcaccttcgagcgtcccggcacacaatatgatctctacaacgtcattcagaagtccagagaatcccttcgagattacatccggcgattttctgaacaacgtaacaagatctccgacatcaccgacgacgtcatcatcgccgcgttcaccaaagggattcgccacgaagaactagtcggcaagtttgggcgtaagcctcccaggacagtcaagctcatgtttgaaaaagccaacgagtatgccaaagctgaagacgccgtcaccgcatcaaagcagtcgggtcccagttggaagcaaaacaagggtacgccggctacgggaggaggtggaagtaacaatcataaggaccgcaagcgtaagcctgcggaacttgttgcaaccgccagtcactcttcccgacagcgttcgcgcgtcaacacgttcgataagatcatgaactcccaatgcccgcaccatcctaactccaaccacatggccaaagattgtttcgtctataagcaattcgcggatcaatacaccaagactgcacggaagaactccgacgaagaacaaagcacgtcgaggaagaaggacgacggcgacgccccggcaggatttcaagaccaccgcaaggagctcaaccatatcttcggcggccccttggcttatgagtctaaacggaagcaaaagttgactgaacgggagatcaatgctgttcagcccgacacgccccaatatcttcgatggtcagagattgcaatcaagtttgaccgctcggatcatcctgaccgagtggtccacccggggcggtaccccctggtactagacccagtggtccgtaatgtcaagcttcgcagaaccctcatcgacggtggcagtgcactcaatatcctcttcgccaagaccttggatgatatgcagattcctcgctccgagctaaaaccaagcaatgcgccttttcacggagtaattccaggactatccgcaactccactcggccagatcaccctcccggtcacttttggtactcgggaaaactttcgcacagagaacatcagcttcgaagtcgccgatttcgagacagcataccatgccatacttggacgcccggcgttagccaagttcatggccgtcccacactacacttacatgatgatgaagatgcctggtccccgaggagtcctatccctacggagtgacatcaagcaagccgtcacatgcgacaaggagagttgcgacatggctcaaacccgcgagatggcgtccgcccgagaggatatccgactggctgcagccacggcgagcgaaggagaagtgcccgctaccaagatttcaaagagtggggaaagcgaagccaagactaagaagattcccctagatccctctgatcctactaaaactgctgtaataggcgccgagttagattgtaaataggaaagcgcgctcatcacctttcttcagaacaataaagatatctttgcgtggaaaccatctgatatgcccggtattcctagagaggtgattgagcactccttacacgtcaaagaagatgccaagcctatcaaacaacgactccgccgattcgcacaagacaggaaggacgcgatcaaggaggaattaaccaagctgttagcagcaggcttcatcaaagaagtccttcatcccgactggctggcaaacccagttctagttcggaagaaaacagggcaatggcgcatgtgtgttgattataccgacctcaacaagtcttgtcccaaagatccttttgggttgcctcgcattgaccaggtagttgactcaaccgccggctgtgagcttctcagttttctggattgctactcggggtatcatcagatccgactgaaggaatccgactgcttgaagacttcattcatcacgccctttggagcttattgctatgtcaccatgccgttcggactaaaaaacgcaggagcaacttatcaacgtatgatccaaagatgcttctcaacgcagatcggccgcaacgttgaagcctatgtggatgatgtagtcgtcaagaccaagcaaaaggatgatttgatctcggatctagaagaaaccttcgtgagcatccgtgctttcaggatgaaattgaaccctgaaaagtgcaccttcggagtaccgtcagggaagctgcttggctttatggtgtctcataggggcatccaagccaacccggagaaagttactgctatcctcaacatgaaaccgccaagtacccagaaagatgttcagaagctgactggatgcatggcggcgctcagccgatttgtttcaagacttggcgagcgggggatgcccttctttaagctgctgaagaaaacagataacttccagtggggacccgaagcacagaaggccttcgaagatttcaagaaacttctcaccgagccaccagtcttagcctcaccacacccgcaggagccgttgttgctgtacgtatcagctacctcccaggttgtgagcacagtcttggtcgttgagcgcgaggaagaaggccatgtccaaaaagtccagcgaccgatttattttgtcagcgaggtcctagccgattccaaaacgaggtaccctcaggttcagaagctgttatatggtattctaattactaccaggaagctatctcactactttcaaggtcactcggtaacggtggtcacatcatttccactcggtgatatactgcacaaccgcgaagcaaacggacgtattgctaagtgggctttggagttgatgtctttggacatatcatttaagccccgaatttcaatcaagtcccaagcgttagctgattttgtcgccgaatggaccgagtgccaggaggatacccccgcgaagaacatggagcactggaccatgcattttgacggatccaaacgactttcgggcactggagcaggagtggttttgatttccccaactggagaaagattgagctatgtgctttggatacatttttcggcgtcccacaacgttgccgagtatgaggccctccttcatggactacggattgcaatttccttagggataaagcgtctgattgttcgaggcgattcacagttggttgtcaatcaagttatgaaagagtggtcctgtattgacgacaatatgatggcatatcgacaagaggtgcgcaaattggaagacaagttcgaaggactcgagctcagtcacgttcttcgacacaacaatgaagccgccgacagacttgccaattttggatccaagcgcgaggcggcgccctcagatgttttcgtcgaacacctttatacaccgaccgtacctcataaagatactactcaagatgcggacactcatgacgtagctatggttgaagccgactggcgagagcccttcatacgatttttaacttctcaagagctccctcaagataaaaatgaagccgagcggatttcaaggcggagcaaactttatgttatgcatgaatctgagttatacaagaaaagcccttcaggaattctgcaacgctgcgtatctttagaggaagggagacaattgctgaaagacatacattctgggatatgcggaaaccatgctgctgcacgcaccattgtcggcaaagcttaccggcagggttttttctggcctactgcagtgtccgacgccgacaaaattgtgcgcacatgtgaaggttgccaatttttcgccagacaaattcatctaccagctcaagagttgcaaactatcccgctgtcttggccgtttgcggtttgggggctcgacatggttggcccgtttaaaaaggcagttggctgttacacgcatctctttgtggccattgacaaattctccaagtggattgaggccaaaccggttgtcacaatcacagcagataatgctcgagacttcttcatcaacattgtgcatagatttggagtgcccaatcggataatcactgataatggcacacaattcactggcggagtttttaaagacttttgtgaggacttcggaattaagatttgctacgcctcagtggcacaccccatgagcaatggacaggtggagcgagctaatggcatgatacttcaagggattaaagcgcgtgtctttgaccggctaaaaccctatgccggcaaatgggtgcaacaactgccatcggtactttggtctttgcgaactacacccagtcgggccacaggccagtcaccttttttccttgtctatggggcagaagcaatgttgccgagtgaagtcgaatttgagtctttgcgctttcgtaattttcgtgaagaacgctacgaggaagaccgagtagatgacttgcaccaattggaagaagcccgcgaagcagctttgattcggtcggctcgatatttacaagggttgcggcgctatcataatcgcaatgttcggtctcgtgcctttttagtcggtgacctggttttgaggaaaattcaaactacacgagatcggcacaagttatctcctctatgggaagggacatttattatctttgaagtcacccggccaggttcttatcgactcaagcgcgaagacggtactcttgtcgacaactcttggaacattgaacatcttcgtcgtttctacgcttaagtttatcattgcacttccctatcttgactgtcaacatcaagttttcttcttgccgttgtcagtcgggggctatcatcataataatggagtgtgattttttatcaatttaatttgcttacttggtctatcattaccttgtttgattttttctacttagtctgcgaggactgaaagtttttaatagcttctttgggttttaggctcaacaaagcttgataaaagcttttaagaaatcaaagacttggttagaactatcaagcacagcataaatacaccagcattgtacaaattaagcctccatttgctacatttacactcagtcagaatcagtcttttcatcatcagagttattattgctcggctgaaggtcgttgttgcggaattgctctacaacatcacttgcaatcttgtcagctgcattttgagcattactgataagatcaagagcagcttcttcgcttgtcccgtctgcaaagccatcaatggcgtcaatttcaatcctcgggtacaaggatttggtcatcgccaatgccatactagctcccatacttccagctttcttgatattcttgaagtatacatccggtgctactctcagcttgtcaaagatttcggttgcgtcaagtgcactcggaccactgtcattaaggaacatagcttggacaagtggtgtagcgacattggcgacttcgtctcttgctccttcaagcttcttgatcttaccaaccaggacatcaaactgagcttgagatttgattttacggtctacaaaacacatttataataagaatttgctgcattaaagagaggaaagttcaaattgtcagctggcagtaccttcaacctccttcaaggctgagtccctttgcacagctagttctactttgtctcttttcaaggcttcaatctgtttctccatttgtgccatcctggtagcttgtgctgtttgaaatccaaatatttgaggatacagttatgacagcataaatcaatggaatagatctggaaggttaccttttgatgaaccacttagctcgaagtttgaatcctggagctgggcaattcggtcccttaactccttctctgtctttttagcatactccttggcctcatgcagctggtccctaactgcttcaagagctcccaaatgaggaaccagcttttccaaagttgtagtcttggcctcattgcgaagatggattctctgcatgatggatcatgattcagttctgctaaaagagagaacaaagttattaaaggcagtcacccggaagatttacattcacaatgcgagtggcttctccaagtactttcttcagctggcatacttcctcattttctttttgacgatttataacgatgccggcaacttgcgagttctcgtcccaccatttgagcaagataggaggacgggagtcattagccgcctttatgcgaggaattgcttcttcgtcatcgcctagtgttcctgatgtatttccaagacattggacgagtaagctgaagttatttaaatcggcatcacttgagaagatgtgttacctgaggatgttcctggctgaacatgaggtggtccttgttctgtatttagagacccaatcattgagtctttaccagcctctggtccttgggaagttgtcgtttgcgcttcaacttcagggatttcttcatcgggacctacatccgactggtttccagtcgggggctcttgtgttgttgcagtttcagctgttcccgactggtctccagttggcggctggtcactcggatcggctctatcatccgaagcatgggcgccagtcggctggctttcggcagtcggccggctttcggcagtcggttggttttcggcagacggctcagcgtctttggataaatttggctctgtcacagccggatcaggatcttttccagttggatctatgtcggacggtttcctgcaaagtgtcctttcgatattcagtataatttctatgagagaagcatatcaaagggagacggtaccgagaagtttatacctggaagatgttctaatctttggcatttgacggccagccagttttttcctgggcatggtatgctttgggagtttgttgggcgtgcccttgtccccagatttgttgctgtcatcgccctcgtcgtcattaagcaccagctttctcttacgaggacctgtctgaccagctggtttggaggtttgaggttgtgggtctgacctgtttgtcggccctccgcttccctgaatggtgtgctggcgaggagatcggcgctgagcaattgggggatcagatttcatcaatacgtattcctgaatgagatgcctccatggttagttaactcaacatgaagacaagatactattttggtcataagttgaagatttcagatacatacctgcggaggcggattgaatgcattatacggcacaactggcagctggtgtgagtagctgacgacaatggcatttgagaagattttatacattctctccttcatgattttgaaatccagagagtctggttcttcgcgattaggatcatgtttgccgtcaaactcaaaagctgtacgggatctttctttaattggcgccagtcggcatttgatgaagtgccgagtgatctgctctccttgcaagccttgttctttgagttttaacatgcgatccaacaattccaaggcttgggcagcttcatctccgattggaagagagttccaagtgtcttggtacaccgggggaagacaagagtattcgggaagagcaggctcaagattctgaacataaaaccagttcgcatgccatcctttgtttgaagtcttgaagggcattgagaagtatttctggctcagagttcccctcagctgaaatccggcccctccgactacacatggcttactcttgtttggttggggtttgagaaagaagattcggcggaacagggcgaagtgaggtttaattcctaagaaggcttcacagacatggatgaaattggcaatgtggactatagaattcgggtttaggtgatgcaagctgattccatagaagcttaatatcccgcggaaaaatctcgaggtcggaagagcgaagccgccatagaagaaatgcgagaagactacgatctcatgtgtatcaggggtcggaaaagcctcaccgcacgctggccgccatccgatgatctccttggctgggagaacgccgtgcgccaccatctccttcaggttctcttccgttacgtcggacggcgcccattggccttcgaagctttccttctcttccgccatcgattctatccgaatgcgctgatttgattcgagggatggctagggagaaatgagggattaaggcggtggatcacgggaaggattttgatgcatttttcgaaggtggatttgagtggagtggtgaaccctagttcgccggcgcagttctgcactgtagcaaggagtggggaaaatggcgagagttccggcggggaagacgaagcgtcgcttggatctcgggatttcttgttaagggtatcggaggtgcgaatgggcctaggcctgaacagtacttcggcccaatacttttaacagcgtggcccattgtgttccttagggacttaggcatattttgctttggcaatattatgcgcacaatagtgttgcccaatgctgataaaatcctttttatgcggtcatataattctttggaattattgcaatgcaaattaaaaggtgcccgacagaaaggtgttatactgctttttgttagttttattaggctacaaaagctgtctgggttaatttggaatgacttgtttttatcatagtcacttccttggtatgttatatacctattttcattatggtaaatagtcatagcctaggctattagacttattcattaccataatttttataatacttggtgggtaatctttagagttttaaattcggatgcctgtccagtgtgttcattcgtgaacctttttagagtgtaaactactcggactcttttcattatggctaaaaagcggtcggctagcatgcctatttaggcgctgtgtgtgcttttgtcatatgatgcacgatcgtgctattatttggtctctcaactatatgtttagttcgttaactaatcacatagttgggggctacacctaattaggtgcatctattcgatgcaccatatttttatcttttcgccctttacagtctttgtcttcgctactcggcaggccttggcacgaaaagtttgaagcactcggattattatttttgagaaggctacgacgattgactgcaaaggtctcgggggctactgtggagattatggatatcccatatctatacggcgatgatatttggattgaatataggataccgagtatagatagaatatcttatgtgtatcctgggtttgtttcctaacttgtatatcaaggaaacaccttgagacttagtcggtcacgactgtattcagttagggacatagattatcttttgtaatccggactccttcctatatataaggggggtccgggtgcctttaggggcagatgttgattttctctaaatcatacaatcaataatacactcggcggattcatccccggacaggagtagggtattacttcttttataagaaggcctgaacctgtataaatcctttgtctccaaacccatacacttttccagcttgatagccacccccttttattattgccgaaatctagtttcgacaatactcatgtatggttatagtgtaggaaacggacaacagttaacaaaccaatcgtaattagattcatacatggaattagcatccatgttggtattagtttatacgcttctgaattatacacgattcatatagtaataaatagatcgatactcttagcaatgaaagcaaaacacaaagcacaaatatccagccatacatcttttagccacaatcagctttgccaccaaattagcaagacagaagttttgccgccagaatccacttcattaacaaattggcacccgagaatgtcggaatcttatagcaaaggatcgtctaacaaataaatttgtgtgtagcaaattaacatattagattggtaataaaaggaacctccatgttcgttcaaattatctaggaaaacaaacattaattaaaaaaaataaaagatagaaatatgtctattgatttattaaagtaataagaaaaaaaggctccacaatcactctcacgacctacaaattctcatattaatcaattcgaaattaaaaattaagacatattaaaagaaaagtctagagtctatattgaactaattaaaattccgaataaaaattaaaaataaggaatattggaagaagagtctagagtctatatatgaatttagagctaattgaaagacgaatttgaaaaataagaaaaattaaaagtaacgtttagagtccatataaaaatatatttagaaatagctgaaattcataaaaaaattaaaaaaagaagattgaaaaagagtctagggtccaaatagggatataatttagaaataactataatttgaaataaaaaaataaaatattggacgaagaatcttgagtccatataggaatacaatttataaataacataaactcataattaaaaataagaaatattggaagaacaatctattgttcatataggaatacaatttaaaaataacagaaatatgaaattaacaaataagaaatattaaaaaaggagtataaattatatataaatacaatttagaaataattaaaataaaaaataattactttcatgcacatgcattacagtatgaatattgcgtattggttagttttatcaagttagtacataatttaaaattatgtttttatttcaatctatttcaataataaaatgtaaaaatatatatgatattgtatgggaaaaaattataacgatgatagccgcacaatctgcgtgggccaccatgctagtttttataatacaaacatcatttcagcatttatttaaataaaaatcctcctttttatctagactatttttagttcattttcttctttcgctgttcaatgctgcctgaagcccctccgtgaaattcggctgcacccttggaggtatttcaaaattgatcaaggggttttttatccttatctgctcttttcatttttctaagaatcggagcaaacccacatcgtattatgctcggaattaaaatctatcctaaacaagtaaaccctaaagtttagcccgtttcgcttgaaaaaaatcacatagaatgcgatgacaacaacaaacgaaaattatccccaatgccttatgtattttttaattagatacatagatatctaattaattaagtattcttacgaaaattatcactggtcactggaggcgagcgcttacccggacaagcagccatcaacaaagcatcaagctttaggacctttgtattgttattagcttaggatttacgagtgcgtggcaaaagcgattgttggtcagttggtggcttggagcgaatgatcggtagcagccggacgatgttaattttgacgtgcgacgcagcaccagccgtctcgctggcgtcgccgccggccgtcggcgattttccccgtgagccgcgtaattcccacgcgcccgagcagccggccgagggccgaccaactgctcgtgtgtacgtcctatcctacgcgcgtgtgtgcatgcgtgtcgttggcgtaagttaattaattagccaccgcttgttgagagcaaggctaacagaagcgctcgctgcttaatccagtaattgccacatctgctatagccatggtaaaaaattaatacatacaacaagtagtctatccatctttctttagttgcaatagtctattatttatttattctatcttttctctcattctacgtcacatctttattctatatggtgtactccctccgtctaaaaaagaaccagttcctggctatgagattcataaccaggaattggttctttttggaacggagggagtagaaagcatgcaacgggtcccacattttttggagagtgtgatgctagcgcttaattagtcgcctgccgatcctctctctatcattagctttttgaccaactcagcctttggatttgttatcgccggctcttcagccccctattatacttgctgagagcaggtacaatagcaggctataagccagctataaccatatatcgagaagaaaaaagaagagagagaaaaaagcgggctacagatttgtagccggctgcaacacggattctaagatgttatgtgtgtataagaggtgggaccgggtattaatggtgtagtatatttttatagttaactattgtatgaatgaactattagattggctatagatattttggagtcaatagttggctatattattggccttgctctgaggaagttaattaagttggagagtgcagaggggggcgggggggaggagggagggggggacacggccgtcgatagagatacacgagttttcattgtttgacccatcaccggcaggccagtcacaaacacgtactgttacacttacgatgccagcacggtaacgaatcacccgaccctgtctatatatatcattcgacacaggtactaatttgtgaatcacgataaaggcttttgcagcgatatatttgaaaagagaattaatgtccatctagtaacaatttataaattaatgtccatctagtaacaatagattaggttgagcgtttcctctgtttcaaaatataataagctattactgaattagatactagactggtacatttagaaggcataaagtgagaatttatatacaaaaatttgtgaacttctttttgttatgtctttcctttgctgttccgggttcaaggtagataggaaattaggtataggtgacagcagctagccgctggccaaaaccattaattcttgcctgccctagggtttagaaccaggacgtgctgggtccagggtttctcaaactgtcgggaccggggttaccgtgtccggcaataagtacggttaccgcgtagtaaccgtaagaaatcatacaaaatcatgtaaaacttatcaaaattttaaattatttttaaaatttatttgaatttaagaagattaccgtggttttcttttcaccgtacccccacggtaagcacggttacctgcggttttgtaaaccccgtgggcctagctatatgatctcccattctccccttttttttcaagtcgcaagcttgagcgacctgtccagccaatgtcaccgaagacaagacaagagcttgcagttgcgaattgtgaggcactaataggttcataagcaacgtccaatggaaaaacatgagaccattattgatgtgcgcctgcctttctccaagtgatcgatggatcaattggaaaggagaaggccgtttttgaccctaacccatatgagatccatggttcctgcaactctgcacgagattgttttcctgttccctacacatatgcatcgacactaactggctacagtttttctgatccatagccttttcttttcagactagcctatttaggagagttcgctataaacttaatctgaaaaaactaggtttttcaggtccatagtttattttattttggattatattgctatagataatcataatatggatgagaatatacattatctacgagagatggagattttgagagtagttacagctcctataagattctcaaacactggctaaaagaaattggggaggagaccagcactaatttttctgctacgtataagagtcaatccaatatatcttctttaagaatcatgttaatgggggagacaaatattgtagtttctgctatgcaaaaaagacaatatccaatatctttatttcagcgtcatgttcttagatttttttttgagatgcatgtttttttcttttaatatctctccatcccataatgccaaatatttttgttaattggcttaaaggtgtaactagtctataaaaaagattattctaattggagtgttttatgttagtcaatttgtgttgccttaatgataaagttcttttttatcttcatgtctttctgttagctttattttttatgtactatgctagtacaggggaacaagaaacactctgaaaataagtagtcaaaggtctcttatttcactgtaaatagcgtagttccattagaattactagctaaaaaaaatatatggtttagcactaccatgtactaataaaagagacttaaggatttgtcccatcaccgtatgtcttatttttctttttcttttattcttcttttaacaaacttgtggttgcgtgtcttataacagaaattgaagatgtaaactattttcattattaaaaaaaatatgttcacaaaaagggccttagccataaattgagctagcctacagtaaataaatcatattatctctattttataatatatgatgccattgatttttacatcaagtttgaccgttcgtcttattaaaaaatttaagtaaatatcttttattttgttgtggcttgatttatcactaaagaaacttttaagatttgcataaaatttttaaataaaatgaataataatgttgtaaaaaaataaaataacgtcatgtattaaaaatgaagggagtttatgttctcattcctcgtcagctccaatcaccaactttttttctctcttcctctcatcagctaatttatgtcactggtcactggagatgaccacaaagcaacacgctatacatctcgatcggtctgaaagagatgatgactgcaaaacctatccacgaaaccaattgcttgagagagacgacgacgtctctaactacagaatggtttttttagataatgaactccagaatggttaacgtacggattgaattgacgaataattcgtaataataatttgaggataaaaaataaattaactattctaaagttgaaaaatgggtttaaaacagtatgtatgatttacatacacaaatatatatatatataggtaaattatatagatatatatatagagagagagagaattattgtaaagaaaacttatttttaggagatcgagaaacgtgtgcattcatcaatgtattcatttgttaagcacgaaagaacaggagggaataatttggtgctacacgcatggacagggtgaccaggcggatttccaagacagatcgaaaaacctgacggagggaatggaaaaggagtggctggtctgattggagcattggagggatggggacgcctcggaaaaagggctacgctacattctcaacgaagtgttttcttttcctcagctgaaagagaaaacctttttttcacatcaggtccatacctatacaggtaggatgttaaggtccatgaacagtactagctacagtatagcgaggtagtacaaattgatggttagtttcggtttacctgtttgcaaattgcaatattgttaaagcgagaacggttattcgctcccgttaattccaaatctaaggccgctttcggaagtgagggttgggcctggcacgaaaaacaaagcagcgattagtgcatgattaattaagtatttgctaatttttaaaaaaaatggattaatatgattttttaagcaactttcgtatataaatttttttgcaaaaaacgcaacgttcagctatttgaaatgcgtgcgcgtggaaaacgagggaaggaagttgggaacctttgatatcgaaagcagcttaaggtggtgtttggattcagggatttaactttagtctttatatttagacactaatttagagtattaaatatagactacttacaaaactaattacataaatgaaagctaatatgcgagacaaattttttaagcctaattaatccataattagataatatttactgtagcatcacataggctaatcatagattaattaggctcaatagattcatctcgcgaatcagtccaagattatgcatgggttttattaatagtctacgtttaatatttataattagtgtccaaacatccgatgtaatagggacttaaaaatttttgtcccatctaaacagggtctaagagcaagtttaatagtatggcccgctactagcttcaattcatctatagctaatgtaatagttaattcatacaatagttgcttactatactattaatacctggtcacacatgtcatacacacattgcgtcttggagtccgtgctgcagctggctatatatttgtagcccgtagctcttctctctcatcttttatctcattaaaatatgtttatagctggctaatagtctgctattgtacatgctctaatagagagcacgaatgactttgttgtatggtttactgtcctagcgttaagaaaggtaaccacaaactgtgaaaacccgggtaaagtttataaaaattcagattaatttttattttttgaaaaaaaattgatggagttaagcaaagttaccattgctgtacctcgatggtaagcccaattaccatgtctatgaatggatgctggctatgtacgcatggttctacctacatcactactacatggtgccgtactaatttgggccggtagaaaggaaagatgatttgggcccgtaggaaagaaaagaaggaatgggctgaagagagcggggtatttggcccataatgaatagtggtgtttctcaataaaaataagttcactataggtccctcctgtgtcgctgagtctaaaattcatctctgaaccaaaataccacatatgacgtgtccttcaattcccaaaactagtgcaaataaggtctcaaggcagtttggatagcggtttcggcagatgtggcgcttaaagtcagaatgaaccgtgggacccacatgttaatgagtgtttggttaaaaataacaaaaatgcagtgggacccatgtcatcacctctctctctttttttttctcctctcccttcctcttttctctctttgtcggtgaggggcaggtaatgacgatgaccaggatctggtaggacgctgaggcggtcagcgacctagggtcctccagtgccaggaacgaccggaccggcgatggaaggcggtacctctggtggaggagtagcacagtgcatgacgaacgcgatgccccatccttcctatgaggagaccaagaaaggggacgaggtggaggactccgcgtcgcgcttggctggcgggctcgacacgcatgtcgccgccgttgccaccgccgcagtggcgtgctgcagcttcgccacgccgctgttggtttgacgcgagtttgttggattggctcggctacaactgcgagagaggtggcactggcaacgatgccgcctcgagcgcctcgcggtgggagaacaatggagaggtagaggttgagggagctgttgcgctcgaagacgaagaggatgaagtcggaggtaggaccgaagtttccgttgtagttgaggaagacaccattggtgaggcggagctcagaagcggggttatgagacggtgcgaggggagggagcagataaaggtctggtgcatggctggcgcacgacgcctcaccatcgcttccacctcactgccaccggctttaggacaaggtggcctccccggacccatccctagccatcgccgagctccgtcaggctatcgcgatgcttgcacacgcgagagagaagagagaaagagagaataaggaaaggagagaagagaggaaagagagaataatgaaactagagaagtggggagagagagttaggggtggcagaggggcgaggcggggttaggttggacaacgggtggaaaacctcacccgccctcacccccacaggggacccagcgggtgagcgggcccctgcaccacccggatggccaacaactgcgatgcacctattgtggctgctggaggtggcgtgccgcgacgaggtgacggttgaggacggtgacaaggtgtctacggctgaggacggtggccactaggcggcgccggcctggggcggcgtcagctaggagtagcacgctacaaggaggcgacgctggccgggggcagtggaccatgaggaggcggcggcagttggtggcagcatgctgtgacgaggcggcggcgaagaggcgatgccgtgtcggggcggtgacagctaggaatggcgtgcgaagaggcaggctggttgggacggcgcactaggagggagagacgtgagagtcagagaggagagagtggtggcttggtagggatttgggaaaaattagggttttgccgatatagtccttcacctaatgggtcgtttgggccttagaatgtactatcttttgatttgtaactcatatctttggagcgccgcgggtcaactcccatccccgcccccacccccgcatttttgtggggcctcagccccactcatcacccgtggtgagaatttcccctcacccccagccccatatggctggtccctgccggctccccggccccaacggggaaattgccacccctagatagagtgatgatgtgggttccattgtaatgcttttatttttttaccaaatactcactgacatgtgggtcccatgtttttttttttactctaagcgcgatgtaggcaccacatcagcgaaaaccgtcatctaaactgtgttgggaccttatttgcactagtttggagagttgagggacacgtcatatatggtattacgactcagtcaaactcgacaacagttgagcgacctaaagtgaacttattccttctagattttagatcctatagagcccatccaggatgtgaggcccacgtgtggccatctggccctagcaatataatgtgggctagaggatggaggtgcccaagggggcaagaagctgtgggcttgagccccgggccctatggcacatgatcaatttttggctcaatttacggtcgtctcaccgcaagagatcgctgtgctctttttttttcttttttttttttaaccatagattgctgtactcttttttactccctcccaccctagctggcttttctcatcagcctccattcttccatcggtggcatctcaactcctaaccgagctatatactactatacggcaagtcctaggtaaagtcccctttgaagcggagcagtggcccagctagtatacaaagagtggtgcataggacaccaatgacatccatattaatctaggtatcctcctaattttccaatgaatggcactagtaaatcttgctttgttacaccagcgtgtgaataattttacactttcgttagacaagttagcttatgtggacatggataacttgacaacacagcaataaattaactactagcaaactataatttatagttatttgaccatgcacaacggctaattcaacgagactatgcataatggctaaataaagttcatgcattataagttttcttgagtgattaggtgaacatatgctgagcaaccactattgtgaggaattttttgtattttccatatgtattattgtttcatttaaaccgtggtcatcaattagagttgacgaatgataccaccgacctaaaatcctggctccgctcctgaagcggaggagttttataggattttctaattatttaaactaaattctgtggaaagcttataaaattcatgcacaagcagcccgaaccttgggtgcaagattactgtcggatcagatgatcagatggttcttgctaagttagtttctaccaatagcctgtatcgataagagaaatgacatcatatcatcttccgctgcattggtagaaaacttacactgaattctatcgacaaggatcaaactctctgagttttagcattttatcaatagtgtatcagtataatcattatgcagtcatataaacttgacacgtactggatactattcactaccaaatttaaccggccgcgcgcttggtctcttttttctttggaaaaatattactaatatcttaaaaatattttattattaaagtgtctagcatgctacatataactatactacttgcattcaccaaaacatcgtctattaaaaaaattattagtctaaataaaattacactggtcagcactgaagtacgtgggggagtatatctttgtccttgggattcccctgcagaatgatgcttatatacgctctttaattctcaagatcacaatataaaatgtaatgtataaatttattactatcgtgcaatcaaccatttcttatataaatgggatgttttttttttctcatttttcctcatttttataggctactatggttgactgttttatgttggtgaggcttgtcatcacttgtgtgttttgaaacttcatctatcacatcctggcgcttttcctacaattagtactacaagccgaagactggaagactactgctatacatccgaccctgttgttcgacttctgtccgacgctgccgtatctgccaatcaatttactccaacgagccagcttctctccatgtgggtcagagcaaggagcaggtaagtactggtcagatgctaagtcgtacaccccagtcggatgtgtagcaatttccagactagaaatcttagttttggtaagaatggcagctgctgcatattactgttgaatatatagcatatactatattatttcaaggtcggagccaaggcccggccaccatgggcaagtgcctgggctccgcccgctgtgctagcacgtaccctgcttaattaacaatgcaattagcaaagtagttaaggctaatgcaaaagaatatactagtctctcatgctacattaatcgatataacctttcacgttgattttagtctactcaattacaaattaaattttatatatatatatatatatatatattgtatagattttatatgtatgcttatatcttattagatttgtctaggtaaaaaaaaatttctagatccgccactgtattatttaatattgagagtatgaacgatttagttgtgatacatgaatactctgtgtcattttgttctcgaagtactcctaccggtttagttttaaaaaaaactgttgttgattctcgcccttgcaaattaactaatataattacaacaaactgattaattatcattgttaaaactttttctttccattttaaattatctgcaaagtaagaaagtaacactcccaagttacaacagcacaccatccatatatccatgcaggcagcctgtttgtgcccttgtgcagatgcatttcatttatacaagtagaaggcactcaaatcagccaccacatgaacacacacatgttccatcatcgatcgatctacacatgcatcacccggtcatgcacttacaaacaaaagatctacttgaagaagtacgggaggtcgagcacgtagaggaggaagtaggcccagaggacgccggagatgccgccgaagaagaagccgccggtgaacttggcccagccgtcggcggtctgcagcttgtcggcctccttcttgcggccggtgagcgtcagcgtcggcgccgtggacggctcgccctcgccgaaggaggcgacgccgtacatggtgaggcagacgctgaggatggcgacgaggcctgcggcgccgagggcgccggcctggccgtgcaccggcgtgttgcggagcgggccggtgagcgcgaagggcccgacgaggaggtagccgtgggcgaggccgacctcgatgccgcggagcagcgggctgacggcggtgcggtacgccgggaggttggagaggtaccaggcgaccagcgggctggaggtcaccggcgtctccaggctgccgatgaaggggtcgccattgatgggctgcaccacctggtacgttggctgtgtacaacgccacaagaatcacacatatcagatactccctctgtcccaatttattctttaggattcatactccctctgtctcaaaatggttatcataaagaattattacttgtcccatcaatcacttctaattcaaatttctatcttttctacccttaaccatcctcctacatccaactatacaatatttaattaggagtattatattttttttcctcaaaccttaatctatgctaaattatctaaaacgacaggtaatatgagacgaagagagtaaatgtttcatttatcgttccatagaagtagacacgtgtaaatacacaccaccatatatatttcttttagataatactatatttcaattcggcttctgcgtcaagatgtatccggcctacagacgccgatatagtcacgctcacacaaataaagctatttaattaagctctagaaaacgtatgctcttgtttcttgcatatattatggacttatggtttacacttatcatatagctagaacttatacaaagttaactataaattaatgcatccaattttggctaaatttgtgtaactatatcttctaaaatcgtcatgctaataatccaaccctctctcccaaaaaggggatttgtgatcgaaataacgatggcaaaaagtttaaggatgtactatgcaggcaaacttattactcccttcatctttgaaatttttcacatttcatagtactacgatgcgtctaatctacagagggattacaacaattcaatattatattgctaattgaggaaataaactagtgaacagagcaataaaaatacaacaaaatgaaaaacgattatgtctgaaatctaccatctgattttaattaacagagcttgttcttgagaaacatgcaagttttacactagctttgatgaagcgaaatgggaaatctctcaatgctctttagcagtctagctagctctactgaccttctcagactggatggccttgactgtgaagcggggcctccttgtcagcgaagcaccagacagccccctcggcttggagcacaccaagctgctcttcatcagctggctcgccatgggagcataagcagtggccatctctctcctctcgtctcttcctttctctccctagctagatgctctctctcccggccaaaaaaaatggatgtgaaacagccttcttggcaactgccctagaaattaaagtttgtgatctttacaagctgcaggagagaaaatctggagtatgtgtttgggtgggtccctgaagatgagatatggttgagagctgtgtggcgttcattggatggaggatgccagcaaccctatcccttatctgaattcctggagatccccctccttacgttggacgcctagctggcggtgccgcccgtcgcgccaagtggaaaacagaatctgcagcctgcagggcttgtggttggggcaaggttgctgaatcaatatatctggagatggcataacagaatggtcgcagactcggagtttggtcaaaaagattacttttggatatttttgaggaaatattttttcgaagtttggtcaaaaaggattacttttggatatttttgagaaaatgtttttcaaaaattagtaaatttcatgggcatgtgtttcaacggaatctcatcagtacaattaaacacatcttgcataagaaagagcagagcaaacgaactggcaatttataggttctcaacttctctagtgatccgcggggagactatcacaacatctaatgtgatccgcggggagagtatcacgagaaagtactccctccgtttcaaaatgtttgacaccgtcgactttttagtacgtgtttaaccatttgtcttatttaaaaaatttaagtaattatttattcttttcatatcatttgattcattgttaaatatactttcatgtacacatataattttacatattttataaatttttttaataagacaaacggtcacacatgtgctaaaaagttaacggtgtcaaatattttgaaacgggagtatatattaagaccgcgtgattaattaattgccagggatctacttctcgaagaatgtaaggactggcaaacaggtgtttggttgttatatgaggatgcgcactaccatagcaatacaccacacttaataatcataaacttgcttagacttatatttagggtggtgaaattaacgtcaaagaccatgctcaaagaatatatatatatattataaaaagaaccaaggcatgaagatataaaaaaagaatcaacagatgcccggtaactcgagtctttgtgttacaactccgaccaattcccctccaaaaaggaaaaatagtccgaccaattcttctccagggatatactcatgacacaggagatagtttccacagtagtttatctctcgctgtatgccaggcgcttgcttttctgaaggcaaccatggtagtggtagatgagcctgagcaggcaatccgtcatgcagttgacatcaaatgattcgataaacttcagatctgacaaccgtgactttccagcagcataccgatggtactcttcaaagactgatgagagacaccaattctgcagctttctgaagcagcccacaagacatccagtacggtgctgcggtcgaaacagataaaatatcaagaacatgtggtgtggacaaaaacaattatggattttgaacagatgagtgctttttggtacctttcctcttttgcaatggattagaactgggtgattccttacatctgaaaccaagaatcagtactagtaagtcaaaattattagcttgatggtcatcagagagttttagtatacagcaaagataaacaggacagaagaagcctaattcagtaccaagtatgaccctaagagcccccatgatggcatccacaggaatggacacgttagggtcctgcagatgcaaacatttaagagatactgaacttcttcatatatgtaatcaagaatgaagaaacaagcaaacatcaagggttattttatccaaaagcaatgatagaacagagtaacaagcacaagcacttggtgaatcacgacaatgtctattggagtgtctgacagaactaaaaaaaacttacttcttcacctgtagtaagacacaactaacaacagtggaaaggtataatgagcaaacatcaaagtgaagggagtgactactgatcgacaagaaaatgcaggtgctcttccaacattaggagtacctaactggatactaccacaaaaggaacagaggcggttctaatcattcattcagcacaaaaaatcggtagtttgtacttgcaaccgtaaaatcatgctaaagttgtaaacgttaattagacattgaacattggtcgccaaatttttatttcagagcaagtaaaaagactaggaaaatgagcctcaacttttgatttaaacttttttttcaaacaatttctagaccatgcctcacctatacttccaagaaagaaaatgtggaaaaatccattttagtcaagccttttaggccaaagtacaagaaagtatgtaacatgaggcttcttgtacatcagcaactaaactatcaaataactaaggaacaaaaaaaaactatcaaatggtcagcaaaaaacaaatacttctttttaaaatagcattgcatcctgaatagaagagggaaggaaaaaaaaatctaaatcacgtttactggcttaggctatttccatgagaaatggaaaaaaatagattgtactttcttctgacaaaaatgttggacacaactactccctctgtttcaaattatttgtcgttctaggtttgtcctaagtcaaacatgtctattttttaccattagtttttaaaaatccatgcagttcatcatgtgaattatttattatgaaagtatttctcatcgcaaatccaaaaatataaaccttatgatgttaaactatatgagtttatagaaattgatggtcaaattaaaatgcttgacttaagaaaaacatagaacgacaagtaatttgaaacaaagggagtattggacataaaatttcacataaccctatgtaataatggaagcaactttgtattcaattcatgtttaaatataaaaaaaggcatattgaaaatttaataatgcatgttttgcaggggcataattgaaggaaaaatgaatacaaatgaaggaccatgaaaaaggctgcgatgtcaaaaaataacggatgtccaactatctgtccttgctgagtatagaaagttatgttaaaaattcattctacagaccatgtatgactgaagaaatttccttacaagaaacattccggatgcattatgaaactgcctaatattagcagttacaatggtgaaaatgacactgatcaacttcaattcaataactgaaaaggcatctcctaattaagcatcaaccagtataaattgcaacagagaaattctaaatcaacttccttttgaagtttgtggattgttactacaaacatcacttgacactaaacatttaattgttctatagttatcatttatcaaggcaaccttcaatcatcaaattagcaccaatttccagaaatgcctgtaaattctatgatccctacgatttgacaaggaaagcttaggaccccacactctctggaataagtacttagtgtacagattttatgacacataattacttaatcatgcattaggttgtgaggtttaaaatcaatattcgatgtgttccaactctgattggggaatgttgttgtatatttaaagaacaaaaacacgcccttctcagcatattgcatcaggattccacacccatcagagcacaatcgcacctaaacaacatgcatctattaaacatagaagttaacaaacctaaagagaaaattcccacaaatatcacacacaaacatgaattaggaagaaaataaataaaggaacagcgtgatcaccttgttcccctcaatcccaaattgccacaaatatcacacaaacatgaattaggaagaaaataaataaaggaacagcatgatcaccttgttcccctgaatcccaaattgccacatatatcacacaaacatgaattaggaagaaaataaataaaggaacagcgtgatcaccttgttcccctcaatcccaaattggaagaggcggatcccctccgccttcaagaactcggcattcgtctccatgtaaggttcagggcacagatacctaaatccagatgaaatccaccacatgagcacatacaccgaaggaataataccaacagcaatccaatccaatctaaacgaacccaaccccccgagaaccgctcacacgacagatcggaggccgaggcccctgaggaaaccgaagctggcagggtccgggaaccccgaccggtacacccccgtgtccaccatcccgaagttggacggcggcgccaccaccatcgccgcatccgctttctccgccgccgactcgtcgaactgctccaagatcatggctgacccggcccggattccgcggatccgaggccggattcggcggcgatttgcccgcggggtggggggatcgagatcggtgggggtggcggcgagggcgcggcggcggcggcggcggaaactagggctcggcggagtcgcaacacgcggacgcaacggtcggctcgtcggcgaactccgtttcgtggaggcgggtggggcaacttgtactgggcgcgatcttaacgggctaacgggtgagcggtttcggttggtggatttggtggttggtctcgtagataggttggtcttcgggtttggtggtttaagtacggagggcatttcagtcacgtggagaaaaagaatatagattatgaatcagattaggcatgcaaagggataaagaaaaatcagttatactgctctcccaaactatttcgtcagaaaataccatagtgagattaagtcagtatttttctaaacaataatctgcagcattattagcacctgtaacgatactaaaataaaaacaaaatcagcaaagttgtgaatgggaaatgatcggtgacactaaggctcagttctattcttcaacttccttatttttcgttagcacgattttcaaacggttaaatagtgtattttttttcaaaaaaagtttatatatacaagttgttttaaaaaaagcaaataattcaattttcaaatttatgatcgttaatatttaattaatcatgtgctaatgaggtttctcattttgcgtgcaacaaaaatccaactcccaaaagagagatcaaacggggcctaagttaattaagtagtgtgaattggaaggtgattgagtgaagatcaagagagggtttccctcccgttataattaaggagataggtaggctgtcaaggcaatgagatagtaatggcaacgtccagctctgtaaataaaactaaggaagaaaagtgcgtggtaataaagaagtacagtgagaagaaggcaaagttttcttacgaagcaatgatatacctaaattatagtcgttgtagataaaacaggagtatgggctggcatcaaaattattgtgctgaacttgatagacttacatgaaggtttgtatctttccatcacgaaataggcagattctctttatatcgttatatgtaaaatttctttttaagtatggttctgctgttgatcatttatattggacaatataccatggagtatttatgttttaggtgaaaatttcttactgatttgtggttttgattttttaggaaaaaaacttttctatcataatgcaaaaaagttagggatgcaagtgggcagacttgtggcccactaagccggagtttgaaaatgggtttgcatgttgctaccgctcgtttaccatatgcatgtttcccaaactaataagcgttgccatttttttttcaaaaaaagaaaaataaacttttttttcaagtttggaataatcaatatccaattaatcatgtgcgagtgactcgtcttattttgtgtgccactaaaaatctaagccaaacttcactttcaaagttaattttagccatatttttacatcgattttatagtgatgggtacaaaataaactagcacgtgggctcttgtacgcctgtacggcatggtgcaaaataaactagcacgtttgaatgtgtagtgaaagtcgtttcttcgtcttacatttctagactagttttctcctacgaaagattatgtttgtaggtgagtttttcatgcattttttttaatttatactactaagtaaaggcttagtatggattttgttttatgtgttacgattatgaggtgttctaattttcaattgacacaaagattctcatgtttatgtaccttaatttatatagacaattcataggtttatttattttggttttgggtgaataagcacaaaacaagaaactagttcctcatattccaaatttcatcttgtccatgtttgagcctagcttacgtagaaaagtgatcggctaaaagtctaaaactatcatgcttctttttttatataattgcggcacattattgattaaggagcatcagaacaacgtactttccagaacaagagttagactcgacatagcgagctattaagtatatatgtgccgcaacattagacaactgactaacatggataataaaggaacaaagtaggaactcagacgcgagcttctttatgtagcctatcacacaaacgatgttagatcgatctcggatcatcttttggacctactgtatgacagaaaggcagtctaatgccaaaatcagcttcaggaagcctttttcttttgcgcgttgcagggtgcactggatcgcgagggcttcagcaagctctgggttgacaatcatgggtatatgctcattgctggtaaaaatacaactgtcattatggtaacaaataattagacctgcactcatgcgacgagaaccatgaaaaattatagcatcaacattgaaaagaattgttcctgcagacggtggaatccatcattgaacaacataagagatacagcttggtgcattcataggtttaaagcagtgctgctggattatatcatgtaagtcgtgaatatcatagccacccaatgaggacgccataagtcattgttgttctttgcctcattccttgcttcccaaatgtgctagaaaattacaacaagagccatttttttgatgcgcaagcttttgttcatgaaatcaaatatccaatgcctcatatctataagatttcttttgcacatctcgaagccaaacttttgcttgagtactccccaaatttatttggcaaaggggcaggtcaaaaggacattttctatttgatcatcttggttgcaaaacacacaaccgttgattgcagggatgtgtggtgtcatcatagctggaagcccgtcagaaggcaatgatgtgccgccctccgaacatttattttcgtcttccctggcgtcgtagtcttccaaagatccttccagaccgcggtatcaacttcccatactaaagatagcccccttccatttgtgctttgagcaaataggaaccgctcaaatttcaccaagtcttaggctgaacgaacagtgtatgacccaaatttatcatggggccaagatgcatagtcatccaaaccttggtggctaattgaaacttgcaggatcgagtttgcaatctcttcctgcaagacctttcactaactctgtgccctacctactgccattcctcatctcggttggcatgccaagataggagtcttgaaggatctcattagagacttgtagacttgctttcactctctctttggtgtcagattggcaatgcttgccaaagaagatcgatgattattggagaatgaccttctattctgagtcatcacaataggtcttgatggaggacttgagtgtatggactctcctggcatcactcttggcaaataacatagcactttgtggaaatccccacaacaaaaacatgggccgatccattaacgatggagacggcgaacaaggttcaaaacacatgtctcaattcctgctttggttccctatagacaatggccccttccgttgaaactgatgatcaaaacaggacaagctccctggtgaggctattatattgcagctgaaggcaaaagagcttgagaatcctaaggaccacatcatgtttcttgctttgttatcgtcttagggtgtgtttgccattcctagttcccaaccggaacagtacgcacggaaaacagagcggtccattagcacgtgattaattaagtattagctatttttttttcaaaaatggattaaattgaattttttaagcaactttcgtatagaaacttttttgcaaaatacgcaccgtttaacagtttgaaaaacgtgcgtatggaaaacgaggagaggggttggaaaaaaggggtgccgaacatcggcttagagagaaagatgaggagggtgagtcttcaccagccagcgaagctcactcactatcacacctgaccccagcccacaacagttatagcacaagatactcattgagtctggcgagactactccacaaccaccgcttgatccgctgatcaaggttgaagcactctcgcttcttgttcgagtcgatttcacctgtatcctccgcccacagcttgagaggggaggtttgttgcccggtggtaccaaagccaagctgacaacttccaatgccccaacagcctaatcatccctcggcgagataactttactagatttcttgttctaacttgagaccaccagcaatgtcccttggtctgggaacagatctctcccttaagccattggcccgtcccctggccctgccccctggcagccctatcggtccccctgcttccgcccctcatcaatccctcgtggtttgaatcctacccctcggtttctcgaagcagccagtcggacaggtcctccggaggagccttgggaatcaaaaccggaggcattgacacctgacaaggaagacacattgtctgatttggcactacctgttttctgctctactcttgaggcacacgtggcctcttcgctgcatatggaaaatccccatcttcatctcgttccgccggggttgggcagaccaagaaggaactagtagctagatgaattactgtacatactatggtattatggagtcatataaaatctactacatatatacgagtctatcagtttgcaatactgctgtttatatcagccgtgaatatcattgggttttatgctcatgtttagttgtgccttttagcattcaacgttcttttcactcgtagtgaagcacacgcattttgctagttatatcatatatattagatgaagtttagtctcccttgtatcacatcttacagtttcccaatcccaatacattgcagcttacgcctgtacgcgtgtatccaactatccatattgtaccaaaccagcgttgataacaaaactgaaaccgtctccgcttgctcctgcccaccggccatggcggcccggccggtcagccgctcgcgtcgcgcagcaagcaatccgtccgctgtccggaaaggacggcggcgagctcagacgctgacgagcttcttgccgaggatcatgtcgtcggtggtgaagtcggccgccttcctgaacgtgccgcggccgaagtcgaggttgtacgagtcggtgaggccctccaccaggtcgtactccggcttccacccgagctccaaggtcgccttctcgattgacgcgaagaaatgctgcagttgttgcaatcacatcgaattcagaacactagcagcagcagcagcagcaaatttttcttcagatttagcagagaagccattgctggatataatatataacctggtctctgaaggggaaggccttcttcttcccgaaatcgaagtccttggggttgtagtggacgatctccggctcggggaatcctccagcctgcatgatcaaatttcaaacacaccaagattcatggcaatcctgccggaaagtcccatgtcatttcttggccgctacagcttcgttgatgccacgtaccttggcgcacgcccgtgctagaccgtcgaaggtgacgtacttggcgccggagatgttgaacacctgcttgctcgccttcgggttgccgagcgccagcacgaacgccgtcgccaagtcctgcaaaaaccaccacaaagattcagagtttcaggtcgacacccaaatacacactctgaattctctgaataatgatcactgatcgaattgaccttgacatggccgagctgggtgatttggttgccggcaccggggacagggatggggcggccagccttgagccggtggaagaaccactcctccacggggttgtagttgagcgggccgtagatgtacaccggcctgatcgacgtccagttcacgtcccgggtctccagcaggctctccgtctccagcttccccttgtgccggctcttcgggtcgacggcgtcggtctgccagacacacaaaagctcggcatgatcaatggcattccatcagtggtgatcattagttagcatgagtggaaaatgcggtggcgtacctcgaagtgcgggagcaggtctgatttcaggtacactcctgctgatgagcagtagatgtacctgaagatgacacatatgggaaaattcagacattggaaatttggtttgttcagaaatgctgtaatttgggctatggtcagatggtgtagttaggcttactgttcaaggttcggcaatgcgtctaggattggggctacctcaacagcttctctccctgtaaaaccatgagccgatatgcgtgaaaaatcgcgtgatagtactatatttgatggaagattgaaggtgatagtttcagttggtgggatggaagattgctgttttttgaagttgctaggctggtttacagtgaccattagcattgacatgttttatgatctatgcagggctactatggtggtttttttggctttgaagtgttaccgtttatgtcgtaaacaacatcgaagccctttgccgcaaggcttgtcttaacgaaatcaaagtcttgcctgtcacctttcaagtgcaacacctacagaaaaaaccatcccaaattaacgccatctcactgaacttaaatgataattgttgagaacaagatattcattcagttaggcctttatactgtcctaattcctaaataatcctacattagaaattttataataccttgtgtatacattagcatctctactgcagtattatttatcacactgcaaatggacaatcctcttttacatggtatacacaggaataagataggaggaaacagcacacctttgaagagaactctgcatactctgcatctgactctcctggcaactgctgggtaatgggggcctttcctctagtgaacaatgtgacctaacaaatacagtttttcaattaacttacttctccaaaacacagaaaatattgtacttacaggggaaaaaatatcacactacacaactgacatacctggtgcccctccttgacaaggagcctggacaagaagacaccaatgaacctggttccccccatcacaagaatgttcttggagtctgcagctgctgctacctgcatccttgccccccttggctgccatgacctcctcctagcctgtcgataaagaattcacaaccatctcttagcttttctgccatgcttgaacctcatggaactgaaagtttcatgtttttctgttcttcagattacctgggttgagatggagagtgctgcactactgaagtcagagataggagatggtagcaggaggctgctcttcagggaggctgttgctgccatctctctctcttttttttcttgtttactctcctcaaccctcctctccctgtgcttgagctgttataaaaaaaaacaaggtacaaacaagaggaggggctttgtttgttcaggatggtagtatatcccttgtctgaaacttgtggttcagtcttgtgtgctaatggaacaaagcaagagagaaaaaaaaaagaggtgctgggactgttttggcttgtgtggatggggcagccagccctatcctgtgatggatcctctcctctcattctttcttctgtccacttggcagcattctgatcaaatgatggggacatctaactcttttttttattgcttttgtacataaaccctgtaaatattatatttattaatataatacagtagtagcctctcctattgtttcccgtaaaaaaaaagtacacaaagtgaggctatggtgtccacaggcattttcatcaatatatacttttttttaattggtaaaatagataaagaactagaagtttgttatacttaagaatgtaatcttattgcaatgggtataaaagttatctaatcatcttgtaactgatactctagtatcaacctgtattgtagttctttttcacctaagagatcgatgggtttccgtatggcatcaaattcattctgaacatttaaaaaggttgcaacttggttttcctcatcactgtacactccatttggttaaaaaaaaatcctagaatctttaatagttcttttaagaacatatctatgttggtggatgatatcaaagaccgcatgtactcaatcgaggctgggtggagcaaagtgcattggctagatctttagatagcctcccaggatgttgttttctttaaccattattagatcattttaatgtttgtaaaagcttgaccagttaaggggcaatggattttttttcttctattcaagtgggacacagagctcctgtgtgttaaaaaaaactgtagttctttccaaagtttaaaatttgaagttaaaaaacattggaaaacacaaatatgggcaattcaagccaaaaattgaaatctgcctctcttatcaccagtatatatagatgtcctgaatctattaaactaaaatcatccttgcttgcaaaatctgaagtacaaaaagtagaatactagaagtacaaaatctgaagaagttctcaactagtacaagacatcttattattcatacaaccaaaactagcataacaaaaaagcactccagcagctgccaacagtgataataatccaactcaaacctcactttttatcatcttcctgaaccaacgtgttgagtctttagggtaccgtgtgaaagtgctccggtctacatagacgattccgaattttgaagtgaacccgagccgccactcgaagttgtcaagcagggaccaagcaaaatacccagtgacccttgcaccatccttgatcgccctcttaagctcatggaggtactgatcaaaatattgtatcctgaagaagtcatacagtgcaccaggtagggtctcattgcctggctggtcaatgcctgcaaaaggttcttgttagattttgctcctagattcattctgcagagcacttttatagttgtactgttcactgtccgaaaattgaaagggtctccagtattatctttatttaccattttctccgatgattataatggggtccttgtacttctccttgacatgcatgacagctttgtagatcccccaaggaacaacataaagccagttcgagtacgcctgcatagatgtttaaaaaccagaatttagttcatgatctaccattcttttcaacctttcttgtaaattgttgcttacctgtttcccaattggcacaccgttacgctcatctgaatagaggaccaaaatgtgttagctaggaaggcaaagaattgaaaaggtacaaatatttctggtctaatactgtgtgatttgaaagtgtcatacatgaaattttcacatcccaatcattgagatagctgatggatgtcttgttgacgtggtgactgacataataagttgtgtaatggttgatcgcaatataatccgctgatccttttatcatctcagactgctcacgtgtgaaattgggcagcctttccttaacagcattctgcatagtttctgggtaatgaccatatgtaatcgggtgcaggtacctagcaaaagtttcaagtggaagttcagttcaaccttcatgcggacaccgtgtaagagcaatgattgatgaacagtgtaagatgtatcaccagccaagggtaaactccctggctctatgtgcagctgcgtgatcctcttctttgtcggtgagtggctcataccatacaaaatcgagaaggatgccaatcttccccttctgaatagcctgaaaatcgcaaggtatcatgaacatgagctgatacattggagattttaagaaatgttgaattggatagtaggggcatggatatcattcactagcctggtacttgtcacgatatgtcctgacagcagcggcatgtgaaaggagaaggttatgggctgcgatgtaaggctcggtggcggaattcccaccgggttggcagccggtgcatctgccaggggggaagaagccgtcaccgtagccatgatttgccatcatcctaggttcgttaatggtaaaccagttcttcaccttatgaccatatgtcttgaagcagaagtctgcaaatctcacaaaatctctcctgcaaaatgaagtcgcagacatgaatcacacattaattcaagaaaaagggagtaaggaacgtaagaaagggaggatacagattgtctgggtttgatatttgtgtatgtcggatatgctacagtgaaacctattttggttaaacacctgcagaactttcactgtcaggatttcgcagttagagagctatgggtttcataatttagcacaaaatcttcagaggtgcttctgtagtttgtcaaacaatttaaagggtatttaattttaagttttacagccaaacagatggctttgatcacgaacacttacacaattctggggtgtagccatcccttgtattgatcatggagcacctgtggaaggtcgtagtggtagagcacaacatatggaataatgtctgatgtgcaaatcaaaccaaaaaaaaacctattaattcgagatcatgaaatccgaaatgggcaagaactagaagaaatgccaagaccaacgtactgttagcaagcatgtaatcaatgagcctgtggtaataatccacgccgtctttgttaatcttcccaagtccacctacaacacgcagaagaaaaaccatcaatgaaaggaatatcccatgatctcatcactgtgcctgaccatgtttcagccggtaacttactggggaaaatgcgagaccaggagatcgagaagcgatacgcgtcgaagcccactctcaccatgttgtccacatcatcctgcaaagaagatcatcagaggagccacataagctacaaatcaagagtcatacagaggaacagaaacccattagaacaggcactgaaacacatgagactttcactgaccatgtagcggtggtactcgtcgacggtcacattcgcggtcgaattatcaggagttacacctatccaaaggaacaatcagagccaaatcaacaaccagtcatacatccactagagacgtacaaaatgcaacgcgccgtaatgcaacaacatttcaatatcaggctatgtaattctttttagattgttgttgtcatattctctttttaggtggatcgtcccaacacattgttaattccattatttgaaaaatgcgacaaactgtttatgatctgtatatttagataccacattgctagttttgcctgaacatgtatcatcgatctcaccaggttgcatcaggaaggtgtcccagatgcagggccctcggccatactggagggcgttcccctccacctggtacgccgacgacgcggtgccgaagacgaagcccgcggggaacgtctcccgcgtgaggtcggtctgctccccgttgccatgggagagggagacgacgacgatggcgatgaggagtagcaatggcatattcatgttggagaggaagagagagcggcggtgagagtgtctgatctgctgcaaactgcgtatatatggagaggcaggtgaagtggtcagggcggggcgatgcatgcatgcagcaggggaacagcgattttctctggcacgaatggtggcagcggcaaggaggactccttccaccctgcctttgtggagcagtgtggcttgcactggtcctgagccactagaattttttttatttttttctatttctgtttttaccctgtttttttttcttcttttaatcaggtgatgggttaaacaccgtctggactagtgggcatgacagtgagcttatcgcctttaaatttggaaactgcatggtacgtacctcagtctgaaaatataacaatttctgagatccccaaatacacagtaaaaaaatgttatattttgagatacagatagtatatcatatttaaaaaaactcccctttaaatatgacaagttttttaccaccggattaagatccaactgctgtccatgtcctgctatcttccaccagtcctccactggcccaccctcaacccactcatatgagcgtctcctctatgccacagcttccaccgccaccgtcttttcatcactatttctgttctacgtgccaccacttgtctatctcgctacgaccgttaaagacccactagagatgttgtttggctagccccaacaccgtctccttctgctctggcactctggctcaattaattcttcccattacctgtatatattctttgtctctaaagccccacactaccttaatttctctgatgtttcctttgtattccgccataggatgtgccattgtcgtcacctaaccactggtttcttgatgcccccatttgcctccaccgtcctattacgtcttcgtggtgtgtcgcccgtctcacctccctcacgatgtcgtggtctaccatcaagtcgccgccacctcgacattcatctaaatcgaagaactcccccttcccccctcctcccatcttgattctgactctgagatcttagttgttttggtaaatttgaaaaaagaagggtaaatttgatcgtgccattatggaaacgttgtattggaaaaataccactactaaagccgaaactaggtgggtgtcactgaattatcataaaattagaaatgtgccatcgccataaatatttccgtcaaagaggaaacatgcatcatttttcttcctctccaagcaaccaccggcggatggtcaagagggcaagaccggctctataatttcaagagccccttgattctataggccctaaacctttttatttgcaatatatactctataaaccatgttttttttataaagtgatattaataaacattactaacatgataaaaagtaaattaatgataaacagtaaagtaagtagtgcaaattaagatatggtattttattctcgataaatattgctgatagtactgtaataaaaaactaaaaggactgtagaaacaaaatagtatgattatgaataccttaaatacgagaccacaaatatacaatatatctgatataaaatcttgatgacaatggcatggtaaatttatagaagtatgagtggcatccacccgattttggttttcatagtggtatttttccaatttaacattttcgtaagggcatgggccaatatattaaaaaaaaactcactatggattgcaaagaccggttgttgaatcaaaactagacccaactataaatcgggtacccgatgtgccccttcccaacatgcaagttacttttctctccatagcacctctgcatgcatacctcatttctctctcttccactctttctacgcgcatgcaagctctctcctccacacgctctctctctcctatacactttttttttcgacacctcctggtatcgatcacctctctctctctcctcctatatactttttttccaacacctcctgtacttaactaggtgattccccgcgttttgctatgaaaattactaagtaagttttaatatgtttttttaataattgagctaagagtgaaaagtatattggttgttaacaataaataaaactgatttgtcaaactatgttcgatgagaaataaatttagtagactctgtaggagattatacatgaaatatgatatcctgcattttgattatatgaaaattcaaatgcaaaaataagatcaaattgtgattctaagatgcattcctaataaaacaaaacatgtgttttctccaaatggcagcaagcacgctcggctgagcaaaaaaaaaaaagaaaaaacgagtgatgactaagcagaaaaaaaggtctggacgacgcagcataggattaatagagaaaaaaagaatccaattctcatgaaattcacgcaaacctgcagctcctcagtaattaaattagagatacatattgttagaaaaatagagaataaaaagtaagttattattcacatgaataataccgatgaaactatagctcttcatcatcaatcacacatttatcccagttttcggacccttaacttattcctacccacgaatcaccatccatagcacacactaattgagctaatccctctttctatatagttgagacccaaagctgatctgtgattaagccacgtcaccactaaaacctcagccgttcgatctgatctggacggtcgcacacaggtgaagcccagcccacttctttccaggatttttcggtttctcctaacccatccgcatcgcgcagaggctatgccgccgccggatgcggcgcttcctctcccttctccttcaccctcgcgccgcttctcctcccccgtgcgcgcgcgcgcgagctgcgccgcgggcccgcctctgatgcggtcgcttcccatccccgcgtcgcactgcctccccccatccccacgcgtcagccacgccacgcgcctgtagccctagggaggacgaccgtcgcgtcccgcaacagctccttccaccgcctcccctcccctcggtgcttcctctccattacttgatgccagaagggagcacgcccatcgtgctgaccacccagcggcgcctccccagccatgctcacacccgtcgtggcggcggcggcggcggcgccggcgcggtcccggtggccaagctggaggacgccgccacgctcatcgactccgtcgagacgttcatatttgactgcgacggtgagatggcacgctggtcgctcgatggttgattggttgtgattttgttatgaattgtcgcgttctttttgttgcgtagcagcgtaggtgtgatttggaagggcgagaagctgatcgacggagtgctagagacgctcgacatgctagatcaaaggtccgtcgcaaactgcaatggtcttctcgaactccgattccaacttagcattatcaatctgttggagttgaagctgatggggttgtggtgttgcagggcaagaggctggtattcgtgacgaacaactcgaccaagtcgaggaagcagtacgggaagaagtttgagacgctaggactaaacgtcaatgaggtaggattcatgccatgaactaccaaattttctttgtgcaaccaatctggtctgatgagcctggaacgctctatgcaggaagagatcttcgcttcgtcgttcgcatatgtggcgtacctgcagtccatcgatttccccaaagacaagaaggtaggagtatctaatttatatcaccatcttcagaagttaacatgttttggtacgaagatacgtgcacaacgttaccatttatactgttcatgttcagcgattttggcaaataatgtgtgcatgtttaacattttaattgttcaggtttatgtgattggagaggacgggattctgaaggagctggagctggctggatttcagtatcttggcgggccagtaagtaataaaatttctgaacccatgttcagtgctgcattcctgggacagactaacacacataacaatcatcttgcagtctgatggagacaagaagatagaactgaagcctggattttacatggagcatgacaaagatgtaactacgatccctactagcactcgccacctatttcatatgtatagaatggtagttggtgattccgtatctacagcttcttctgtatgttgcgctactcctgttgatcttcaatccgcaaaaagaaggccgatgtgtaccattttcctttatacattgattttggacatggccaagtcaggagtggagtttgaggctgcccttttttattctgatggttgaaatcgttgtcttcttgcctcgacaactactgatccattttagagcttctgctgcttgccctagatcaacttattgtccaaaagtatgaatctgcaccagctggacagcagtgacattgtcctctcactacaggtaagccgatattatcttttatatttctcatccattcattcttgttatcacttgctagccattgtcctctcactccagcttaatctttctctcttttcccctaaacagaaagccaggggtttgtttggaagatttagtatactccgtaagctgaggtgctcaaagataccttctacctggatggttcctcgaggaagtttggcctccccttatatgctaccactatctctctaccttcctatttcatttgttcgtcactaaagaatattataacgttgctttcagaagattcaaggatttgctctatcttccatttctttcagctcaatatcattccttttcatcgtaatgatataataacatcaagtgatttgatcaagcataagaaagactgcaactgataaccatttgcaacagcgcactgttatatatttgatatttggcatgttcagaacttcttttaatcgatttctattttctcagaattttcttaccatcattcactgagcatggttattgttcttgatgaataccttatgagaaagaacatgtattatgctatgtggattggccctttaccttactgattttatgcatcaaagattgcatatttttttgggttcatcgaagagatataagctctaccaggatattttcatctgttcagccgatggatattttcatctgttcagctgatgaagtgtgcaatactgcagtatgagttaaatggatgtttcagtggatttgaatactgaatttcacttccttttgctaaaatgtaatt

SEQ ID NO: 9917 - DNA, 30802 bp, Oryza sativa
tacagataattatgaaatatattctttaaaaatgacattggtaccatgtgtattttactccataactttccagttaaaactcaatctacagtcaagaaaaaaaattgtatgtgcagaccaggggcttgtttagagtgctctcataaaataaatgctttccgtttcacttaaaaaagagagcggagcatgttatagtattctcataaaatgaactatagagatcctactctataacttcacgcaaaacctagctagctttttagttaaatttaggggttggagtaataacaaacattgcccaagtttggatttcaatatttgtgaagcaactttcgtgttactaattttatacagcgatatatgtcatagcgatatgcatttgaaaatgatttgtctagacacgttttttccccctccgttctttacaagtgggaatagttacttcagagcatgttcttaaaaaacaaaaattaaaaattaagagcatgtataatagtagggatgatcgatactttgactttgttcatgtcatctatttattaactaaaatcacggcatggtcataatggtcataagtaggttaaaactcttataatcgcctagacaccttagcttagctcacgttccctattggtgtgtgaataattcaaaacttgatgaactttgctttaaaatgataggaagagccaacatcaaaggataaaaaaagcaacgtacctatcaacattgtggtaacttttttgacatcttcaaatatatgtccgtatatccgatatgacacaccaaaactttacacccttggatctaaacacaaccttaacttcaattcttcacgatgaacgttgtggtatcttttctgacacaacttcaaactctaaaggtaaaggattgattatgccacttttcacggtttgtatttgtactggaaatcaaaacaagcttttacctttttgtttcacacgacatatttgtgctcgttgaaaacatattaggacacttgcgttacctctcctggtgcaaataagtgaataacatacggaagaatgaggaaacgtagcggaataggtgtggtggactctaaaatgttcgtggaccctacatctcttggcccacatgtaagagaaacaggttctccttgatcaaatctagattatggtggttctcgacattctgtaacagaagtagacccggtccaacagcattggtaaaatttagaaagaacagagaaactcccggtacaaattcaagaaaagcttatcaagttaaagatacctcaactcacgcattctaaccgaagcaagtacataaatctcgtcagaaatcaatcgcttcatctgcgcgaactacttttggactgtagctttcttgcttaagaggccttctaagttgaggttattgatcttcgcagcaaggatgaaatcattgtcagttaagcctcctgcaaccatagcagtggaatcacatcattataaactagagtgatggactgatggtgatttctgttctgttactgtgcttatgttgcttcagtacggcttcctaaatcctaacccaattctcaacaaccaaatactgtgattatgtgccttcagctacagttgctatgtctggtccctatttcttgacttatctccttttaagcatacaaatattttacatggaaaaggcaaatcaccaacagactaaacatccaaggctccaagcatgtaaccttttttccataatccatagaaattcggttaggtttcaactaatagagggcaagaatttctcaaataaacatctgaattttgatattgtccaaataaagagcataaattatgccattatggccatcttgtttttcttgcaaagtgaaaacttagtcaagtcaatcagagttcctaaaatagtgtattgactaatagccatcattcattaaggtttaggaaagagccattttgacctttcagtcctagagattgaaaaggttaaacaaagttaaacaggaacaacagtgatccctttatttcattcagcagcattggcttcaacattcactgctaaatgtaatgagtcaagtgttttcaggtttggaaggaactttgactaaagaacaaaccaaaatactgagagatatgaggtttgattcttttaaatgatcacatcaaaacaaattggcaaaacgaatgatatgcaaatcacttactgacagagtgagtccaaacatcaattttcacattgttccaaccgacaagatgaagatcagggtggtggcctgcgaaaggacatcaaacatacttcactggcactgttatttaaaacaaaaatgagatccaaaaaatgtgaacagtttagaagtgtttttcatgcaacatgtaaataaactcccagcatactaaatataattgtagcatgctatgacaacaaatgtaatgcataggtagaaaaatgtgagaaaactaataatttgattctgatcaccatgactacactatatcaaatgtaatgcaatctttctattcttcatcaatagccataacaattataagatattttcccaagttcaacaggagctagcttactagctctcctctctatcttatctcatccagacaataagcgtagaattacatgcagccacgaagtactgcatatgaaatagtactagcttgcagtagctccacttggaacacttgctctgcatcatattgtttaacctttttatggtacgtttggtgtctcaaaagaggtatgtaaaactgtgaacctccaaatcaactagtactgtaagagaagttagctaatcattgctgacttaatttaactaaggaaacatgtggtggaaatagaccatatagattatgccagtatgtataaaaagaaacaaaagaacaggaaaccttcttcctcagcaacagcagcaacaagctgaaggaattcaagcccttttacaaaattcttcaccttccatgctctgtgcaatttcagaatgtcaccttcggttgctaattcccaaccacccacctgttttcaagagtcagttgatgaagtgccaataaccttaatcagactcttgactacaaaatcatacaagaataaaacctgttctagcatcttcttagcagaatcttctggcatggcatgtatatccttagaattgcatggaacacaaatcttctttgccagctctgaaataataggagaagcagatctgtgagattatacagtaaatgacagtatggattaacaaggcaagagaaagtcaagaacagaagaatggggatcgatattgctactggagaaccacaatatggtgatgggagtatcacagctcctgtactgcatgctatcaagacatcactattccctcaaataagatgataagaatagtattctgaatatcattcaaaaagctagaggagcaaaccaggggttcctgaatcctgactagtgactacatggttaagatatcctttatttggttattcctagttctttttatccttcttacttaggtggattgctttctttctacctgttgctgtccatttcttttacattataaaaaaaatcaaataagaacaacatgttcatatatttgaatacccagctaaaattttaaaagattggctcatgccattgcacccgtagcaaagttttgcaaaatatcaacagaaaggtcgaatgtaaagtattactgcaaacgcataaattctggagaatagaatcgacatcacgttttccattcaccaaatctgccggtgtccgtttaaatgagagaagttttttcctcctggccttctttcaccccaactacgggtatgggcagacgattcatacgattgcagcaagatggtgttgacagagcacccacggccacggcatcaagcaagacattagagcgccgccgatgacaactcaagcaggaggggaggagaaggacaccatggacacatggccgcggtctggtgcgcgacgacgacccgtacgcatggtgcgacgggaagagattagaggacgggggggaggggggggggaacaattaaaggcggtcgaaagatgacctggatcgccgatcgcagccgtagacgacgacatcccgacgacggcgcggctcagacgatctttctctgcctggtgcggtgccaccgctcgagggctcgggctcgactcctccgccgcggcgcaactcacagcgccgttgtccgccggttccgcctacctcgtcaagctcctcggctgcgtgatgccagagacaggaatgggcgaatggctagtgtagattgtagaagagtttgtgctttgtagatggaatgagtgaatgacaggtagtacagagtttaacaagaaaaggcaaagaagaagaacagagtgagaatgaaatgtaacggatacgcaatcttccaaaaatgccctacttttgtgataatagtatgtttccatttatgcacgttagctgcattactactccatgcctcaaacatgtaatagtttccatttaaaaaacaaccagttgagatgaaactctaggtgtgaattgtacgtgggtgcactaatacatggacagatgaaccggatgagttcaaatgaatatcctcaaacatttctaagaaactttcaggaggctggtgtcttacaagactaccttgattgtcaggagaaccatggcaccatcttctacttgacattttaatctcgtcttgacttgcatacatcggatgatgagaactgcatcatagacaatggtatttctccactcagttatccatgagaccatcagctaaagctcactatagcataaaggccataagcccatacaagacgtcatacgatctcatttatcaacggaacttgtatcgaacccagaatttgagtgttttttggtcattagccatgatttaaatggagttctacactgtgtcctctatgactgttcccaacaggaaacttgcccggacaaaaggtttgcaagttccaattataaaaatgaacaaaggaatcgtcttcctattaaatgcatatgcttgcatatacttgtaccaaaatgccacgaaaatttatcagaagcttcctttcagaaaaaaaaaaactgtttccaaaagcatatcaaccatgttgtaatgcttccaaaccaaaattaaaagtgcatgaccgctacagcaacaatagaattcgccgtacacctaacaggctagagaactcttatttttcatgttaaacaacagtacttgatccttacttccgtgcatctttcaagttttttatggtgttctcatatacatccttattggtagtatatattaggcaaagatgtgcagaaatactctgattctgaaactacaacactaagtgatctgaaacatatgctaaaatcgaaccacatagcatattaatctgtcatgcaacagataattagtgatcatctgtgcccaaaggatctgcaattaacgatataattacagattaacatgcataaccacctctcccacccctttcaaaaacaacagcacgtacaacaatccagaccccgacaaacccacccacggtataaaatttcgagcacgattcaagaaagaggttactcgtaccgtccatggcccagcagcggaaggttcttggatacggtaggccaactgggggccgccatcgcctgcacaggcaacagaaaagaggcgggttagtggcgcacgggaggtgttcgacggtatgcttacacggcgttggtggggggctgggcggtgagttcttcgtccccgcgtttggcatacgtagtagcgcgccaggaggagcctcgcgtgcgccatagcgacgccgcgggtcatcggcgacggtgggacggcggcggcgctcgccgtgggcttgcgacgcggttgggggaagaagagcggaggcggcgggaaggcggcgtgtgggtttgcctggcgtgtggtagcgcgtgtacccgctgtttacaaatagtactactagtagccttcgaggcttcgacgggtcactgacaggtggtcccaaaattgtcctgaagttattttctctaacagattatttttgacaacttctacacgctcgtgtatttgcattttgatatttttgactcagcttattagctacttcatctgtcttatattgtaagatattttaatttttttctaagtcaaaattttttaagtttgatcaaatttatagaaaagtatagtaatattttttaacacaagacaaacattctatgaaaatatattcaatgttggatttaataaaattaattagttttttaagtattgctatatattttttataaatttgatcaaatataaagaagtttgacttataaaaaaataaaaaaagttaaagcgtcctataatataaaacgaaagaagtagcttatataaaaaaggaaaaaatccaaatgctcccctaaactgtagagtctgtctagcaccttaaactttaaaatcggacatccagccccctaaactttgtaaaaccgttcatattaccctctaaggtggttttgtatggtggtttttatctaatttgtatataaatttaatgagtttgatcacgtgacatacacattgaacatatatattaaaatctttagttaaatttttatttgtactactttttagctctcacttacggacaactatcgacataataatagtatggtatcattgtataaatataaattgatgatttacaactgtttatatgcaaatatgttatataagttatttaatgttgttcgtttaagcatccaaaatatgcaaaaccaccttaggaggtaatatgaacaattttccaaagttcagggggttaaatgtttggttttaaagttcaaggtgctagatggacttttatccaaagtttacggggggtatttagactttttcctataaaaaatcgatacgcttggtcatcgcccattattacccttggtgatacacaggctaaaatgggagtgacacttaatcgtttcatgttgatatgataatattttagaactatttacttcctccgtttcatattataagactttctagcattgcccatattcatatatatgctaataaatctagacatatatgtgtgcctagaatcattaacatctatatgaatgtgggcaatgctagaaagtcttataacctgaagtggaggtagtatttatttattcaatcaggttggcttttaatatgtatctatcaaaatatcgtgctagtaatgtgaatatagccaacgaactttcaactctggaataaaaaaatagcattattcactttggcttttatatgtaaggaagtttaccgcccatcaaatctactcttgactccttgtttgtttatatttaggtcccttattggctcaaactttgtgggggtttgacacttttaagttgaatacataaatcaattcaacccaaaaatttaaaccaataaaaaaagcagggcaattcgcttacacttacattaaggcacgtgttcttaccccatgtttcccaactcattcccatcgttttctgtgtgcacatttttcaaactgctaaacaatgtgttttttacaaaaaaaaaaagtttctatacgaaagttgcttaaaaaatcttattgatctattttttaaaaaataattatctaatacttaattaatcacgtgctaatggactgttccgttttccgtgcgcgctgttctggttgggaacaggctcgtgcgaacacatcctaagtttctaatgaacattacccgcatactcaattttcctgctcaatatccacatcaatttaatgctttgtctacgctctaagctaatactacctccgtcctaaaatgtagctacctagtatagaatgtgatattacctagtactacgaatcgagacagcctagtacattccaaattagtagtaataggtaatgtcacatcctgtactaggtagctatattttgggacggaggaagtagtgattataacacaaagctattgaaacatttgataggagaaatgcctaccagagttgaaagtaacacatgaacaagtactaaccaactagccttgcgagttgtagttcttagcttgcctagaactttgtgtgatcatagcaacacgccaacaaccattcctgactctgagctcacatggtaggcaacatatcctatgcacacaagccctcacgtgtacacacgtgcacaccaactaaaaaatgtcaccaaaaaatctagaaaaaatcatacatatactttcaattgtattacacctagggttaaaatcttaacgtcaaattcattatattttagccgtaacaaaaaaaaacaaaaaatctaacagttttaaggttacaattttgtcataattttatcttttttgttattctctatgtagaatgaatttgaagatgcgattttgcacgtagatgtaatactattgaaagtacatgtataaatttttctagaattttttgtgataatttttagttggtgtacacggtgtgtacacgtgagggcctgtgtgcataggatacgctccccacatggtaatgtcacactattttccttgtggaaacaccaagcgacgaagatgaccacaaggcgtgaccatttttttctaaaaagaagcctgaaaatgtggatgtagctcactgcattttttcttcgtttcgtcttgatattccgattagatcaggatttcacgtaatcacagttattttcttcgcaacaacaagaatgatgatggcatgacgaaaatgctagcggagttttgtaccttttctaccatgaattgagcatttctccaccccatttttatgtcatgccttgcgacctgtaggaaccgtatggcacacacgagcaaaagacttttaaaaaatccatctactccttttgtcattattgtcctctaatttcgttttgcactcgctttccaccgctacgctaccgcaaaagtaaaccaagccaaactgatcaagcccaggcatgcaatccggcgtgacatttttccaggtgcattctcgcgtgagcttagcaaagaaatatctcgtggcacctgtcacccctccgctgccgatccgacggctcgtacgacgccgttggtaggatcggacggcaaggggtggctccagagtccgctgcttccgctataaattggccccaagtgggggctccacgctacagagcagcagtctcgtctggagaagtggactagtggagtgtcgtgagttcttcgcttttgcttggctaaaatcgccgttagaaacttgtggaatcgagcaggtttaagaatttttctagtatccactctagatttgctttgttgtatgcttgaatcaaatttttttcgcttgatgatcaatttgagccaaaaacatgccgtttttctggtgattttttttctagcaactgctttgaaatttgtttcctgtttttttttctcaccaaagcaaatttgtaccaaatctcaccgaaattggcgatttagttgggcagttgatgccattgtttgtcgtcgaactatgcaatcccgatcgatttcgtgttcgtcgtctcgcctcctcgtgatccttctctccaccatgtgcagctcgccgcgcagccatgggtacgcgacgcgtagggctcctcctcctcctcctcctcgccgccgtactgctccagcccctcctcgcggcggcggcggcggagggcgtggtccgcatcgcgctgaagaagcggcaggtcgacgagaccggccgcgtcgggggccacctcgccggggaggatgcccagcggctcctcgcgcggcgccacggcttcctcaccaacgacgccgccagggccgcctcgaggaaggcgagggctgaggccgagggcgacatcgtggcgctgaagaactacctcaacgcgcagtactacggcgagatcgccatcggcacgccgccgcagatgttcaccgtcatcttcgacaccgggagctccaacctctgggtgccttcctccaagtgccacctctcggtgcgcgccgttctctttggttgccgcggttcaggggttttgttagtggtttggtagtgtttgtggtgctaattggagtgtccctttctgatgtttgctgcagattgcttgctacttccactcgaggtacaaggctggtcagtcgagcacgtataagaagaatggtttgtgctttctaccaatatcttctcagacttataatgttgtgttgcagtgtgatttagtagcaatcagtgttatctctccagttatattgataatctgatcgatcaatactctgttggtggcttggtgcctttcgcctgttcttatatagtagttctgttggctccaagtgagtaactgaattggcatgactaatttaaaatttcaggttgataaagtgcattaacatgaaaacttatttgaagcatatatcaaactagatgttttctgcaatttattaaattacgctgtttcttgtgcaattaatactctctccaaccacaaataggtagcaatttttgcatcaacatgtttgatcttactgctcatatacagtagaaaaaatatcaaatcactagtcagatttatgtgtttatgcccaaatggtacttagtgttggttggatgtttattaaatatgataaaagtatgatactgtgaaattatttttcaagataagtttatgcaacccatttttgtatgttggtatgtccaatataatgaatagagatatcgatagctgaagttatagtggttaattacacatgtcccaaaaacatcatatatttttatttaacttatttttttggagaacatgcaaaagggttgcatgtccttccattagatagagagagttccccaaagcgtgtttggttacagacctggctatataaaccctgggttacagatcataggtttatatcttgcgaaaaggttctaaacttcgatggcccttcatatcaccacggtttcggctcttgtatttttaacaagagggagtaatactgtaataagtttctgcagctatgtaattgtgattagttgataatttttggtttgatggatttatagtcatcttagattgtgacgttgacaccatcctgatatttattctgtggactctacagttacccgatctattctcagataggccattatttgtaccatgatgtcaattctgtgaatccaaaaaccaaaactggagaaattatgtagtgtgaaattgccactatgatacttccagctttttttccactatgttctagcaaaaacaagaacccataacctgtatttacatctttggcaagcaatcaactgagtagcaacatagacgtcatgattataagatgttattcattatgtgcgttaaatctgtatctgttctgatgtgtccttggatttaaactgcaacagggtgttaagttcatgaatataatttatcagttctccttggcaggaaaacctgcttcaattcattatggaacgggtgcaatttctggctattttagtcaggacagtgtgaaagttggtgatgtagctgtgaaaaatcaggtttatcatcagctgtaacttgctttcatcttatattcttatgtgcatccaattcgagaatatcctgattttattgggtaacactgctaggattttattgaagctacgcgggagccaagtattacattcatggttgcaaagttcgatggcattcttgggcttggatttaaggaaatctcggtaggaaatgcagtgcctatctggtgagcaagtcttgctagcatcttgaaaaaaataaatccattgcactcgtatggtaatagtagcatcaacaataaaaatgaacattttactctgtgtgtgacatgtataccttcattctgaacaattttttggaaggaaagagaaaactgagttttaagtgggaaccggcaaaccaacacctatacagatcaactatgttagactgacagactatcttactgtattatattgcaaaatgaagaccattttgtaccgggctacctgcatatttctctcatccttcgaatgtgaagcagatttcctgtcactgacattgcaaagcaaactcataggtacaacatggtgagacaaggtcttgttgttgatcctgttttctcattctggttcaaccggcatgctgatgaagggcagggaggcgaaattgtgtttggagggattgatcctaatcactacaagggaaatcatacatatgtccctgtcactaggaagggatactggcaggttgatctcattttgaagttggttgggtatgttttaaatttcaatattgatagcaatggtctgtgctgataaaattatcatttactttctgaagttcaatatgggcgatgtcctaattggagggaattccacaggtgctcaattatcaattttttttcatgctcactatacctttatttaaatgcaaaatggtctaatctttttctttttgaaaggaacatagtctaaatcattttggttgttccctatgtgtcattaggattctgtgcagctgggtgtgcagcaatagcagattctggaacttcactgcttactggtcccacggtatggtgtgaactcttctttttttataaaaaaaatgtccataagcaaggaaaagtggtctggattgcatctgatactggggttcctaacattggtttattgcctgaatctggatttcaatcgtgtgtgaaattcacatctgtaaatatttcttaacaatcatttaaaccactgtgcttttaacttaagttctacggcttctaccattagcacaaaatgttgcattttttgagtacaccgagtcattgaacatttttatagttctgtcagaaaagtttcgtttagattaaacatagagcatagatgcatgattttataattttgcaggtttccttttgatcaattaaggtaatcctacaattaaatgacaagcaccaaaccaactgaatggtattctacccttaaatggcacaaacaaatattccttgggccttgcttggcagggcccaaatcccagctcattcccagggacggtcaggaaagtcttaaagaatcactaacttcccaaaaggctgtataatttgttcccaatgtgtacattgcctattgaattagatagataaccatttaaagaacatcgcgtgtattatctagtgtcagaactttcttctgtggtgggtacattccttcttttaaaattagactttgtcttgatgaatcaatttggaactatgcaggccataattactcagataaatgaaaagattggtgctactggggtagtcagtcaagagtgcaaggcagttgtttctcaatatggtcaacagatcctagatcagctgcgagcagaggtttgcagttttctacattccaaaagcatgacgacatgaagttctcaaattcgtcactggtaactgaactttctctgggtttgtgatgcagacaaaaccagcgaaagtatgctcttcggtcggtttatgtacttttgatggtactcatggtgttaggtaagatttgtggatttgctgttttttagatattgggaactgtccagcctctacagttgtgggtttactgtggatggataattgaatgcgtagcattttactttgcaaattcctaatggtgtttacttgaatgcgagtgctgctattgtttgtgcttactaaatgtactagattattataagggatgaattgcattaaagtactgttgatttcattattcttgataactggagttgttacttatgatgactagttgtgctatgtaatggcagtgctggtattcggagtgtggtgcatgatgaagttggaaaatcaagtggtccctttagcagtgcgatgtgcaatgcttgtgagacagctgttgtatggatgcatacccaacttgcacaaaatcaaactcaggatctcgtattgcagtacattgatcaggtttgtttcctagcttgtaagagcaacgctgcagtgcattattatacaaactgtgtgtaacttttccaaccttcacagctatgtgaccgtcttcctagtcctatgggagaatcatctgttgactgcagcagccttgcatccatgcctgacattgccttcacaatcggtggcaacaagtttgttctcaaaccagaacaagtacgtttcttctctatgactcttatgctgtcttttcttgggaattgcatccatattagctcttaagctcaggaattgttgtttgcatattttaagattgagatgtttttgcttaggaactttaactcaagatgtgatttctccattatcatcttgagttaaagtgatgcagccatatattagggaagagccccgtaggatgtattcccccaaaaaaagaaccccgtaggatgtttatttttctattttagaatatactccctccatccaaaagtctcatacatatttcttttgtcatcgagaccaaggagaaattaactcctccaatctatactctgcatgcaagtaatggggttggagaatggttgcttgggctccgagatatatgtttgatccagtgatgctaaacaaagagtcactctgttcattcaagccttagatgcatggagactacaaatacaaagcatctcatttggaaaaacaaaaaatgaaatacataagagacatttggatggagggagtagtccaatactccaatacaatgcttattggcactccttttttctttttttcaaattgttgcatgacaatcaaaatttaaaataacaacgttgaaaaaaattacagctagatataagaaatgagaaaatcagcacgccagaaatggtggcaaaaatgcttgtggaacttcctatagcttgagccttgaggaagaggtagataatattgtgtgtaaatggttctcatgcattcaaaattcatatattctgttttatcttccctattcagtacatcctgaaggttggtgagggaactgctacccagtgcatcagtggattcacagctatggacattcctcctcctcgtggtcctctctggtaaattatccacctctcagagcgtttttgcatttttcaccatcaatgaccctttttgtgtagcatgtactgctcaaacagaacaattgcataagtaatcgtctgtcctgcttgtgtcttagatacttgtcatccaacaaaagaagtgtattcaacattttcagagttcagactgtatgttgaaatgctcgagttttcttcttttatgatactactacttaacaatcttcgttgtgcttcacattacttaaaacaaatccccatagactgatagacatgttgcccttcactgaccacgggagcttgctgttgcaggatcttgggagatgtctttatgggagcctaccataccgggtttgactatggcaacctgaaggttggcttcgcagaggcggcataatgccccccatggtgatcggacgagtcggagagcccttagcttttcagctcgggtttatctcccgcaagcgtgtaggtatatattttagtgcatgctcaataaatattgctactgtgatctcaaaacctgtctgttttaatttggctaagctaaatataagtaggcagaattcagacgacagtttatcacaggaaatactccatgagttagcaataacaaaacaaactgataacgaggaaaacctatcagtaatcggtttaaaaaaaaaaactaacagtaagaaacaattgattatgagatagtaactgctacaagtactagataaaaaatccttatgactgacagcaaaacatcattcatataggagtattatactagtgtgaagtacgtaagtaatttgtaatcactggctggcttcttccatagccaggtaccataaaacttcaccacagagtggctacttcgtggtccacataattaagaacacctaaaaacacacgtcctcccaaggcaccaagaaggatgacaaatactaatccttctctcccggatgaatcttaaatcatctcgaggagccatcaactcacactcacgtacctcccacacatgaagtaaaacacacaaatcaaaccaagcctttctttcttttactaccactttctgggcctaatcagcggtcaatctctatttcccgccgttgtgtcggcccttccccctcgccggctgggcctgcctggcccgcgcgaacgccttgctgaggaagcgcagccgccggctgttcgtggtgatgacgcccgtggtggacggcgtctcaccgaagacgacctcgtagccgtcgcggtacgagtccatgccgggcaccaggagctgccagaagaggccccccaccgtggcgccgcccctccgcgccgactcgtagatcttggcgtacaccgtgccgtagagcgcgtcccgctgcccgctgctgtagcccgggtccttccacgacttgccgaactctgcgatcagcagcggcttcctcagcaccgcctgcgcgtccgcgatgtgcgcgtccagccacctccccatgaaccccagctgcgcctggtcgtccttgcccgacaacctgcacgcgccacacatgcatttgtcggtttcatcacttagcatttagacagccatggccgtcgttgatcgatcgatccatcgaccggtgacgacgacgacgaagaggtcagtcatataccattggtcggggtaggagtggacggtggcgaagtcgatgccggggacctggttgttggcgatgaagtcggtgccgagctggtagccggaggggttgacggcggcgatgcgggacggcgaggaggcgccgtagaagccctcgaggccgacctccagcatgtggttgcggtcgatggacttgacgtgcgccgccatctcggtgatccacgactggacggtgcggccggacaggtcggactggcacctcggctcgttcatcagctcccacgccaggatggtcgggtcgtccctgtacgccacccccgtgatcgtgttcttcctcgtcaacaccgtcttcgcccatcatcatcagacaaaagcaaagttgatcgtcagaagcgtgccgtgagaatcaacagaatttctagagaattgtggcatctatatttcctgactgataaagtaacgtgatcatggagtgggcgcgacactattgagcactaataagggcattcccaacccaataactaggatggtgtccatagtattaaataagttgccacttagaaaaaaaaatgatgtgacaagtgaataaataaggaaagagaaggaaaccatattttgcatgagacatggtttctacacaacatccaaaacatcatgtgagataagtagtattaaattgaagtatgaaatagtggtgtttgtattggaaaagtggtgtctagtactagtttcttgatgatgttaagtttatagaaactatgtctagtgttatgggttgttatgggttggactgcactaaagcacttatccgatggggccctgtggtgtttgaccaactgtctgatgcagcagagcaacgatattgcagaggcatccgacagtgcaaagagaagaaaaaggtagtgctgccatgcgcaacgttctgatgacagagtcctgcctgttcttgaagaatttaccaccactagtgtgctttttggaaagttcagaccagtccaccgacagtcacagtattaaatcaacagtagtatctccgcctcaccgtcctatttcttagatttaaatttatcctaacatagttatcataatgaattactctctccgtttaaggttatactttagttaaagtcaaattgttttaagtttgaccaaatttataaaaaatagtaatattttttacccaagataaatttatttaaaaatatatttaattattaatttagtaaaactaatttagtaatgtaaatattactatacttgtctataaacttagttaaactcgaagcagtttgactttaaccaaagacaaaatatcttataatttgaaacggatggagtactaattatcttattgtcacttctgatttaaatttctctttattctaccctgaatcagcgtactgctcttatctatacaccatttaacgagagataccttatttagtaaatcttagtatactccatgttaaataacttggaatcataattattttgggattgaggtaatacttgacacatacacaaaagaaaattcaatactaatacacaaaagaaaagacggaggaagtaccactagtccactacaagccacagttgccgctctggagtgtgcataggaatgcgtcttcccaataaatttgcggcaagatactgtactagtagcggcgcatcacgctgcatttcaacgaacgctctatccgtgtttgccttaaattggtcattctacctttgctattctcagggacgaatatttcaccgcagcatttgcgggtatatcaaaacaatgagataaacgttcttcttggtgaaactaacctcgatagctttttcttcttaactatagtctatagatcataaaatggaaacaacacaaaaatgaaacaaaggaaccatcttttgaaatacgaaggaaacaaagaaccccatatatcctagaaagtagaaatagctatggtttacttcacgtactaaacggtagatattttctcggaatttattgccgctgttaccttcacgtggttcttgtagaagcccttaacaacagggttggtgaagaactcatcgtcggacccaatgccctgcccctgcgctcttgcccagttcacatactgcttcctcccgccaaaagagtcgtagttgtccacaaggctcagtatcaccttgatcccatacttcctagcctcagacagcacaaaatccaaaccctgcacagagaacaccaaggaaacggaaaattaacacgcgaaaaccacacatctcaaaccaaaaaccatcacccccaataaacaaaaccatcaccatcacatgaacacatgctctgttttcacagagagagagagggggtgggaggtagagatgcaatggaggcggccaagtagacttttttttctcacttatccatacttttagcttattttttcttctaaattttgtactaacatgcgaaaaataaactagcaagcggtttttacacgagtagcgggactacccacttgagagggacaatgtggctaagggaccgaccttgaaggtgttctcgttgtagttgccgggggacaactgcagcgcgttgccgccgccgccgtcgctgaacgcccacgtcctggcgacggtgaggccgtgcccggcggcctcgccgagcgcggcgctgaccttgcccctctgcgacgggtcggcggccagcaacatgagccagtaggcgttgaacccgttggcgtagtacgggttgccgtcgagcacgaaccgtgtcccctgcgccctcacgaagccgccccctcctcccaaggcctccgcctctcctaggccatggatgacgacgacgacgacgcacgcgagcaccagcagagcagcacgatgagctccgagaagcctcatcccttgctctctctctctctctctctctctctgcgtgtgcgtactgtgtctgcagggtggctctcttctttgctttggatggcaatggcgatgaggtgaagcgagatgaaagaatggaacttgcaaggaggtgaaggctgcgataaatagctgcaactcatggggcgccatgtcgttctcctagcttcaattctgcgcggcaatgcaaatagaagctgagtatcactgtggggtcagctaggctcacttgtcagtgggtcactagtgccagcttcgtgcacatagcaaccaccggatgtgaagggcatgtccttcaggctatagtttcataaaaaaaagaacagtttaaagtactttcataaactgaattagagagatagcgagtttcaaaacttcagactactccataattttattccataataaacttttaaagctaaatttaaatgttaaagcgttgttaaacaaacccgcacaatactgtactactccatggctagaacttagctttagctcagcgggtggtggaggagaggggtggcattaactttgtcggtaccagcgcgccatggaaggaagcaaaaggttcctttaatatttgagcatcccacatggggtggaagtgttggactgggactgggaccgatggtgatcagtgtacggtttctttggtagggtttaccaaatctatctcgagcccaatcagctagtaaatggagggcacgtttgtggtttcggttagaactgtgactctgtgagtactgttctagcgagtccaatgcaatgcagtatcctctgggtccttgttgtacgtagattattaattgattggtccacggtgtactgtttgttgccatctgttttcgttgcatgtaataattaaccgatttttgctatatatttacagatgaatttttgtactaaaaatttatcaaatataaatacaatatgattgtgatgcaattatattgtatcttgcatgtaactataaggtcaaccacaatgtgtgctaaaagtaaccttaagcaataaataactctacagtatatcaccttaagtattgtgaaagtggaccataagaatctgacatcaaaaatgagcattagccttatggtgtggcaacaagactatagaatacaatacttttgtgatgtactgttcacgctagtacttttgggaaattttcattgtgcaaagagtttcacaggaggataagaagtgatttttttatccttcggtgggacccattgggacccagcttattttctcccataggcacaaccattgtggatatgaacatagctaatgcttacttatagcgggtcccatatatatggttgatggaaccataagcattggccttgccctaataaatttgcatattactttcatataattttaaaccgttagatttattttaagattcacacatgtgggaaagaaaaaaaaaccacagcacacacgggtaagatgatttggtcctctacgaccttcactttgcggaaatagcatactatcgaatgattcttaaaagttttatataagttatactatacttatatgctggttacaatgtgattatactatatttatatctaatttaaagaaaattcataatatttttttagaagaaaattcataataatattttagaagaaaatacatcgataaatatatagcttgttcttaattaattttcatttggtttgagaatggctgattacatatgcacaggttttacattggtacaagttcagctatggattgcattggggtaggcttatgacctacgtacagctgatccatgccagtactggtaggtataccaactatgtcgagcggccggttaattagtcaatgcctacccaatcgcgtggttcagtttgccaataaactgatttgtcaaactcttccaagacttccactggttataacttactccagtaaagtatataaaacaaaagagatggaattttcgcctgtgatgcgacgatatgcgccccctctaatgatctactccttccccatgtagtaaacgcattattggctttgcttctccgtaagcttccattcatgtgaagggggtagtttgttgttgttccttgcctctcagggaagcatgtggattcccttgtctaaaacccgttgctgccaatgctcttaactgtagagcactggtagctaggggtggacaggtggcgtgtacttgcagacaaagcagagcgagtgaatccgagtatcccaccgggccggccggggcaccggccagccaccgtgcgcgcgcgcatgtggaggcacatggggcggggactgggactatacacgggaatccgcaagggggacgggcaaatgcaccggtggatcggatcgacgtgccggcctacctcgcacggtaccctaaccgtacgtgcgggtcgcggtcggcgaggcgaccgatcgctctcaccggcgtattattcatttccccgtgggccgtgccgcaccccccccccccccccccgcgcgacgtgcgccgctctacgcacgacgtaataatgcgcgctcaagctcacgtaggcgcgcgagcattaggctcacgactcacgagtagggtacatatgggtggtacggtgataattcacgactcagaatactatcttcttctctctttttttttttccaatcaaacgcctgctgaccgatcgagtgcggaattgcagataaacgggaatctccattgtcaagtatacgttgtcttcgacaccgacaaagtccggccgtttccggtcaccctcatcacagcctaacccatttgttttttttttttcgctaatccattgttagtggacgaaaacgacagacgagacgttaccgaggtaagttacgcccgtttggggccgggcaaggaggcacctacccacatggcgcgcccctgtacgcacccccaaattagtcctagtggagtacgtgcttgcgcgccgagtctgagcggtgggcggccgtgcagtgtgatcgatcgatcgatccgcgcccctcccctccaccgacacgccctcatctctctcacctccgcggtcagagtcccgtcttatcgcgggcgcgtgggcagcaagcaagcaagcaagcaagccatttgccgccggtacctcgctttcttctttttcacgtcgttcccttcccttttgcgcggcgcacgctgtcgcgcgcctgtttgcatctcgtcggcaccggctgatcactatcagagtcccctgttactggcattaattgatcacacactgatcagacgacgcccgtaacaaaggatggggaaaattaagaatccggtgatctgctctgcagtgatcggaccatgggcagaatgtaaaactttattaggccccagccagatcatggtgtcaaacctgatcattttagtagagtagcagtgcacctgattgcacggaacaagttcacttggcgcaagaaagcgcgtctccggcaccatctacggggttgactgcttttggggagcaaatcacgcctaccatcattatgtgcctactgtaggatttaaaatgcgcacaaagtagtccgcagtacagttctttctttgaagagaaaatccattgtatactctaaaattttagctaattctttctatacttataaattttacttactttcttgtataccttaaatttcgattttgatcactttcatacctctcccgtcagttgaccgttagctgaccgtctaatttatataaaaatgatcattctaccctttggatgaatatagaaatttttgaattacattattaaaaatataaaagcttctcgcatgagactattatagttatgagtttgttgtgcgatgcattatttatcttaaaaaataggtaataaaataaaaaatcatgtatttagtttttttttaaaaaagtcataaaaatgaggagcattcatacaaagataggactacaaattttcacaataatttttatgaatgctcccgataaaaaaaatccattgtcctattaaaatatcaaataaaaattttaattatttcatttgttttatttccaaaatttatgtcaaaatttcctacactagttttttttttagaattacacagtacaacgttgacactcacaatgcacgcgcacgcaaaccctacccctatgagcatcttcgaagactgggtcggcaaattctggagagattgacgaagtcaccacaggcgcctcgctgtcgacgggtacgtcgcctacgactgaaagcacaacgccgttaaatcctgaaaaattcgctcccatggggagtcgaacctaagacctcagtagcaggctacatgccctttcgctcctacactagttatttagtctcattcaaaattttcaatcgtctttgaatcgttttttcaatctgtgcacgcaaacaaaaatttcaatcgttttttaagcttatattcaaacctaaagcatcaagtgcaaaaaaaaaaaagacatttgcaaccaaatgtaatagtgaaatgatgaaaaatataacggtagggacatggaagtgatcaaattgaaattttagggggtataaaagggatcaggtaaatttcagggttacgaaagggattgagtaagttttcagggtacacaggaaatttactcttctttaaaaggcgcagatcactataaaacatcaaatgccaatattcaccctaaatgcaaaatcaccactggaagaaaacacaggaaaaataacagacgactgtttccgaacgccaagctgaagaatcaagcgcctgaaaaatgacagacggtagtaattgccatcgcccaaccggagtgcccaagcgcctgaaggaaaaatacgagccgacgttgcacggccgaaagcccgaaccagaattccatccagcccagaaacaggccgcctcgcaggccgcattcgctgatctggctgggaggacaagtttctcttttttttctctttgctaattggacccatatgccactgcaaatttgttggttcgaaaaaaataccacattcatgatattaggtatataccactgaaactttataaaatttaaactatgccactccgtcaccatttctgttagtacctctaccatctttaacaggaaacgagcaccgggcgataccgctgccaagcacaagatggcgacaacgaggaggtcgttggcgagggccaggtggtctaagggtccggcaacgatgaggcgcagctggtggtggcggtgacgagcacattattgggcgccacgagcaggcatcggtgaggtcgaggacggtgacacggtgagctcggagatagcgcttcccggctgccgcgagcgtcaagatcaagcgcatgtcgtcggggccggtggagaagctgatgccgccgccgagcacgactccctcctgtagctccatcctctgtgtcatctccttctccctcccttcccttttcttttcttggctgcgcgggcgtcaggatccagtgccggtcatcggcgctggcgccgacgtcgagcacgactccttcccgcagctccaccctccacgtcacctcctccttcccagcccgtggcggcggcggcgacacttgcactcccctccaacaccaccggtgacgcgatgtcaggcttgtcggatttggtggctgcggctgccgctcccttccagctccacctctcttcaccgggtgctaagctcgccaccattgttggatttacatcgccgccgcatgcctcctctgcctcgctcgccggagttgggcacaagtatcggcgttggtgtgggcaggaggagaagcccacgaattgccgcccctgcttctcaagcccacaagccgccgtcgacaagtcccctccgcgccactgtctacgagcccgagcgccgctgaagatttgtcgcttactactgtatgcgctggagctggagaagaaacggaggcaccaacggaaatgtaccatcaaatgcatgctcgggcggaaatcttgacgggaatggcacggttcaaattttacaaagtttaagtgacatgcacccaatatcatgaatagtaatggcatttttttcaaaccagcgaatttgcaatgcatggatccaattaacaaaaaaaaatctgtaagctgtttattcaaggaaaaaagatctggagctctcctagtaagcaaagataacccggagctctgatgtgttgcaattgttcgtgcatgccaaatagagcaactagtggcgcatttcttcaatttgattcgtcaccatgcgcgcggctaacttttcaccccgaaaacgattctgacctgcaggcagtatcgatcagccgaccttcaggcaggcatcaactagcatatatagccgggggtccagcttcaaaagcagcagtaggagtagcaatctaagcattccgcccatcactacgccaatcggccgccggtaaccactaggccgcaaaagctctcgctcctcaccttcgtccccgacgtggcttcttccaggtctctcagcaaatgtgtcgctgagctggtgaccacggcggccacactgcctcttgccgatctgatgcagtggcgactgctgcagctaagccgttttttttaaacgaagatgatcaaaaagtatccccggctagcttctgcatatctaagctgacgagccagcaacaggatatccacgaacttttaatttggtgccattcacggtcgacaggtacgtccgtcgtctgctagaaagaaaggggaaaagaaaagagagagaggctggaatctggtgccctgtggccttggaacaatgttcccggccggtccagtccacgctgccgctcgatcgatcaggcgatcacacgacacgccacacgattgctccaccaatcgatcgatctcctttcagtatcatcaatcagttggcacgctgcctggctggtttgctgcgtcgatccatgatccatcggtcatcggagagacaagatataccgcctccagatcaataatactgaataacgttaatttttaaaatcttttattataaataatttctaaaatatttatcttgaaaatatagagaatatatgtatatattagtcttaaaagtactccaatcaaattatatatttgttgataataataaaaaaatggtgatcaaaattactttttgagattgtgttcttgtctaaaatggtgatcaaaatggagtatcaatctggaaggagtactcggtaatgtcacggcttagctctgatattatgagatagatacgtagcagatagataggttagagtgggtatatatgagccgaagagaatccaaacatgaggatggtggcgccttttcggcgagggctggcggtaaatattctgaatcccggctgagagctgatggagagagcaggagaccaccttgattccaatccctgcgatgcaagttggtgcttggaatctgagcttctacttttgcggatttgggatcccggtggatgtggactgcatgtttaggtgcatatgcagtggctgtgtgcgtgctagtcaagacaccgaccaccagtgatgatgcttcaccaggatttagaagttcagagtctacgtacccggcaaaattgcggcacgggacggctaataattcttttttttttaagagagggtacagctaaggatgcataaggccattcacaatgcaagctatgggacccatatccttagccttaaaacttgacccaaagacactcatcccacaatgcaagcatccatagtcaggataccaagcccacagctggtggaccccacgaaaaagaatcgaggcattgaatactactttatcgcctccactttcctgaacacagccctcgcctcctctcctcgagtactactggcgctaccttgcctccttctcctccctcgccgcgacgccgacgggaagccacgcctctaccagcaccgccgccctactttatctcctctctctctctctctctctctctctgtaacgccccgattttcgttcgggattaaaaatcatttaataatgcatttcctagaaattgaataaaaagttaagcaatttaatcaagtgaaataatgggagaattaaaattttcccttaaaaatcattggccgggaatattttgtaatattctttgtgccctaatgtactctccggaattttccgtgaattttcggagctcgagaaatagttttaatagcacaaagatcattgcatcaattaaaataaaaagaaaacaaataaaatttcccctctttatctttgggccgctttcggcccaagatcttctccctctccatcctctcgggcccggccgccctccttttcccctcctcccttctctttgggccgtcggcccggcttgccccctccttcgcgcaagtccgtttcgcctccctcatcctccctcctctccccgagccgccgacaggtgggccccacctgtcggggtcacccccaacctccagcccgggccagcaaccgccatggccgcccgagccgtccaacgtcgccgccgtttccgcccacctcctccaccccgcgcgcgcgcgtttgtccgtgggacctcgccgcccacttccgcgccgtccccccccactctccccgcaaaatccggccacgtcgccgcctcccgcgtctctctctcccccacgacgccgccccacttcccctcgaaatccgccgctccccggccctctcctcgcccacttgagctataaaatcaatccccgtggactcctcttcctttttccccgttttcccgagtccccccgccctctaccgagctctccacgccgatccccttcgccgccgctcgccggcgatctccagccgcccgccaccgccgctcccgtcgctgccgcgctgcgccgccgccacctatagcatcacagcgcctcgccgcaccccggcatccactccatctccctcctccaccgccggaaccaccttcccatcgcgaggccgagccactaccgccacacaccgccttcagccggccgctgccgccgcgttagtcgtcgccgcacctcgccgcttgcgccgtcggcaacgccgtgccaagatctaccccggcctccgctccgtttccccattccaccaccgcaaccaccctttcaccgtgcatcccgagccaccttcaccatacgccgcctacagccgtgtgccaccgtcgccttagccgccgccgcgtcgctccgtcttcacctctcgcctcgcagcgccgtgccgcacctcggtcaccgttgttcatcgccggaaacccaccggaacgtggtatctctcggtcgccggtgagccccaccattcctctcctctccggcgtggtattctcgccgctccggtcgcctatttccctccctaaccactccaataatttccccaagtcttgccggccctcggccgcggctccgccatggtcgggcgtcgtcggaacgccgttcccgtcgcctcccgtgccggccgccgccatcctttccgccgccggtcgcctccccatggtcgtcccgtcgccggcgctcctcggtgaggaccccctccgtctcctctcccttttccctcttttcgccgcctcccgcgcgtgccgtcgcgccggtggtcgtcgccggcgaccatcgggccgtgcgccgtcgctcccggccggccgaccggtgagccggctccagctcgcccgtggccgcccgatcctccttcggggcgatctgggccgtccacgtggccttcccgtgccgcccgcgtcggtgcctctgtggcgccacgtcggcgccacctccgctagccgtccgtcgtggccgccacgtgtctgccacgtggtgcgcccgcggaccagcgcgtgcgtggactcggtccacggtgcgcccgccacccgtgagtcaccgacaggtggggcccgcttgccggcgccacctctcccccgtcggatgacgtcataattgatttaataattgcgcaataaatcgagtttaattatagaaatccattaaaatggctcaaaacttctaaaatccatatctaattcattcgaactccgaattgagccattcaacttgcaaaattcatctaaaattgagctctacatgtttgtttagtttttatgtactgtttccttggtttttattagagtttttcctcgttttgcgtgccagcgtgtagaatccgtcgtttcggaagtccgcggtcgcgaggaaaagagttcggaagatcaaagtgaagaagcaaggcaagtcacacattccccttgagcatgttgatcctaatttacaaatgttttactgtttgcaaataaatatgcatattttgctaattacatggggtcagggtattacctatctgctcgcttgtgtcatgtttacttgatatctgttctttgtcaaccttgggtaatgaatcgactagctcatgttacttatgtgacctagctagaactatatgcttagccatgcttaattaccactagctcagttgatgggataattgcagtattagacctttttagtatcagagtgagctgcgtgctcgagacacctggccatgcttcatggtcgtaattatccaactaaaatgcgactgaatggtgggctgtgggtgcatggttttgctggtcgcacccatggcagttaaggaccggttcgcgggatgccctggaagaacttatcgtacttaccacaagccagcgtgggcaacggctgggcttgtagtgtagcttttctctagccgacgtacccaggcgagggtgggcgtgatggagttgggtcggccggggtgtccggttgatcggcttctggattcaccgcggcacgaaaggggggctgcccgttgcctgctggagacgggggcgaaccctaaggtgtggtgcgatcggttagagagggttatgcgaagggtcctgtcacggcctctttccggtatgtcgtggtggcatgtcggcgcacgggaacgtgtcgtggggctgtgtcttgtgggtacagttgtacacctctgatcagagtaaaactattcgaatagccgtgcccgcggttatgggcggtcgaccagattcaccgtgattagtctcacacttaataaatcgacctaatacactgtagtccaggtgggttggttgggcctgttcaacgtggtgtagcgttgatcagtggagatttaatgttactttaattactcaacagttttactgttttgctcaataaaatgttttacaaccgcctttatgcaaatagccccaaaccatccttgtatccccttgcacgtctgcatcgttggtgtggcttgctgagtacggtggttgtactcagccttgctattattcccccttttcaaaagtgtagtgcttctgagctgaagacgaagttagaggaccaaggctcagaccccagttgagttttgcctgt

SEQ ID NO: 9918 - DNA, 6102 bp, Oryza sativa
accattagagtgttttggagggaggagttgccaaaggtgtcacaacttgcaagaggagaagtaacgggagcacctttgttccctatgcgctgggctaaatgcctacagtatgcaaaaagaaaagagaatggggtaccacacatttgtttttcatttatggaattatgtgcggataccattttagcaaagatattcttctaagaaaattcactatttagaatacgacatcaagcaacattaatcgcaaggattgttgcctgttcattttgcctttttttttatttgataacatgggttgtcgatccttgctagatgtacttcgcaatttttattttttttcttatgaacaatgtagtatgaagtatgtcttttataaatttattatttttgcgtgtcatgcattatcttcccatggttcaactccgtcaaggtccctaaatatgtcctccaaatagtttttaaggcctaaggtgaaaaccaaaggtccaacaggacctcgagcccctagaataggaaggctcccaaatcctaccccataatcttggggctctagattccatcccctttcaccctagttcgtgtctctatgtaagatgttgctaggaagattggatctggagctttgttagttccactcatcttttactgctagggataagcgagaaggaccgttgcaaattctgattgcgctgataaaaatgtttcgaagttcagtagaagttatttgcactcctagaaaaacattttcctatttgtgttggtcaagaagatcataagcatatcacagaagaatgatattatctttgctggctttgattagctttgaattataataatatgataatatctctaaatgattgtctgaacaatctgcaggttttggatattcaacctattttgtttgggattaaataaactgttaattcaggatttattggttgagtgccacagcgtctagaatgcctacttcttattcgtccttaattcttattcttatcataatgcttaactacttcaattgctagtggaggtgattcctatgtagtgcatatgatgtctgaggatatgtcttttgcttgcttgaaaattttgaatttgaaaattttactttatatatggttgaaatctatgcattagaaatatttatatttgaattatcgtggtgtaaactatacgttaacatagagtatgtgctaaaatagaagagaaaataaaatatgagctaaataaataggcactattgctggagtaggtggtgtattttgggtcctcaagaaatagaagcaatccccttttaatccttgagaggtcaaatatggggcatgttgctggagatgctataagaaaacagaccaagatcaaaatttaggttgctagttatgctagtacgttgcataatctaatcaatggctcttgggtacacaaagcagttgaaacaacacaatcaagtaccaatgtaatatcaagaagaggctaaatgtagaaatacattatatacttaaacttcttcttcaaaataggttctactctctccatttcatattattagacaatttgactatttcctaagcaaacttttataagtttgattaagtttataaaaaaacatagtaatgctttcgacagcaaacaaatatactgtcaaaatttgttcaatattttatttaatgaagctaatttgtttttgtaagtgttattatatttttctataaatttggtcaaatttataaaaagtttaacttaagtgtcacgaagggaataaaatacaactaatccaacgacaacgagataagccaggtaaggctctatgcaacaatgagccgtggaatcatcttatcgtcctctctatcagggtttaattaatcgcacaagaacaggttactgtttcctgcaattaaagcaatatcctggcctgtcttctgatcccatcggtatttgttttccataagccatgcagttgaatttgctaaagccttgctacatgtatttgcatctctaagcaaccaatgtgctacgtgaatcattccgctttcacatacaattcagtcatttgcttgtttcatacgggaaagtagcatgaagagaatacaacatgattactgaccttctctttagataataatacacaggagatttgctttccaaatgtcctaagtgtatcccctgagcatgaagcttaaaacagcaatctaggtaacttaactactaggagagacccattcaacagcaaagtgaacaacaaacagtgacggagcgtggggctcctcaccgggagaccgcgctggcccccctttgccggttcggccggggaccctgggtgagactctaagctcccaatctgtggaaggttcgcgagacaggaagcatacaagacgccggcgatgtatacaggttcgggccgctgagaagcgtaataccctactcctgtgttttggtggattcgtgtatgaaggaactacaaagtatgagccagcctctccctcgttctgggttcccaatctggaaaagtcccgtcccctctcaaagtgggcaaggtcctccttttatatctcaaggggataccacatgccccatctctccctccaatttgacttttctttattaatggacggagatttgcatcgccactgtccgaatgatcttctgacgggacggcccatacctacctccacttccgccggaggcaggcgcgacgtaggaagatggctgtctgctgatgacatgaccattgtcagaccggtcacaaatcggtcattcttgtccaccacgtgtgtcacaccctgaaaattcaaaatatataaattgttgtttaaatggaatttttagaaataattttaaaagtcttgaaaagaaaatctaagtttaattaataaattccaatataaaattgggccagataaaatttcattaaatactttgcttaattctataattcctagatttttctgggatttatttgagctaaggaagtatttttaataaatggaattgcatttaagaaataatttaaattgaaaaagttttaaaaagtcttcttttggctttgggccgaaagtcggcccaaaaccgccttctctctcttctcggcccagtccggcccagtccgcagccgcccgcgcgcgcgcgcgccctcgcagccgctgacaggtgggtcccacctgtcaggccgtcgtctttctcgggccgaaaccctagtttcgcgccgccgagctgccgtcgccgccgctttccaatccggccgctcctttccgtttccggctgaattgatagaggggaaatgatctccgggatctcctctaccttttctcctttggaaacttcggctaaatcggtttggaaatcgatggattcgagttcgaatcggatcggctttcctctctccaagccgcgagtttccttcgccgttgccgtcgccgtgggccttcgccgccgcccccgagcccctttaaaaggatccccgtgctcttctcttctcgccgccaccctcgccttcgcctctcgtcgccggagtagccctagcgccgtgtgccctagctttgccttcgccgccgccgctccagccgtgcgccgccgtcgttccagccgtcgccgtcgctcgggaaggtcgccgtcgtcgtcgccaagtcgtcgccgtcctcgtccgctctttcgctgccgtcggagaccgccggagcatcgtcgccgtcgtcaagccgaagaccgccgccgtttcaacctcgtcgccgtcgccgtccgttggtcgtccgccgtcgctttggtcgtcggtgagttcgccgtgccgtccgctacccgttggtgtcctccgttcgtgccgtagcgccgccgttcgccggtgagcgtgcgccgctcgagtcgtctgcctcgtcgagccgccgccgccgtcggtgacgtcattgctggcgtcatcaaggccgtccgccgtgaaccgccgtggacccgatcaatctcggccgtccgatttggatcggatcaatctcggccgtccgttcgcgtgaaccgccgcccgtgcgcccggtccacccaaaccctagccgctgacgcaataaatccccttttccttttcaaaaataattcattattgcgtcataattcaattttaaaccgatttaagtgttttaatccgatttaatctttaaaaattcataactaattcatcttagctccgatttagttggttcaagtctctaaatttttctaaaattgagatctacacattaaaaatatccacatgtactgttcatgcttgtttatgtgctgttttggtgattttgctcttttctgcttagattccgtcgtttccggagagtccgttttcgcggaagaagagtttgaagagttccaaggccagcaaggcaagtcacacagatcccaaacaaccctttgagcatgttgatcctatttaaagctattgtttctattcaactattgcatctattttcgaatgtcattgggtggaattgacctattctttgttatggccctttcgtacttgattaccttattccttgataccttgggttatattaatttgactagttgagctttatttatattggttcaactagatattagatataattgcttagccctgcttagaaacattagtacacttatgggataactaatgactcactattatttcatgatggcttattgatagttcacgatggtcaattgtgattagttaattaattaatgtgccaactaaaacctggtaatggtgggttgtgagcacatggttttgatggtcgtgctcatgacaattaaggaccggttcacgagtttcggttgtgaaacatttatcgtgccaaccacaagccagcatgggcaacggctttatcttttgtatagcatggttcattgcggggcaccagactgagaagtggcggagataagcccacgggggtcgctggggagtccatgccttgtttataagggggtgattatgatccaggaaggtgcgctgcagtggattgtgttatgcgaggggtattgtcacaactcctttccgagataccgtggtggtattgaggcacatggtgacatgatgtggggttgtgtcttgtgggtacagtggtacacctctggccagagtaaaactattcgaatagccgtgcccgcggttatgggcgggtctaacaatgtctttcgtgattagtctcacacctctcatcattataaaagatgctataactggtaataatttgattagctcctggtttggaatggtacattcctggtttggagatagaactgtgcagccggggtggttgttcagaatggttgggcctatacaacagggtatgttgtatagcgttggattaatattgcttaattattacttaactgttttatcaaattctcaaatgtttgctaaatgctgcttttgcaaatggaaccctattatgccatcctttgttatcctgtgcacttgcatatttgctgcgtggcttgctgagtatgtcatatactcaccttgcaatcattcatcagaggaagagttctacattgaggctgatggtgtggaggattaggtgtagccttggtcaagctgcctgtggagtggagccgtctgcgccgtttatttaatttccgctgctagaactttattgattgagaggaactatctacctctgtaatgacattttattcgcttattaattagagtaatatttgtactctattatcaatttgttattgtgtgcctcggctgattcctggacgagggttcacacacatgtaagcgtttggaattttggatagaaattccgggcgtgacaacgtgtcagtttaacaatctgcatgttcgcccttcttcacacaacatcttgcctgtaatggttaggatgaatcctggcatatatctgaccaggactaacgtgccatctctgggaggtaacacgctagctccagctggggacgagcgcctagaagccctcgtcctgacgggatggggcgaggcgtgcgtcagatcgcctgtcgccacctaacccacgacctgaccggtctgtgactggtcacagaccggataaatgagtgcactgcactgcgttacatgcggcgtgacacgctcagccaaaccgcaataaatgtggttaggtg

SEQ ID NO: 9919 - DNA, 13666 bp, Oryza sativa
gggcacgggcgcggtcacgcctgccacccgcttttccaccacgcccgccgcgcccccgccacgcccgccgcctgcccctcccccaccacgccccgccgcaccccgccacgcccgccacccgccgcgcgcccatcaccggccaccaatgacatctgagacagtgacagtgagagattgagagaagaggggaagagagatgtgtgggagtatgacaggtggaccccacctttttaaaaaaaaattgctgactggattgccacgtggacgtcacgtaggacgataccactttggattgggttgaggggggttactcgtccggtatagatagttcagggtataaaatgtctggtttcgtggttaaggggggtaatttatactgtcgtcatagttcgggggggtaattcgtactttttcctattatgaaatatttttaaaaagtagttgtgacctatattttggaatggagggagtaataccttttgttacaaaatatatatgaacaagaatacgtagtgatatttgtattttagaacagatgaagtgcatccaacaatctccgatcaacgaaataaggcaccagcaaaacagattttggtactaactggagttcaggggaagaagattatcaccgagacaacgttatgttgtaggcaataatattaaaccgcttgattcaatctgatggagctgggtgttaggaaacgatacgcaaataaacaataaaaaataatatataaattacggaagatacgagatttaacgtggaaaaccctcctaaaatagaagagaaaaaaccacgggtgccagccagtaaaatatcttcaatattggggtgaggttacaacaccgaacggcggcttacaataagtatatttgaaggtgtaacctaaaaggataacgatccgtacctagtgtccgtgcactaccataaatcttttaagtagaaactttcaaatgtaactataataattatcatatggttttattataactctactatagcttatagctacaatataagttgtatataagtatagaaaatatatgcaactttctatacctaaattataattatatagatgttataacgtagttataattattgttactcactgtaactattataattgtaatgtaacttatatataaatagagtagcacgaatcctggccaacattgtatggccgaaaattcagacgccaggaaagaaaaaaaactgccacaagttttctagcaattctgatctaaaatgctactagtcatgcatgtaggatgcatgagcccctttagactaggtttggtgcattccgcacagagccatcagtgctactgatagaaatgtggccgtcaccgtgcgtgccaatcgccttgctgtgcttgttcttgccatccttgcagcagtacttccagttgaagttgagaaccaagcatgccactaacaacaggccaacggccaccatgacgatcactagtatgacctcctccttgtggttcatgtcctctacacccttcaactccagattcagcagctgcatatatatatatatgagatgttgttaaaaaaaaagatcggtaaaacatagttttgtcacgtgaactgaaacaccaggtttttggatgcgaaaaaaaaaacacacataaagaagagtccgtcgtatacatacctagagagatgagcagagaggagcggaggatcttggagcgctgtgagaggaatcgcatgtccaatctctgctcatatataagggcgtcaagaacgttttccaaatgtgagaggtttccttataggagagcccgcgagtgcgatacaaggaagaacacatcgcgatctcgcatttgctgccatctatcagtgccatgcgatacgatcccctcataaaacctgtggatcttcttccaggtgaagcgtggagagcgaacttcaaatgtggaagcgttgattcggcgaatctatgcttacaacaaatacagaagtttttcccccggaacgacaactgtgtagcgggtaacgcttggtactagcgcgccatgggccgtgtggctcaggggctgacggactcatgcggcctgcgctgttgcgtatgcaacaaatccaatttgggttcctcaatcgatatgtgtccaaccttaccgtatccctcaactgcaatactaatatctttgaccacttaactatgaaagctagtcctaccaagcgaatcagcatgcggagctcacatgtcagtgaccccatctctaggggtggatatcgagctggctcggctcggcttggctcgttaggataacgagccgagcttagaaacctagctcggctcggctcgtcaacaggctcgagccagctcgttaagctcgcgagctaggggcaagagacgtagtcggcgagcacaaggaggaggggaggagcttgacggaggaggaaacgagctcaattgagctcgccggcgaccacatggacatggaggagctcgatggtggaggggatgaactcgacgcagctccgccgacacttggaggagacgagctcgagcccgccggtagcgtcgggcgctgggggcggacgccggcggcagcggcgctggatcgctgggggagaggcggagatcagcggtgatgggcgctcgatctcccggcggcggcgggcataggggataggcggagaccgacggcggcgggcgctcgatctcccgttggcggcgggcgctggcgagggagaggaggagaccggcaacggcgggcgctggtgggggagaggcggagaccggcggcggcaggtgctcaatctcccagcggcggcgacggcaggggagaggcggagcggcgtgtaacataccaaaaattaaccattttctaattctgcattatgctgagtcttatgttcttaataacttcctaaacctaggaaaatataattagagggactttctaaaactaacttgcataaaatctctttctggtatttaacttcttttgtgtttttcatttaaaaattaaaatacatgtggttgaattgatgtatttcctgatttggtttaaaaccttcttttgactaaaattcctttattcaaaattagtttgaaaaccctttctatttttttatggattatggtccaagaaaccttcccaattttacccttgaacctaaaccaaagtaattccaattttattggaattaattgttagcccattctttgatcttaaaccgatcctttgattcttgatccaaattcttccttttgatctagccactgatttaattcccgtggcttgatttccttctcagcacaagaataatattattacaaatattgtaaataattgctcttatactaagataataagattatatccttgtcatccaaatatcctattagcctcagacaattctttgaaacccatgccatatattttgagtctaaaaatcctatttatcttcctccatttatttcctctcctcatttcatttgagtgcatcaaataaattccgttatattcaatctctcaaaatattgcactcaaactagaaaatatctctttcggaaattatatccaaatataatttcctttcaaaattccttattcaaattatctccaaatatattttgctttcaaaatcttctattcaaattccttccaaatacaaattctcctctaaatcaaattattcagcccctaggaaaaattagactttcttccttctacgtttgggccgaattctccttttcctccttttccttttctcagtccaagccggcccaacacccagccgagccgccaattcgcgccgccgctcacgcccgtgccgtgttcgtcctcctccgccgctgccgtgccttgccctcctcctccgccgttttctccttctctaagctaccgccgccgccatattgccttcgacgccaaggatcccctgcccaacatcagccgcacatcatctcgctaacgtcatcctttgtgccgaaccgacactatcgtccaatgggaagaaagagtcggcgccgtcgtcctcttctccacgccgccgtcgccatgtccttcttctcctcctcttcttcgaaccgacctctcgccgcctataaatagacggcgaggtcccctctttttcacacatcatcatagcttgaagctcttcctctctctcctcccatggccgatcgtcgacgccgtcggtcgatctccccatccgtagctcctcttcccctctcctcgcaccaccggcttcgcctccatccggcgagtccatttttcccctttcccctctccctccacctctaagtcaagtcaccaccaccatcatccatgccgactcatggtgagcccttgccgccgctgttccggccatctccctcactccctccacctgccactaccctcaccgggtgcgcgtcgtccgggaacacgtgtgtccgccggcgtcgcaacctctcgaccaccggagcaccggcgcccaacctctctctcctctgtgttctcggcagaaagaagaaggaaagaagaagacgggagaaggagagagaaagagaaaagaaaaagaaaaggagaacggagtgacaggtgggcccttctacagtacaatttcgtattttctagatttaattcaaatctaatctttagaagcccatatctcctacaccatagatccgattccagtcaaacttggacctaaattcatctaaattcaaaagctacattttgatatcaaatttgctattttactattttatttgaaattccttcatgccatttgaatttatatttgactttcgaatatttcctttttactccaaaatagcctttagccactaaaaagccgccggttgaaactttacgccttccatggggacgttcgcgcggtctactggccccgacgtcgaaccgttggttgtaaagcccggcagaacccaaacccaaggtcaaagtgctgctcctggcaccctacgcctcgacgcgtataacagtcggagcttcactattccctcgaccttcacagcacgccgcatagttagctctcgagctctgtgtgatcctagccgctccaccgccacccacggttgttggagtaacactccacccccaccaaacctataccaacctcctattcctctagccgatatgttgtcggtcgacaccggctagagaaaggtatcaaatctactcgttatgctctagcatcgactagcatacaaccaaccaaaccctagccgatatgttgccctacttcacaatcggcttaaataccaccaaaccctaggtatcatactgcccaaacctaccaccagccaatactagccacatactcacttaaccagttatatcctttattctccaagcaaccaaaacccacacatgaaatataagcgccagtagttgcttaatcccttctagcctccaactctctagaatatccgcataaaatatcagcaccgtaatccatataccctataaaataaaatagatagactatatcctaaaccctagccctcctaactgtttatctctttcttgctattatatggattttattgaaattggttcttcatctttcttagtagagtctattttattttggatggcaacctgtgatatttcgaggattggataataaggttgcttatctcggatttatttgcgttggagcaaggcaagttattattcctccccttgagcataattaccctatattctatatctcttttctatgcattagtcattcatgattttgaatgcataacctgaacatatagcaaaccagatatgctagcttttgcttagccctgcctagttaggctgcataaaaatataatgaacctagattgggacagtacgtaagatttggttgatttctgggtggctagtactgtcccggtcgatataattgccaccaaatacttatgtcaaacgaacgagtatgaccacagcttcttgaatggggacagacctagatattatgttaattagcaatgtggtacctctgtacagtggttccttttgtaagtcctcgcgcaagaggcaatcttatgccgagcagggcatcttatgatatttaccgaggcgcaggtaaatatattgattttcgctcatgagctgtgtgtgtgattttatgtaaacctggttgagatgacgggggtctctcaacccgttctctctaaaaaccccgggaacgccagaactcctctcgctgctgataacgttacgttcagagcgcatagggactagagttcatggaacaggtgccacaattgttaataacctaatagtgggccatgactaagctaatgaatattggcaagtcatggactgccggtaaagcgtacatttactgcagtaaagtgaaaatgaatctattcgaatagccgtgctcacggatttgagtatcgggactcatatggtatttggttagaaacctaattcaagattttattaaatactgatgcatttcaaacatcataggctttcttcttctacattatctgctttctgcaagtaaatctagtcctactcaaatactgctatttcatacattcatattgaatataatagcttgctgagtacattgtactcacccttgcttcaaccccatctttttcagagtccatttggagttcttatcgaggccgggagttcaatcacataagttagttcccttttaacttaatcttcaagtctaggttatttagatggtttaagtctatagtaaaacagcagagttaggtcattctaaagcttctgctgtaatagttagccacaatctcgtaaataccctattactttatgtaataatatctccttcaaagctatgtctaaacgtatgcaaagacgatccagattgttgaagctgtatcaacttattgatccagggcttgatacagtctaaacatgtcggttaccgaatcattagttttgggacccgacacggcgacggcggggggaaaggcgcggcggcgacggcggctaggggagagtggggaattgagtgaggactaaggtttgcaatgtcttgggcttgggccattttgttgtattgggcttttgggctgtgatggagtctagctcattaaggctcgcgagccagctcgagctggctcgttatctctaacgagctaaactgccagctcggctcgttagaaaattcaaacgagccgagccgagcctgtcacgagccgagcgagctaacgagccacgagctttctgtccacccctacccatctctctactctatcctctaagtgccggggaggaatagggttgttgcttggtcatcgcctcccgcactagtcattgttgctcgctgctcgccaccgctgcccacttcctaatggacccaaagctcgctgccagcggcttcttcgaccgctaccatggcgggggtagaggggagaggaggaagcatcaatgacaaaagattgctgaccatgccgcctggatccacttgccagccttaaagctcgtcgcctgcatcctcctcggctaccgctgtggaccaagaagagggaagaggaggcaatgttgaaccattagagacataagctcgctggccacgctgcttagatccgctcgtagactccttggcagccaccatggctcaggaagagagaaggcgaccactaagcagtagccatagaagcttggtggcatgccacctagatccgcttgcggccccgaagctcgcgcctgtggccttctcggccactgccatggggtgcgaggcggggagatgaggtgatgatgaagcattaatgatagaagctcgccggccacaccacctagatcttctcgccggcctcgaagctcatcgcctacagtcttcttgggcaccaccatggagcgagaagcacccgttctcaacttctcattgatgaagatgcatagggagagagagaagaaagagaagaaagagagagtgagaaataagaggagagtcattgacaagtgtcataactaggtcaatgagccacatcagcgaaaactatcctcaaaacatcatctatatagttattttgtaccagttttaaacttttaatagttagaaaaatcagtgatatttgtgatggggagatatgaatttaatttgggaaactataatttgatgagaaagtcaatgcgttacttatttcgttgcgtatttcgcggaagggatacgggccagaggccacatcacagcaccgtggggcgggtgcgctatcagcgagtgggcgtggccgacgtgatccagcccagtattcgagccgcacacggagcgcgagagaaaacaagacggacgaggccgcctgcctgccgcccgcgccgagcgccacgcgaggggcagatctggccgcccgatcgaccgctatccggccgcggaacagtggagcttgtgacggtgatccccgcggcgcattccgtggctatatatccacttgcgcaatgtcagtgcgggcgtacggtacgtcggcggtatctcgtccgcggcagctgcaatattctcggaacgaccaaggccaacggcgcttttttactgccaaacgggctgcagtcttctttcccgtcgagaatcctcaaggctcaagccagtgtccgtgtcttggtgtacgtacgagccctacacatctactcgattcgatattgcgatgctgcatttattgattactacttactccctccgtcccataaaaaaccaacatagtaccaatgtgacatattctaatattacgaatctagacatacgtctgttcagatttatagtactataatgtatcacacattcgatatttcgtttcttatgaaacggatggagtattactaactgttgcagcttcgctctcactggtggagaaggggtttttactcccggttcgtaacccccatgtactacgaatccgggactaaaaatgtttttagtcccagtttttaatataaccgggactattgtgaaatctggtcgaccgaccaaagatggtttctccaccggtgtctcaaagagaaaaacgaaaaattgcatcttcattcagggggagtagctcgctgtgatgtctctttcaggccaaaattattcaagtaggcaacagagattaaacaacggatccatcatccatcccctgccgccattacgcagtttggttcagctggtacactcttaaaaatctaaacggacaacaccctccaggtggagttggtgcacgtacgtacgtgcctgttgtctcctgttgtgacttgtgtctcctcatcatttagttctaacatcgtacatcatcatggcaactgatacggattagtcacagtttattctttcgagccagctgggttagctggtcgctacttaaggtctgaaggaggaggggacgcctagtttattcacctgcctttggtcctttccattttgataaggtatatcccacttgtaatctaatctagtcctgatgctattattgaaaactcatccttaatttgattccctttgtccagtcatttttcttttcttttttgtcgtccacgtatgcctatcgtgtaatgctgtgtatatatgtcgtcgaacaataatctcgacgctgattgctgatctaactgaccaatgaactaataaataataacttgtgagagagagcaatgaattaactaattcttgcaatagatattcttatctggtttttgaaaccacgcaagcaaaaataatttatttgcatcctgttttacaattgaacacaatgcgctacacggaactgcaaaaagtatgctgttgaaaaattatttagtgcatactattgcctctaatcgggggcggatccaggaaaaaaaattaaggggttcagttatacggtatcttcaatctccagctatttaaggactttagtttatcatttatggtgaaaaaatcgaaggaggtgctccagaggtatccatgggtcttgagggtgtaggggggacttgagtccccctgcacccacgttggatccgcccctgcctctaataaaatatctggcaaacatgcacacaaatcgcaactctttgttttttcaagtgaaagagacaaatgggcatatcaatatatttcttataattgttttattcagtattttagtggaagaataatatacctatatgtcagcttgccgtctgcttaatttacaaatatatattttttaaaaaagtggctattcccggaatataagggataagatggtttcctgaaaggccatatgacttctgcaaacattaaaaaaaattatgaacaggataggtatattaatcagttgctgcgaaatggcaaagctgactttgtaaattttgttcaggaaagtgttcggtgacaaattatttaagagaactgactaaagtttgtagtttatggggtgatttgaactatcgcaatagttaaatgggtaattcaaactttttactcataaagtagaagcatgatcaaactctcaactctagataactgacataaatatataccggggtccattctaacttcagtcttcaaggacgtgatactaaactgtaaaactagactttggttggtaattgatccttcattgccagtttggcacagctcaaatcaaagaaattacaagttacaaatgcaactgacagaaatactgcagtagagactgtagagtcgtagtgatgcagaatataacaagatagaggctgtgattagatcagaggtgtaaagttttagcgtatcatatcggatatgccggtacataatgaaagcattaaactagactaataaaaaaactaattacagaatctatcagtaaaccacaagacaaatttattaaacctaattaatctgtcattagcaaaccacattgttaaatttttttagcatatatttaatattttatgcatatatccaaacattcaatgtgacctgatgtaaagttttgtcagggatctaaatagggccaaagtaacaacgcagtaatgcacggcatatgcacatcgatcacacagtgttcacatttcacaagcacccccatatagctagccaaggtcacatggcgatgcaggagaaccgcgagcagatgagtagcgcggttcacatcacctgcactgtagttcacagtgcggctatagcggccagcccagcggcgtttgaccgaagcttaaacatgcatgacactgtgcgcatgaacatgcatgaattgcagtctctgcagatgtcgcatcgacctggcactacgtaaaccacacctggatctggatctggcacatgaattgcctcctctagctaatttcactgcaaaaaagaaaaaccgcaaactaaacaccctatcatgtactgttccagctagtagaacacagtagtatagtactactatactacagccccatcgtttggcctaaacagccaaagaataagccaaaatttgaatttttgaacttgattttgaagttgattttgaaatgcttttaacgtaatttttgttaatgttggcttttaagtcgctacgaacaaatctacaaaagttttacttataaattaattttaattttctaataagccaaataagccattttggataaaatggcaaccgatgggagccctagtagatcaactgctttggtgggcttttaattaagcagattccatttgaaagtttaatttactggagctgtgagtgtgcgaggtcggtcaggttagttgggaaggttgacacggagaaaaccggtcagtcttgtcatcgcggacagcacggacacgtacgcgcacgcctacacgtgtgcaggcgcggccacatgcagatgccgcgccggaagtagagaacacgcatgcgacaagactacaagagactgctaggatatgagaattagggggtgtttgggtgctaaaaaataagtctcgggacttattttttggtttgagggactaaaatcacctaaacacccccttaacaacctgcatacagtagtgtttgtgttggaagcctgggagggccaagctagccaacgtgccgcgatctttggtgatctttgataagatgtgcagttgtgcactgcacagactcgaagggaagagagagagagagagagagaaaagtagtacagtactgtatacgctgcctgtccattctgactgacaattttgtttgtaccgacgagcctcggctacgcgactactcctacacgcgatagttcacgacgagaaaagttaggaaccctccgaactatcgcggtcatctgaattaccccctaaaccacaaaaccggacattcttcacccctaactatacaaaccggacgaattacccccctcgacccaatccacggtggttttggtctacgtagcgtacacgtggcagtccagtcagcattctatattttaaaaaaatgtggggcccacctgtcatacacactctctctcactcacgtcagcggcaggcgggggcaacggctgagggcggcggtgatgtgaccatgactaccacggatgcaaccattgctcacattatggatgaataagaagatatcgagatcacgtcgtccaagtgctagaatccgattcggccacctgctacactactgacttcaaacggttaccgaatctgcatacgacctccgttttcggcccgtgagtatttgatggaaagctcttggagccctttttctgacggatccagcctcatctccgaattccatctcgtgtggccggaatcacaggcacaaggtgttgcatcacctataatgggcctatgggcttgtaacttcatttgggactccggcccaggtggggcccatgtggggtgcgccccaaccaggtggagcacgcccctaggcacccctaggtcgtcctcccacccctatatatagctaggtactccttcagggtttattgggttttgttagattaaagtttagccattgctacttgcttgcagctcgcgtgtcagctagaccgcccgtctgcttgttcttcggaaccccaacttatcgtgtgtattcattcctatttgcaatatcagattgcttttatcttgttcttgcttgtttcttcgatttgcttgcaggaataaggttgatctgcaccggcaagatcaacaacccacggagaggtgtatcgatcgcaaaggcgcaacacaatgtcttgtacggttgtagtcggatcgtcaacgtttctcccaaatcgtagttatctcaactcaccgaaagatcgggccaaacaactgccttgagtgtcgaatggaactcagggttcatcaggtggcctcggcgcggaggcggcgggggcggcggctgagggcggcggaggcgccgtcggcagtggtgctgccgccgcgtcgccgctcggcctagatggtcactggcgacgcatgcacggcggtgctatgcggtggcggaagaaggcggcgacacgaaaggggagaggaggcgcgagcggcaagggcagcgactcgggatggttgctcgggacacgggaagggcgacagcgacgagaatcgagggggagaagggccgacggcggagcgtgactactcagcggcggtgggaggggaggcacggcgcgggagctagtggggaggccggcggccaaggcggcgggttggggtggttcaagggaactccaggagggtggtggcgcgaggaatcgacgaggaagaccacggcggtgcacaatcgagcgcggcggcggtgaaacagagcaaaaggggaaacgacggcgcacaatcgagcgcggcgacgtcggacag

SEQ ID NO: 9920 - DNA, 18426 bp, Oryza sativa
  unsure (1)..(18426): unsure at all n locations
cctccactcctaccactgttgagctaaaactttttagcccatgtcacatcaaatatttgacactaatttagagtattaaacatagactaataaaaaaattaatttcataaatgagagctaatcaacgataagatttttttaagcctaattaatccataattatcaaaagtttactgtagcatcacattgccaaaatcatgacgtaattagactcaaaagattcgtctcgtgaattagtccaagcttatggaataagttttgtaattagtgtatatttaatactcgaaattagtgtcaaatatccgatgtgacagggacttagaatatgtccctggaaaccaaacagccccctagtctcctcttctcctggcatccctttcccttttgattcttttgatttggtttccctcccttctcttttgttttatttttttcctcccttcttcttcgattcgtcgaccccggccctgcttctttcgctacggctcctttgccctttttcttcgtcttcgactccctttgcgtttggaagctcgcagcgcttcgatcggcttggcctactgctaatcatgtgcccaaacgtgctgcttgtggagatagcggtagcccagttgtaggctgcttttggaccgaggaatgagctcgctttttagggccgatctgatgagagtgagtacgtaacgtagcagcagtagtagcatcgtgctgtaacatctcgtggtgtgatccatccatatccatcgatcggtggatcggtccggatatactgcagtcaaagctggtgtggtctaagggtgcagcgacggcagcgtacgtacgttgcgtggtcgttgatcgatcgatcgatccgaatcacacagagtcacagctagctatagctcgatcgatcagacgatcacatggtacgtgtagtaaataaatggcattcgatccatcgcgtcgtcgcgagagagataaaaggggcacgatgcagtggatgcatgcagtgcagatgcagatgcagcgccaggctttcgggattcatcagagagctgcccaccgaacaacggacgcttgcgcatgcatgcaatgcatgccacgccatgcatcatatcctcgtcgtcgtggctgctttgccagcttgtttgcccccggtggtggtggtggccggcctggggatcccacaaagcccagcagagagggtaggaggattcagggacagatcgaactgtgcccctcgtgatcggcgaaacccaatggagactggacgagtacccagcagatgagccgcacaagctatagtttggcgctatgcaccagccagcccggcctccacgtccccatatgctgcgtcggagactgttcccggtttcacgtggcctctcttttgacccgtctttgaccacgccccagcaagccagccagccagccaagccgatcgatcgaccaacaggaaggcaaggcagacatgagacatcctcctcgcccccgcgcgcgcgtcgacgcgcatctgcctatctatcccctgcggcggacgggcgctgcatcgcgtctcgcgcccggccggaatccgaaatctagccgcgcgggccagggcggccacaggccacgtaaaaagccgccaccccaccgtacttcacgtcgtcgctataaaaaccccacacccgtaccccttcacccatcatccaccaccaaccgatccatccatccatccatctgccgcaaatctcctcgtcgtttcgccgaccagctctcgctgccgcccgcgtttgatcgagcaagtcgatcgttggttagcgcgtacgtacgtcttggtcatttgcagctgccacacctccgcgccatcactacaaactcgatcgatcgatcagagagtagtgcagcgcgcggttgggcatcatgctgcacgaggcggcgccctgcacgtgcgggctgctctacggcagctgcggcggcggctgctcgctgctgttcccggcgggggcgccgggggaccaccaccaccaccaccactacaagcagtactgcggcgccggcgacggggagtaccccgacgtgccgtacggcggcggcggctcggtggactgcacgctgtcgctcggcacgccgtcgaccaggcgcgccgaggccgcggtagcggggttgccgtgggatcagtcgtctttgcagcccagctgcaacgggcggcaggagatgagcggcgccgcggcgccgcgcacggagcccagcggtggcgcgggcgccgccgccgcgtcggctcctcgccgctgcgccaactgcgacacgacctccacgccgctctggcggaacggcccacgcggaccaaaggtactgtccattgcctacaaaagcacactgatcataacatacataattacacaaacacgtataagctaatgcaatgtgctcgcgtacacaagcagcatacacgcattctcctgcatgtgtgatcgattcgatgctaaacgtatgcgtgatctgcttttcagtcgctgtgcaacgcgtgtggcatccggtacaagaaagaggagaggcgcgccgccgcggcggccgtggcgccgacggcgctggcgtcggacggcggggtggagtacgcgtacgggtacccgcggcagcagcagcagtggggatgctatgggccggccgtggcaaaggcggcgtccttcggcatgttcggtgacgcggcgggcgaggacgggccgtgcctgccgtgggggctcggcgtcatgccctcgtcgccggcgttcggcgccgtccgggagatgccaagcctgttccagtactactagctaggctaccagcctcatcttactccctcttcactcactagatctcttttctcccctttttagtaacaacaagatgctgtacttctttttgagggcatgagatgctgtacttgaccaacgaccccagctgcatgaaagttgaagctgatatgtatggtcatcaagttttctatactaggctgcattttgtcatcagcgtccattgccatttgtaatgtctattatttgagtaaaatagatttttaaggcaaattagccaaacattaattatatatgcgggtgaagccaacctgctaaactatcatctctttgttgcacgacgattgcaaatagtagtagtatagtactgctgctactaaagtacagtggagccctgttctttttgtgcaagagcatatggtatgacgctgcattaccaggagtaacagtgcctgttcctgttggtaaccatgattggtttccattggaaacaccgtgcacagggtagtacagctagagcctatagagagatttgcacctttttgctgggccctgggagtgggaggatgccccaacggtcaatcatcggtagctgcatatgtcctgggacccgccaacgtaagggcccgcgttttcatagtttctacagttgtaatgtatcagtagtctcgactttctacgtgattctgagtaagaacaagtttaatagtatagccaactactagctccaaatcatatatagccagtataataatcaatttatataatagttacttactatactattaatacttgattctacctgttatacacacattacgttttagaggctgtgctgcagctggctacatatctgtagatctgtagcccgctgcttttctctatcttccttttatctttttaaaatatatttatagttagcttatagcctgctactgtacctgctctaagctgcccgatggaggagcgcccaaactgcagtcgatccgccccaccgctgtgtgtgtctcagtcctcgtttctcttctccggccgccgtgttcgtcgccgccatcccactgactacctcgacatagttgatagtagtatcattttctcaaaaaaaaaaaacatagtgtagtttcatcttgaaaaccagattacttagcccaagttgcacaatcttgattgttgggcagttgggcttagttgatgtatgccgtgtacctgggcgtctgggcccattagaaaccccagaacgtttggtgtaggcccaggccgtgtacttgggcccatctgaaaactccaacacgataacgtggcaggctggcggcgggccccttcccccatgacccccaaaatctgatccaaaccaccatccatcaacccaaccacaccccgcgcgccacgctccgtcgccccccacacacaacacaaggcgttactccggcacctcccgcctctctctccctcgccatggacgcggcggggaggaggctcgcccgcgtcacggcccacctcctgcccagctccctcccgctcccgctcgcctccgcccctaccctcgcgccttcccccgccgcgtcgccagcgtcggacagctaccgacgggtccacggcgacgtgccgtcggagcccccggagtggcgcgcggcgacggacgagtccgggaagggcttcgtggacatcctctacgacaaggccgtcggcgagggcatcgccaaggtgaagagctgtaacgaatttaatctgtgttatgccaaatttgccaatttaatcgctgtagtgtacagcacagtttagctccctttgttgaattgctaagaccgatctcttttgttgattagcattatagtgtgtgttcatctcccatttcgtgattggctgattcgcaatcgcgattcctgttgcagatcacaataaaccgccctgatagaaggaatgcattccgacccctgaccgtgaaggagcttatgcgtgctttcgaggatgctagagatgatagttcaatcggagtcatcatactaacagggaaggtaactatgctagagaaatcattaggtattcaggttccagctggtacgcaatgtgaatgaaatacttactttgatgttttttgatggacaggggacccagtccttctgtagcggcggtgaccaggcgttaagggatgctgatggatatgttgattttgatagctttggcaggctcaacgtcctagacctccaggtcatacgcattactctgacatttgcacacactgattgactatctcataaaaatatattctcgcacctcataacaagcttctggtgctccatgtgctgttttttcaaaagcattccgtgcaagtattcgagggctcagttttgtagctgaggttggatgtactactctcctctgtatgtttatctaatctttaggccaaagcctcttttcaggataaaattcatttttagattactaggcttcaattctgagtgtgttcaatgttcatgatattcttatatgagcttccataaactactctattttggtggtacttcaagtcctacatgaaaactacttgttcacattgttgatgtcttatgttccactgttcactcatcaaaccccgtacagaatgatgtttttagctctgagcagaatgtacattttgtttcttcaggtgcaaatacggcgccttccaaagcctgttatagcaatggtattatcatcactattgtgtttttcccctcatttaaccattctacattagtactacatttctaaatgttaaatttggtgctcatactatatcaggttgctggttatgctgttggaggaggccatgtgttgcacatggtgtgtgatctaacgattgcagctgacaatgcaatttttgggcagacaggtcctaaggtgtttttctggcctgttattacttcctgtatataggcattacacgttgctattataaaagttagtcgatatagcggaacgacgttagttgctatcacagtatcactcaaagttctgatgcaacttctgttacaacaatctaatttgtcttgacatttcttttttccttttttcccaccgggccagcgacagaaccggccaaatgcagtaagatttaaagatggaattacataaagctagagtccaacgacatgattgttgggaggtgtattgacctttctctagcatgtagaggtccttgtgcttgctttagtagcactgatgaatttcagctatgccacctaaagaatatgataactttggtttcaccgtagtacatctaagcttctataagcttattcagactttgattaaatgggaaaattttgtcactgaactactagtgcaatcaaatgttaatgaaagtaggttgaatagcttggtgtttgggctatgcatcaagaacacacggtgcatttaggctctgtttgaaagcccgtttagcttttgctttactgccagactgccacacatgaaacgaaaaatatcattagcatatgattatttaattattaactattacaaactcgaacaattggttatttgatttttcaaagaaacttttgtataaaaagtttttgtaaaagacataccgtttagcaatttgaaaaatgtattcatggtaaacgagggagttgtaaaagctaaacgaggtttcaaacattgtttccttgtagtttgacagattgacccttaccgggattcgggattacctgtgtgctatagtacttttaagagtaggttatctgaatggtctaatctgagttgctttttttttttgcacttatcttttttttttctgaaagattttttttgcttttcttattcagagtaaattttatcagtgaaacgcaaagcttactttaccttgtctctctgatttatacaggttggaagcttcgatgctggctatggcacttcaattatgtctcggttggtaagtcaatgaggtgcatgtcctcaatagagcttttgtgtcattgcgtaactttccatatgaccatatcatgcattgaaatcccctatccaaaacatcttcattttttcagaaaatagtaagatgtttctgtctctctttttttttcctgtctcggacaggtaggaccaaagaaagctcgtgagatgtggtttctgtcacggttctacacagctgatgaggcagacagaatgggtctcgtcaatgtagtagtaccagtgagtgcccgaggagtttacaactaatgcacagtctctaactctctatgactcatgccaggtgtttatgcactaaccgtatacattctttgtgcatatagctcgctgatttggagcgagaaacggtgaaatggtgccgaaaaatcttgaggaacagtccaacagccatccgggtgctgaaatctgcactcaatgcagctgatgatggccatgctggccttcaggtactagcaccattcatcgaaagccagagataaaactacagctcctttcttcctcctttgtaattgctgtagtaaaaaaacaatcctccttttgcctctttcctgaacatacttaccccttggatgcttgagtttattggaaccactgatgcaatcggcgcttctgctgcaggagctcggtggcaatgcgacactgatcttctatggaactgaagaggcaaaagaaggcaaaaatgcatacatggagcgacggcgccctgatttctcaaagttccctcggaagccttaaaagttgaacttgtgcactactagtacagatttctctacaattctgctgtatgtcatgacgcagactgaaatgctactcaaatctccgtttcctcgtcaactctgccggaagcataggtgggcgtcccaatgattgccagccccggtggacgggtgtagaagcgagatcgttatcctttacatgtcatttgttagttggcatttttataggtgtaaattgcagtgcttacgtatatgtgaatattcatcccgacatatcatagccgctggaaataaatggccttgtggtgcattagttatttgatcctataacaattggcctatatttatttttttgctggttgttttgtttgcttttcaatttattttaataactttttcaaggatatttatctgtaagaatttggatgtggcttgttgataagagtattctgtgtattcgagattctttcgtgaccccgtgagagatgagatgagcccatagaaaacgatagtttggtgacgtaaacctgcggctgaggcccagtagagaaaaccaaaaaggcccagtcctccttaatattatcctttgttgcgtcgcgtctctccacggccccgaatcgcctgcggcagccaacgcagcatccaccgtgtccccatcgcaagcgaacgccacaccaagtcgccacgtacccaacacacgctacgcatccaccgagtcggggcgcacgggatccccgtctcccccgcgccgcacaaaataacgaaattaaaaaaaagataataaataatattattaaaataacaagaaagcacagccacaattcaccacctcctcctcctcccctctcgccgggttaaacaacgaggaaaacctaacctaatcgggaaaaaatatcggaggaatccagaagcggggggctcccaccttgttggcgacgatgctgcgcgcgggagggaggcggctcttggcccccgggctccggcgggtcctcggcggcggggcggccgctccggtggccgtgggcggggcgaaggcgtaccacgagcgggtggtgnnnnnnnnnnnnnnnnnnnnnnnnnnnnnnnnnnnnnnnnnnnnnnnnnnnnnnnnnnnnnnnnnnnnnnnnnnnnnnnnnnnnnnnnnnnnnnnnnnnnnnnnnnnnnnccgcgttgacgagagctccggcaagatcgtcgacgcatgctttaagacctttgggtgcggatccgccatcgcgtcctcctccgtcggtgagccccccaaccccaactattcccctacctgttcccccccaccttcccttggatgatatggtttaggcttcgttttcgtcttcgtgaggttttctgtatttttcaattgttgggccatttgccaacgatgagaaattgtcggaacgtacgaggaaggattgtgatttgctttgtagtatgatagggaaattccgggggccaattctgagcgtgagatatagctacatgagatgcttgttgaaacaggaaggctgtttggatcagtgtaggaattatagtactaacagcaatattttttgtgtctgtgtccaatagctgcctgtgttttttcaccttagaaatcatgttcaattcaaatatattcaatgtaatgttatcttgatttggtgcagagagtattaatactatgtgtatgttgtaaacctgtggaggcagatgtggttgattaatcctgggtttaatttgattgagttatgttaatttggtggtctagggtagatttggttgattaatcctgggtttaatttgatttgagttatgttaatttggtggtctagggtagatgtggttgattagtcctgggtttaatttgataagtatgttgttttggtggtctagggctaaggtgctcgttctgcttgtctggtacaagcggttactgttttcagatgctcccctccccctaatgattttctgttttggtgagcttatacttatggattatttgtcctaattagtagcattgaaagtttttacatttcccaagttgtatgtcctaaacgaaatttgacatgattgggccccaccactgaacaaacaacttgagaaaggtgtattatcggtgaaatacttttgatagtcagcagctcaaactgttctcaagatgatcgcaattttgtggaagaaaacagaagagtctttacagaattgctatttatgttatgtgcattattctgttgtgaggcgaattcctgtatgtaactttattcatgttatgttacggcaaatgtcgccatgatatgatgcatactgtatgtattgtttgctagttataagccaaaaactagaaccaattgcagcttgaggttaatattaacttactttaatgcatttgcatattttccacatgaaaatcatcatgttcagatgcctggagttcacccctgttctcaaccaatagagttaacaacatcagttgcccagctggtggattaactcttatgattgttctctagaatctctttactatggaagattgtttgtgctgagaaaatttgggtcccaacaacaaattcaattcctgatccggcttttgtccttgcagctactgaatgggtaaagggcaagcaaatggaggaagtagtgactataaaaaacacgtaagctattccccttcctggttgtttgcactgcaatactctcagtggttacattaacatgctatgcttatatggccttttggatgtcattgaactactgtggttcgttattaccttgtggtaattaagtttctggctggtatgtgcaatttccttttcagaccatactttttcatcaaaattttcaatactaaatgtcggtaaaggggttccatctgtgagattttctttgtcattcgttgtcgtaatgatgaccgtctttcagttaatgcttcagcatttggacatgtctgaagcactttggtaaaattatttgatatgcacttgactaacatgatgtttccagaactgttttgtatagatcatattggtttttctgtagttccttggcagtggagtgtgtcatgtgtttgcattgattcatgaacttatttgtgtttaatggatgcattttcattcagagacttgatttgcctgtttgctaagagttgtttggctgctcatattttcttatgaatgtagatggtaatcccatcaggataaccatgcagcatacagtttagcttatgccctttgcttgcatggaagactaatatactttccctttatttttactaattttgtattttgtctatcaataagtttgtgtgtgaggatgctgtcaaatgctttcaatcaagttctgtaaggctgtaacagggttttgtgctctgctttgcagtgagattgccaagcacttgtcacttccaccagtaaagctccattgtagcatgcttgctgaggatgcaattaaagctgccgtgaaagactatgaagcaaagaaggcgaagctagcacaaaagggtgaagagaaggctgccgaagcatgagtgccagaggttctgtcatgaagaatgttgcagtgccctgcgtactcgtagtaaagaacctgtcatgaagaagtctctgctctgcttcttgctggcgggaaatagtgtgtaacgctcacaaactctatgcagcatgtatcataaggatgaaggcaaacatttttgaataaatgtgctgtcatcttgaaagaaaaaaaaaaggtgtatgcgtgtgtatggcctagtaatgaacatatggtacggaattacggtcgcgagataaggcacattgtttctctttggttgtttcaattagtcttaggttgagttggtagatgctcatgaacttgagttgcctggtcacttgcatcatttttctttttttttaaaaaaataactgtttagtagttctccgtgtttctccatccaacaggaatgcagaatagttattgttttgagagttctcctagtatctccatccactaggaatatactgaacttctgtagatatatccatggtgcctgtaagagtgcaagttctgtttgagagacactcggaagttcgcagggcgagtccggttaatggcccgtcacaagcagctgtcacatacggcggagtatgcgacctccggcatcaccagacccgcgtcggctgccgccggatctaaagtcaggcacgggaggaggcggtaggcggcggggatgctggggcagcgtgcggatggcggcggcaggcggcggggatgcagccatgcaggtgtcagcgggagtagaggaggcacggccggcggtgtgcaagccggcgtggagcgtgcggcagagggaggccggcgcggcgggcgtcgtggaggatggcgcgacaggcgtcacggaggccggcacgacagtttggagtcgcggtcggcggcgtggatgtgagatcggtggtgacggtcgcgtcacctggaagcgaggtcaatgacgacgtggaaacttggttggcggcggcgaggttgtcacagcacgtgggggcgcaatcggcgtgaggtgaccggcgaggcatggatggtgcggaggccggtgaggcgcggcttgcgcacggtcgcggcgcaaggaggcgtggcagaggcccggcgcgacgtgaggaggtgcagctagcgcagtgggaggcgaggtcggcagagacggaagccggcgaggcgtgtgccggtgcggtacaacgaggcgcggccggtggtgacacgtggaggctggccagcggggagcgccggtacagtggtgcgtatgcgccggtggtggtttagatggtggtggagcaatggtgcgtcaactgtggattggcaggcaaagaacggcgggtgaaaacccagcctaaccttgaccgggctggcaacggtggcgtttatgcgtcactcccctcctgagggtgttgtcgtgccgtttcatccctctcaaggcagaactagtaaagcttgcagtagctttccacctccgacgaaaccggagatccttcgccaaatacgaccaaacgtggcctttccatcatcccaaaatcaaaatacgaaaaagggtaaacgctaatagcatcaccccctctgaaactctgacgccattgcgatcacatgttaaacctgtacgtttggcatgccagcagctcatgcgccagaagcaattgagcttgccaaacattaaccatcgcttttgagtgcgtccggtaaagcacgcgcgcttccaggccagcgtacgtcggcgaactgatgcggtgcaggtaagatagcgtttcacgaccctcacctaggcagtcacatggttagttggtcacacgctgatgcgcgccaaatccatacaccgttttttgcagcaaatgggctgtgagcccacacaagtattgccaactgggcttggacgggttactgagctgtttgggccatctaccaatggttaaaaaaaggaataagttcatctaaggtcccttaacttgtcgacaaatccgattttcgtccttcaaccgcaaaaccagatagaacgggtccctcaactatcaaaaccggtgtagattaggtccctcggcggtttcgatggtggttttggctgacgtggcgtctacgtggctaattttgactcagtctcgatctgatgtggcactgatgtggcgtttacgtggcaattcgacctgggaaaataataaaccccatgggacccacatgccagtttcacacaaaaataataataataatggtgggacccacgtgggccccacatgtcagtctaactcaccccctcctgttctgcttcctctctctccttctcccctctctgtctctctcttgcgctgggtcattctgattctcctcttccccatcttctctgtcttcatctctctcccctctcctctctctctcttctctccggttgacaggcggcggggagagggcagtggccggctgggagaaggggcgcggcgcggcagccggcgggagggaaactagcggggagaagggaactagcccggcggcggaggcggcgccgccgtggccatggctgcggacgacgtcgacgtcgacctcggcatcctcggcgacgagatgaacgtgtcccgctgatcggccaacacacgcgcgcatcctcggaggcggccatccgtgcaggcgggtgagggggccacctcgccggcgggagaggggagaggcggtcggccgcgaagaccaccctagtgacgatgattccaactacaactcctagtgacgaactcgaggtcgacgacgaggactctaactacaactcctgctccgccgctgccaacgacaccgctaatcccgtgagtccatgacgacctcgctcacctccgacggccacgtcgtaagcgtctacttccgccttgaagcgcccctggcgacgtcacgcctgtgccccaggcggccactcttctccattttcgccgccgtcgtcgtcgccggccgcatcccctagcacaagagagagatgaagagaggggaggagagagaggaagcagaagaggaggggtgagttagagtgacatgtggggtagcgtgggtcccaccatcattattattatttttgtgtgtgaaactgatatgtgggtcctatggggtttattattttcccggatcaaattgccacgtaagcgccacgtcataccacgtcagatcgagaccgagtcaaaattagccacgcagacgccacgtcagtcaaaaccgccatcgaaaccgtcgagggacctgatatgcaccggcgttgtatctagttttgcggttgaaggacgaaaatcagattcgttgacaagttaaaggaccttagatgaacttattcaaaaaaacaaaaggaagaagaagaaacagctttctatgagcttcccatgaagtcgatgagctcaaattatttgctgcgagaaaagaactcagtgctgtgttacaaatcgagtcattttgaccgcatgacttattgactttctcccagtgcacgacaccattggcatgttgagggggcagatgccagatgaggaacactcctacagttaacttttcttcaaaaaattgtgcaggttagctgaattttcttcttcaaagatccaaatcatttttcttagtccttgtttagcttgagacttgagatgtgtgggtctgattcagcttttgcgtcgaaattacagggtagacagcctcccattgctacatgggtcggtagatgcgtatcatcaaggtgccaaatggccaataggcaatagcatcatcaacaattcacatcttacatattacaatagagtttaaaaatagaacttcctccacgcaaaaaagatagaaacaacatccatttgggtatctccgcgcatagatatctggaaccttactacctcaggagtgttcttcatctggccccctctacatgtcaatggtgtcatgcactgggagaaagagtcatgcggtcaaaatgacaaccagaaatggttgtttctgtaaattcaatacgatcaagggaacacggcataaatgcttgaaatcttctggtaaactatcaatttagggtgtatttagttcacgctaaaattaaaagttaggttgaaattggaacgatgtgacggaaaagttagaagttttgatgtgatggaaaagttggaagtttgaagaaaaagtttggaactaaagtcggccttattgttttcgtatgacgcactatcaatttgtttgacatgtctaatgtcttcgagaaaaatagtttgacatgtcagtagagtgatgtacacaggcatgcaaaggaagcaaatcacataaatcacactaactattttcaacacaatgaaaaatgataagcggagaagactactgttagtgttattgttactttaaatatggtatatatagcatgtgttcctgatgaaggaaatcacaaacatgcaaaaatcgtcatgaacaacaaagaaatgtgagagctgaaaaggcatcacagtgttaactggagaaatgagctgagctaattcaagaataaaggtgataaccacagcactgaaaacaaggccaacaaataaaaatgggatggcacattatggtagaatgcgcgcacaaactggaaatcagtgggcagtgatcctcacaatgctagaagctcccccacaaaaaagtgacagcagcatttgagcatctataacaagaacagatttatatcgagaagaactataggaacaagctgaacaagctaactaataagcaaccaatctgcatgaagttttaattttagacacaattattgaacagccccaagatgtgtaatgtcacagttgcaggaaccaatcatctacaatatgtatatgttagctaacgacatttgctcatattcgcttatctcggggcaaaagatgatactttgaaacaactgtctgtcacttgtacacgggcaggatcgcagtaatgatacatatcaacttctaagtgtcttggcatcatttgcaggatggacttcaatgttcagaagctcaagagatattgattccaacgaggaaatgataaatagttgaatctactctaaaaatatgatagtaggaaatatggagtgatttaatccagagctgaagcttgagcatgttcagaattttcacttcgagttaagggtgattgacctgacagtagcttttctctactgccatgattaacaatttaacagacagcataatttcacttcaacactacaccgccattgcacaattctcaccattatgattgcgccaatatacaaaatctacattggcaatttagcgcgtggaacatcgatatcaatacaagatggaatgtgaactaacagatccacatacagaaatctcatagtatgaaacaacaaaccattgtaaatatcaaaggtggtacacaagattagggtgagaaaaaaaggggagtcctaaaattacctagtgtcacgcaatggacaccttggcgccgacctcctcgagctgcttcttggcatcctcggcctcgtccttgctgacaccctccttgaccttcttggggaggccctcgatgaggtccttggcctccttgagggccaggttggtgagcgcgcgcaccaccttgatgctggcgatgcgcgcgctgctgggaacctcctcgatgaccacgtcgaactccgtcttctcggcgggggcctcgtcggcggcggcgcccgcgccgcccgcgccgggcgcggcgacgacggcggcgggcgcgaaggcggcggcggagacgccgaggcgctcctggaggtggtccacgaggccccgcgcctcctcgagggtgagccccgcgatggcgtccccgagctccaggaccttgggggactcggtggcggtggacgccaccacggcgacggcgcggcgtgggcgggcgcggctggggacggcgaaggaccttggggcggcggcggcggcggcggcgggggaggaggaggaggggagggagaggagggagaaggcggaggagagcgcggtggaagccatggggatggggggagtgagctctcgcttccggagttgaggtgagctgcgggaggaggaagcgaggagacggggggataagatgaggcaccgctgggataagacggcacgctatatagtgcgccgcgagtggctaatacgcatttttttcgttgcgatgcctaatcaaattgtgcgaactaggagtgctgactacttggaagttaaaagagggatataatacatgagagcagtcccaaaccatagcgtttaaaggtagtgtatatggtaccatgtcaataagacatcacaataaaaattacactccataacttatggtttcttaaagtggaccattaataaatacatcatctctcttctctaccaatcatatttattctttatctattatgaagaaactattctcccccaatgcaaaacttgatagtgtctactgcataggttctcgtgttgaagctgtgtcttgtatgagacccaatttcttcctctcttcactctctctcttaattaatatagtgccacataagataaaagtccaacatgacaatgtagttaatgctatagacaatatcctaggtggagggttgggactgccatgataaaacatatccctgctttacaaattaatcatcatataagtttatacaccaagaccaaggacaatttaaatcatatcaataaagacatcatagacacattctcccacgatgcatacatcgattaaaacctttcgttataaaatatactccctccattccaaaatataaggcataaccacatttaacccaaagaccaagaaacaattattatcacctctttgtttgaatcaatccaactaatacaatatatgcacccaatagaattaaacatcttgtgagtgtatgatttaaaaaataataatgtaagatagaagatatgataattaattgccatgcatgcatgcaggccttatattatgaaggaaaaagtacgaattaccctccgaactactgtgacagtatgaattacccctccccccggaaccacaaaactagacatattacacctcgaactattgataccagatgaattaacccccccccccccgaatcattcctaagcggtttttctcctacatggcatacacatgtcgctgacgtggaaattcaatcaacaaaaaaataaaagaaaatatagggcccacctgtcattatctctcttccccctctccttctctctctcaggcgtgtgtcgacgggcagtgggcagcggcagtggcgtgtggacgggtggtcggcgtgcgggaggcgacggcagagcgcaggaatggcacagcaggcaacgggtggcgccgaggagggcattggaggatgcggcctacgtagtcatcgtcgtccctctctctctctaggctcaggcaagcggcgggcgacgagtcctcccctgggagggcgcggcgggcaccgcgcgcgacggacgtggtggggagggcgagacgggcggcgtgcagcgccgaggacattggagacggtggtcgtctctctctctccctcgttctctctctctctctggtgccgtcgggagagccaagcaagg

SEQ ID NO: 9921 - DNA, 47774 bp, Oryza sativa
  unsure (1)..(47774): unsure at all n locations
ttagaatgatttattagatacacatacatctattgtatataactcatattcacacgataatgattcccgtaaaacaaaacgtgcatcaaacaaggcatgatcttctgttaatttgtcatatgtatagcccatcttgacatgttaatacatacccatgtatatagcccaccaccttgaccttgaatactatcttatgcatgcaacagaccatgatgtgtgatgacacttgctattgtccatgtaactccaattcttcttcggtcgttactttggaagaccgcacacgctatctctactgcgtaagtaatatttggattttttgcattgatctatctttatatgtcaagtggtatgcgatgcaaaatatatcctgatgtaaagtgggatatgatgcgaaacatgtctcgatgtattgctaggagtgcctcgtgttactcactctttaggagatgtctatgatgtaaagtggaaaatgatgcgacacatatcttgatgtgttgctaagagtgcctctagttgtcactctctctataggagatgtacctatgtactcactcagcatcctattacattatttggacgattttgcatgccgttccaccccatgcaatgtggatgcatctaatgtatgttgctccattgtatgcggtgtgaacgcatcctgatgctaacaaagacttcggttctcactctgtaaaccatatcatctactactccatacatcttgacatgttgcaatcactagtgaaatctttttttttttgccatggatgctccttctatgccataatacttcacaaagtttgtcaaatagtgattacattatattatgttccccatgctttatttataaaataaagagtaactagaatggtggcctacgcaaattacttgccaccttgacctatgaatacttttttatgtatgtcgcagaccatgatgtgtgatgatgctcactagtgtccatgtgaactccagttctccggtcatcactttgcaagactacaactgctatctctactacgtaagatatttgtattttttttccgtattagtttgctctttctatgtatgtcaagtgttatacaatgcgaaacgtatcttgatgtattgctaggactacctccaggtgtcactcacactgtacgagatgtatctatgtgcacgctcaacatcctactacataacttggtcggttttgcatgcagctctgccctatgtgttgcagacgcattctagtgtgttctatatcctatatgttgctccaccgtatgtggtgtgaatggctcctaaagttttgttagaaaagactccagtcgtcactccgtaacccctttgtctactactccatgtaggagatacatttttgtactcgttatgcatcatcttataatttggacgatttcacatgttgcttctttttctctacgtatcttaaggcatcttttgaaacggagaaatcacaagagaacttcatgggatctaaactagtttctaaaaaaatgaaaatgcatgtgttctaaagagctctaaatagtggagcaatatttggtaaaaacatgccacgttattttactagcattgactcctcttgtgattgtgcagaccctatctatcctggtatgtaggagatgcatgaatgtatttccttcttttccattgtaaaacttggaaagttctatacattgtcttaccttttctcttcccttttttgttttgtagaacttgtgcatattccgacgtattactatgaccgtctttgtgccttgtaacactatatctcttgactctttctctggcatacgtgggacacaccgtcagtgagccaactgacccaagatatgtgtctaaaacttggaaacccctgcacattgtcttaccttttctctttcattttccctattttgtagaacctgaacgtattccgacgtaataaaatgagtgtctttgtgcctcgtaaagctctatctctagtctcttgctctggcatgcgtgggacacaccatcaatgagccgaccgaccaaagacatgtgactaaaaaaattgaaaagatatgcgcattggcttatcttttttcttcattttttcctattgtaaaatgtgaacgtattcctatgtagtacaaagggtgtctttgtgccttgtaacactctatcttgcgtgggacacaccgtcaatgagccaaccgacccaatgtatgactaaaacttggaaagttctacacatcgtcctaccttttctcttcccttttttccttttgtaaaacatgaacgtattccgacataatactatgattgtctttgtccttgtaacaccctatctcttgtctcttgctccggcatgcgcgggatgcatcatcaatgcgatatctcttgctgtaagttcaagtgccttaatttggtttcggtgattaatgacaaatctaattatatgagactaacgtttttatgagcctttctttgactagtctcatttggatatggaagtaaaaatgatgagaggtatgtattaaacttcacatattctaacttggtctctcttgtagatccaaaatatagtgtgagcttcctatttgatctttattgattatgtgcatatgcgttccttcatatccatatgtatgcacatcttgagggggagcttattctatattttgtttattataagatttctatcttgatttgaaatcatttttcatctcatctctctatattgtttatatcgggttattatccatcaccaaagagagaaaagattgaaagatcttggattaaacaatttgtgtaattgttactttggtgatagatgataaaccgatgtttatgggattaacctctcttttgcataagttgtctactaggttatttcccgataatgagatgtggaagatatgcattcttttgtgatggaccttaatcatgacaaggatgaaatgcatggagataaaacgatatgtaccacttcttatctcctactttttgattggttcatatatatgattttcatgttattgatatataagtgtgagactaatgtttactcgaatgttatcttatttagtctcatttacattgagaacaaggagatcatgaatgtatatgttttatgttggtctacagcattactacatatgccttctctatatgtataggataaacccccattggtcattctctaattatgcatacacttgcatctcttgtatatttatttgtatgcatatatttagggggagcaaatcctatacatttattgtgcatgttctagatccatgttgttcacctattatttatatcgaatctttgcacttgagcttgcatacgagtatatgacacttgtgatgttaatgaatactcaacaaacatatccatatctttcatatgcaaccggttggtcatcaagtgaaggatgacaaccgatttgttgagactaatgttctcctttgaggtgtgaaaaggaataggtcccactacgatgaggctaatgaatgacaccatgggttagtggtcaccaagccaaggacatcgtcatgttggcaagaatgaagtcaaacttgtgatgagaataaagtcttgacaaaggatggacaagacctcagcataaacatggttcaaccggatggtcacaagtgttgatctcggctcaagcttgaccccaagatggatggcgcaaggcaaaggtataatgtagctaagaatgttttcttagtattttcccggtcttggtgtttggtgtagaccagatttgctagataggcgccgtactatcaagaggggtctatgaagcgagcttgtggatgatcttgtgccatattagttcatacgcatgtaggtgcattttgtgggcttgtctaaccaagtgtgatgagttttctcaagtcttaaaccaagagagaagtgggcatgtccaataggagtgagtgacatcttgtgcgtatgtccggtggatatcctttggagtgtgagccctttatccttgacttaagttgtgtttattggatggatttttcatgggttggatggccttttgaataatctttccatagagtccaagaacaccaaattccgagacccgagtcaagagatatcgccgttttactaacggtcggttgagctgaaaagtgacctgcggtctgaccgtgggccttaggccggtctgaccgggtctgttagccggtctgaccggcgtggtaaggccggtctgaccggccccactggtctgttgcactggtctggtttttggtggcgatacagagccgccagagccgcaaccggtcagaccgagccgacggcggtctgaccgagccgtggacggtctgaccggccactacactgcggtcagaccggccagtgtcacgcccggaaattcactagtaatttccgaacttatttgtgcataaaatcctcctccaggaatcagccgaggtacacaaactgacaatttaatatacagattcatcaataactaaagcgaataaatacttacttaagaggcacttagtcctcaacatgaagaaaactgcagcggaaaaataaaatctagcgaagctccggctccactcccacaggcagctcaactggggtataagccaaacgtcttctcctcctggatcctttttcttcaactgaggttgattgattattgcaaggtgagcatatgacatactcagcaagccacacagcaaatatgcaagtgcacaaggataccaaaggatggcataatattggctcatttgcaaaagcagcatttagcaaaacatttaagagaagtaaaacagtggagtaattaatcaggaattttaatcaacactgaacagcacacccatgctgcacaggcccaaccatcctgaacaaccatacccggctgtacagatctaatctccaaaccaggagctaagcaaattattatcaggtataacatccataactattgtgagaggtgtgagactaatcacgaaaaacattgctcaactcgcccataaccgcgggcacggctattcgaatagttttactctggccagaggtgtaccactgtacccacaagacacagcctcaacatcatgtctaccatgcgtcgcgatactggaaagtacctaaatagaggctgtgacaataccctctgcataacacaactcaccacagtgcaccattcctggatcataatcacccccttataaaacaaggcatggactccccagcgacccccgtgggcttatctccgccacttctcagtctggtgctccgcaatgaatcatgttatacaaaaggtaaagccgttgcccacgctggcttgtggttggtacggttaatgtttcacaacagtagctcgcgaaccggtccttaattgccatgagcacgactctcaaaaccatgtgctcacaacccaccattatcaagttttagttggcaagtaattaattaatcaatcacgattgaccatcgtgaactatcattaagccatcattaaaaaaatagtgagtcataagttatcccaatagtgtgctaatgtttctaagcatggctaagcaatcacatctaatatctagttgaaccaatatatataaagctcaactagtccaattataatcacccaaggtatcaaggaataaagtaatcgagaacaaaagggccataacaaagagtaggttaattccacccaatgacattcgaaaataaatgcacagttgaaataaatagagaatttaaatataggatcaacatgctcaaaggattgtgtttaggatctgtgtgacttgccttgcaataatcggtcttcaattaatcttcttgaacacttccggcgcactcgcgaaccttcgcaacgacggaaacgacaagctaacacgcaaaacgaagaaaaagactaataaaaaccaaataaacaatacatgaaaagtaaacaaacatgtagatcatatttttagatgaattatgagacttgaacggcctcattctgacttcaaatgaatttattatgaattttacaagattaaatctatttaaagcccatttaaaaagaattaaataaatttaattcaatttatggacaattttaatatgtagatctttattttatacaacttttgcaacttgaaccacattaaactgagttaagatgaattagttatgaatttttaaagattaaatcggattaaaacctttatatggattttaattgaattatgacgcaataatgaattatttttgaaaaggaaaagaaggattattgcgtcagcggctagggtttcggtggaccgggcgcacgggcgacggttcacgggaacggacggccgagatcaaccctatccaaaacggacggctgagatcgatcggtccacgaccggctcacgggagaagggacgataacgccagcgatgacgtcaccgacagcggcggcggctcggcggagcggacagctcgggcggcgcacgctcgccggcgaacggcggcacttcggcacaaacggagggcaccagcacgtagaggacgacgcggcgaactcaccggtgaccaaaacggcggcggcgacgaggaggaagcggcgaagctcttcgggtcgacgacggcgacggcgctccgacggtcttcggcggcggcgaagcggtggacggggacggcgacgacttggcgaacccgatggtggcaacggcgaccgacgacggcgactgcaacggcggcgcggcgcggctgaaccgacggcaacgacggcggcgactagggctacgcggaggcggcgctagacgcgacggcaggctaaggcaaaggaggcgacgggtagaggggagctcgggggtccttatataggtgcaaggaggcggcggcaaaggcccacggcggccggcgacgagaaggaaagctcgcggcttgaaggaaagaggccgatccgaatcgaactctattccacgaacttccaaaacgatttagccgatgtttccaaaggagaaaaggtagaggagatcccggagattgtttcccctcaatcaattcggccggagaaggaaaggagcggccggatttggaagaaaacggcgacggcggcgcgctagggtttcaggcggcagcggcggctcgaggaagacgaacctgacaagcggggcccacctgtcagcggctgagagagagaggagagcggcggctcggcggactgggccggctgggccgagggaaagagagaaagaggttttgggccgactttcggcccaaagccaaaagaagactttttaaaacctttttcaattaaattatttcttaaatgcaattccatttattaaaaatacttccttagctcaaataattcccagaaaaatctaggaattatagaattaagcaaagtatttaatgaaattttatctggcccctttttatattgagatttagcaaattaaaattagatcttctcttttaggcttttaaaatcatttctaataattccttttaaacaacaatttataagttaaggatttttaaacaagaaaagctcttaacaattatacttagatcattaatgatcaaataattactgaactgttctttgtattatttaagaattgagctctgaaaaatccgagaaaatttcagagagttgacttaaccatggagaatttaataaaaattaaatccatccatgctttagatttaagaaaattttatttcccacattttacttcacttgtaaattaaagatcatttaatataaattccaataataatttattaaataatttataaatcctaaaacgaaaatcaggatgtgacagccaggttgagtgggctcaatgattgccctgtaacggctagttttctaaccgttacaaagtagtccggtctgaccggcctcacaacggcggtctgaccggtagagcacaaagttggggatttcggttccaacggctagttttggtggttgggggtatatatacccactccccagcagcaagggtaaggttttggcactccattgcattatcttgaacccttgcaagagctctcacacccttgtgcacttagtttatctagtgaggtgttagagagtgagttaagccaatccaagtgcattgcttcattgttatagctagtgtggcacttgatcatcctcggcaagcatcctagacttgttactcttggaggttgccacctcctagacggcttgtggaggtgttgcccagtgacctctccgaggagattgtggaggaggcccggcaccgtttgtgagtggtttggagttcaccaccttcggagtgaaggaagaactacctcgagtgatcgaggcttgggtagtcctctccgtgggccagctcccgccttgcccaccccttgacgaagggggcgtgcggtggcttcgtggttgagcagtggaattgggctcgtctcaacggggattaggaaaccggcgaatttccgaacctcggtgaaaaaattccttgtctcttgtctcatttatttgttgcatttacatttgtgctatttacattcatagagacatatttgagcccatatcacttaggtttgcaaaacttaacttagttgcttagttaaccttgcacctcaccttgcctagcaacttaggttagttttgtttaagtgccattaagttttaaaaccgcctattcacccccctctagtcggcctccttgatcctacacttgcctcttgctctggcatgcgtggggcgtaccgttaatgagctaactggcccgagatatgtgattaaaacttaaaagttctgcataacgtattaccttttctcttcccttttcctatttagaacgtgaaaatattccgacgtgatactacgagcgtctttgcatcataacgctctatctcttgtccctttgctctggtatgtgtggggcatgccgtcagttgctttggtatgcgtgagacataccatgagctgctccgttgtgtgtgggacacaccgttagttgctctgttatgcgtaggacacaccctcagttgctccgttatatgcagaaacactatgagttgctctattatgtgtaagacaccgtcgattactctgttatgtgtggcacacaccatcggttgttccgttacgtgtgggacacaacgtcaataagctaaccaggacactggcccaagaaacgtgactaacatcactatctgccagctaggttccaccggtcagtcgaggcttaaataggaagctacatctcacggtttccaatgtagtacaacgagtgcatttatgccttgtaacgctctgtctcgcgtggaacacaccgtcaatgagccaactgacctagtatgtgactaaaacttagaaagttctacacattgttctaccttttctcttcccctttttccttttgtaaaacatgaacgtacttcgatgtagtactatgactacctttgtgccttgtaacaccgtttctcttgtctcttgctctagtatgcgtagggcgcaccgtcaatgagctatctcttgtctcttgctctggcatgcgtggggcgcaccgtcaatgagctaactggcctaagatatctcactaaaacttaaaaattcatgcataactattatcttttctctttctttttcctatttagaacgtgaaaatatttcggcgtgatactacgagcgtctttgcgtcataacgctctacacttgtctttttgctccagtatgtgtgggagacataccgtgagttgctccgttgtgtgtgggacacaccgtcagttgctccgttatacgcggacacattgttagttgctccgttatgtgtaagacacaccatcgattactccgttaaatgtggcacacaccgtcggttgttccattatgtgtgggacacaacatcaataagctaagacacactgctagttgctctgttatgtgtaagacacaccgtcgattacttcgttaaatgttgcaccatagtagaaaaaaccggactggtcaccgaaccgtccggacgtctaggtcacgggtcgaacggttggaccgccgggtcaaccggttcaagtgcaggtgaaaaaccgttatttactcatgtactcatttcaaacacaatatatgcgttgctcttttggctagaaaagtttgcgatctccccagagatccacgttcgaatcccatgcgcactagattaagtgctatttttggctgttgggccgcaaattactggattgggccttgatttggcccataattttgtgttaccaggctgggcatgccggttattttcccctccagtctttttgcacgaatagaccggccacatcgctggttccgatttttcacgatcgaaccgccgacttggtccggttttttgcactaggtgtggcacacaccgtcggttgttccgttacgtgtagaatacaacgtcaataagctaaccagcccactggcccaagaaacgtgactaccatcactgtctgctagctaggttccaccaatcagtcgaggcttaaataggaagctacacctcggggtttccaatgaagtacattgagtgtctttatgctttacaacgctttatctcgcgtgggacacaccgtcaatgagccaactgacccagtatgtgactaaacttggaaagttctgcacatcgtcctaccttttctcttcccatttttccttttgtaaaacgttgaacgtacttcgatgtagtacaatgactgacttcgtgccttgtaacaccgtttctcttgtctcttactctggtatgcgtagggcgcaccgtcaatgagctaactggcctaagatatctcactaaaacttaaaaagtcatgcataacgtattaccttttctcttcctttttcctatttagaacgtgaaaatatttcggcgtgatactacgagcgtctttgcgtcataacgctctatctcttgtctttttgctccggtatgtgtgggtgatgtaccgagagttgctctgttgtgtgtgggacacaccgtcagttgatctattatacgcggacacattgttagttgctccgttttgtgtaagacacaccgtcgattactccgttaaatgtggcacacaccgtcggttgttacattatgtgtgggacacaatgtcaataagtgtgtgggacacaacgtcaataagctaagacacactttcagtttctctgttatatgtaagacacatcgtcgattactccattaaatgtggcacacaccatcggttgttccgttacgtgtgggacacaacgtcaataagctaaccagcccaccggcccaagaaacgtgactaccatcactgtctgccagctaggttccaccagtcagtcgaggcttaaataggaagctacacctcggggttttcaatgtagtacaatgaatgtctttatgccttgtaacgctttatctcgcgtgggacacaccgacaatgagccaattgacacagtatgtgactaaacttggaaagttttgcacatcgtcataccttttattttcctcttttcccttttgtaaaacatgaatgtacttagatgtagtactatgactgtctttgtgacttgtaacaccatttctcttgattcttactctggtatatgtagggcgcaccgtcaatgagctatgtcttgtctcttgctctggcatgcgtgaggcgcaccgtgagttgctccgttatgtgtaagacacaccgtcaattactctgttaaatgtgacacacaccgtcgattgctccgttatgtgtaggacacacagttaattactccattaaatgtggcacacaccgtcggttgttccgttatgtgtaggacatagcgtcaataagctaagacatactgttagttgctccgttatgtgtaagacacacagtcgattacaccgttaaatgtggcacacaccgttagttgttccgttacgtgtgggacacaacatcaataagctaaccagcccatcggcccaagtaacgtgactaacatcattgtctaccagataggttccactggtaagtcgaggcttaaatcagaagctatacctcggggtttccaatgtagtaaaacgctctatctcgcatgggacacatcgtcaatgagccaactgacccagtatgtgactaaaacttggaaagttctgcacatcgtccaaaaccttttgtcttcccctttttccttttgtaaaatgtaaacgtacttcgatgtagtactatgaccgcctttgtgccttgtaatgtcgtttctcttgtctcttactatggtatgcgtagggcaaatcgtcaatgagctatctattgtctcttgctctagcatgcgtggggcacaccgtcaatgagctaactggcctaagatatctgactaaaacttaaaaagtcatgcgtaacatattaccttttctcttcttttttccaatttagaacgtgaaaatatttaggcgtgatactacgggcatctttgcatcataacgctccatctcttgtctttttgctccggtatgtgtgggagacgtaccgtgaattgctccgttatgtgtaagacacacaatcaattactctgttaaatgtggcacacaccgtcggttgttccgttatgtgtgggaaacaacgtcaataagctaactggcaccaccagcccaagaaacgtgactaacagcacagtctaccagctggtttccaccggtcagtcgaggcttaaataggaagctataccttgggtttctcacctccatcagttccatctcatctcatggcttatccgtcttgccgcgtgtggtcggatggcctcccgcgaggggcgcgcggcccgcgagctgcagccggccggcccacgagctgcagtcggcgagctccgcggggcgcgcattgaggggtggcgcggctggcgagcttcggctggcatggatcgaatggcggcacggacggcgagcactggtgggcgcggatcgagggcgtggcggcgagttcagacgggcgtgaatcggagggcagtgtggccgatgcgtgcagtgagcagtgagctccgagtctctgaccagctgcaggaaggaacaagaagagcgaggacgtatgccgacgcagaggaacggcgtagaggacacgacctccacggcacggtcgcgacgctctttccccatgccccacaccctcgatcccgtcgaagaacgcgtgactttctttggccactcgggcttcagatttgtgggcccagacacactcgtggtaagtggtaacaactctctcggattctccggcgtggagcgtttgggcagaacgccagcacatcgcactcgtgactaacatcactctctgccaggtgggttccaccggtcagtggaggtttaaataggcagctacgcgtcggggttcctcacctccaccatttccatctcatctaatggctcgtccatctcgccgcgcgtggtcggatggcctcccacccgagctactcgccataattgtcatgcagctcaactgccttgccgaccgcgcctgcttctcctttttccttttgtaaaacatgaacgtacttcgatgtagtactatgactaccattgtgccttgtaacaccgtttctcttgtctcttgctctggtatgcgtagggcgcaccgtcaatgagttatctcttatctcttgctctggcatgcgtggggcacaccatcaatgagctcttgtcatgcataatgtattaccttttctctcctttttcctatttagaacgtgaaaatatttcggcatgatactacaagcgtttttgcgtcataacgctctagctcttgtctttttgctccagtatgtgtgggagacgtaccgtgagttgctccgttgtgtgtgggacacaccgtcagttgctccgttatacgcggacacactgtcagttgctccgttatgtgtaagacacaacatcgattactccgttaaatgtggcacacatcgtcgtttgttccattatgtgtgggacacaacgtcaataagctaagacacactgctatttgctccgttatgtgtaagacacatcgtcgattactctgttaaatgtggcacacaccgtcggttgttccattatgtgtagcacacaacgtcaataagctaaccagcccaccggcccaagaaacgtgactaccatcaccgtctgccagctaggttccaccagtcagtcgaggcttaaataggaagctacacctcggggtttccaatgtagtacattgagtgtctttatgctttacaacgctttatctcgcgtgggacacaccgtcaatgagccaactgacccagtatgtgactaaacttggaaagttctgcacatcgtcctaccttttctcttcccctttttccttttgtaaaatgtgagcgtacttcgatgtagtacaatgactgcctttgtgccttgtaacaccgtttctcttgtctctcactctggtatgcgtagggcgcaccgtcaattagctaactggcctaagatatctcactaaaacttaaaaagtcatgcataacgtattaccttttctcttccttttccctatttagaacgtgaaaatatttcggcgtgatactacgagcgtctttgcgtcataatgctctatctcttttcttttttgctccggtatgtgtgggagatgtaccgagagttgctccgttgtgtgtgggacacaccgtcagttgctccgttatacgcgggcacactgttagttgctccattttgtgtaagacacaccgtcgattattccgttaaatgtggcacacaccgtcgattgttccattatgtgtgggacacaacgtcaataagctaagacacactatcagttgctcagttatgtgtaagacacatcatcgattactccgttaaatgtggcacacaccgtcggttgttccgttacgtatgggacacaacgtcaataagctaaccaacccaccggcccaagaaacgtgactaccatcaacgtctgctagctaggttccaccagtcagtttagtatgtgactaaacttggaaagttttgcatatcgtcatcgagctccgcggggtgcgtatcgaggggtggcgtggctggcgagcttcggctagcgtggatcggatagcggcacggacggcgagctctggtgcgcgcagatcaagaggtggcaaggcggcgagttccgacgggcgtgaatcagagagcggtgtggccgatgcgtgcagtcgccgatgcagaggaacgactagaggacacgacatccacagcgcggtcgcatcactcctttcccacgccccacgccctcgaagacatcgaagaacgtgtgatttgtgggcccagacgcacttgtggtaagtggtaacaactctctcggattctccggcgtggagagtttgggcagaacaccagcgcatcgcacttgagactaacggcactctctgccagctgggttccaccgtttcgtcgaggtttaaataggaaggtacgcctcgaggtttctcacctccaccggttccatctcatctcatggcttgtccgtctcgccgcgcgtggtcggatggcctcccgcccgagctactcgccataatcgtcctgcagctcaactgccttgccgaccgcgcctgcttctcggccgtctgccgcgcgtggcgtgacgcggcgccctacgccgacgccccgcagcgcggtgtcccgtggctcctcctcccggcccgcgacgcgccgtccttcttcagcctccactctggcgccacgcgccgcatgcgcctccccgatggcgtccgcggcacgcgcttctgcggcgtccacgacggtggctgggccgcggtcgccgccgatacgtggcgaggcttcgcggtcgtcaacctcttcaccggcgtgaggctccccctcccggagaagctgagggtcgaggtcccccccggcggcaaccacgaccagttcgcgttggccgccggcttcacccgccaccacatgctcatccgcaccgtcgtcttctcctgccctcccacctcgccgtactgcatcgccgccgcgcacgtgtccagcgcctccaacatcgccttctgccagccggcgtcgctgtccaccagctggaccgcgtaccggcgcgacatggacatcatccaggacctcatcttccacaggggagcgctgctgcagggcttccacgtcctcaccaacaaggaggaggtcctggtgtacgcgcccacggcgccccaccgccccggcgcgccgctgaagctcgcctgcacccgctactcgctgcggccccgcgacgactaccagcccgacgacgccctgccgccgacgttcatcgcgacccgctacctcgccgagtcccgcgggaagctgctcatggtgctgcgccactacaccggcaaccccgtcgtgcggcgccgcacccgcatgttccggatcttcgagctgacgttcggcgagccggcggagcccaggcgcgccgccaccccgtgctggtgggtggagatccccgagctgaccggccgcgcgctcttcctcggccgcagctgctccaggtccgtcgatgtggcgcagttccccatgctccaggaggacaccatctacttcctcgacgacgcgaacctcgacctgtccatggtgctcaacaacgggagcacgtactgcaacgtcgacatgggcatgtacaggaagggcgagaagatcaggcctggcgctcgccaattcccccgtgaattcactgcagactgctcgcctccgatctggctcgtcccctgattattcagtgggtattccagcgtgttactgcctgtcgtttgggatttactccattaataaatcgctggcagttctgtagggtttcagaaaaatgaaaaatgtatcttgacatgttgtaatcagggtttcatttaccgccggggccgcggttaccgcgccccggcggtaagcacggttaccgcacggtaaccgcggtaaccgtgacaaaccgcgacaaaccgtacaaaatttatcaaaaattcaaattatttttcaaatttatttgaatttgacgcggttaccgcggtttaccccttaccgtacccccgcggtaagcgcggtaaccgcggtaaccgcgcggtttaccgcggtaaatgcaaccctggttgtaatcaccaatgaaatcctcgtcgtgtcattgatgctcaattttgttgtcccttcagatattatacttgtcaagaatttgttcagcttttagatttagacttccaggtaatgggattcaatgttccaagtagaacatgttcaagcaattacagcaaggtgcacggaggattaacagcaaacatacacacaagtgacagagaacaaggtgaagcatggcgtgtacttgtatacgcatactttgacacacacgtcatgcataatgccactactatgctagcgaaaggtaagaggcatgcaagatgcagacgctcatgtctgacgtccctgctcataaaccaccagctggtgactgcagtccccactagcagccgaaactgaacccaggtaaagcgcatgaacggctacggctgcatgagatagaaagaggaaacggccaagccaaagccgtcgtgatcaccaggccagagaggcggccgcgccgcgcccacgggagtcggtgggtctagcccacgaatgtttgcgtctcgcgttcacagtcagatacgttcatctcccagtactttatagacttttctagttacaaaaacaaatcgctgaatgctttttttatttcctaaaaaaacccggagtctggtgatgattagatttgtttttgatttgtactaaaaattttacactaaattttttaactgcaaatataattcatactataaagtttataaataaaaaacatatttatgtaaagtttgtagcataaagtctatataaaaagtttatatataaaaaagaatatatgtagaaagtttccatgaaaataactcatataaaaatgtttccactaaaaaggctacagagaaatactataacgaaaaaaataaattcggaaaagaaaaggattgagaaaaatagaaagactgatacataatgtactagagaatcacgcaaaggaaaatagcggaaaatcgaaaagaatcacataaaaaaggaaaaatgggaaattaaaaacgggagaaagatactgcaacgacgcgacgcaccaatatcgcatcgctacgtctctcatcctcccctatcctaatctatttgcctgatgtattagtggcgaacgtttgccgaataaccttttcggaaatgggttcatcctccattttaacaaaacgttcaaattaggtcccataaaaatatcgatggctgctttaattggtgaacatgtcatcttacaaatcctactattataaaaatacgaggcgtttttggcacatcgcactagtagaaaaattgcttttgcaaatgggctaaaaatatttttctaggcggagctccacgccgccggtactttaaggcatacaaaaatatacgattttttttacatgcggacattggccccgcccgctaaaatcacattcgcaggtgagcctctaaatcttcataggcattacattcacccgcctgcaaaaacaatcctaccgaataaaagaaaatcgcttgctaccactcccacccgctgccccctccccctccaatcgtcggctctcctccctctcctccttcgtccgccgccaccgtcggctggctcccctccttcgaccgaatctgggagggagggaggaaggggagtgccgcctccgccgctagccgactcccctcctccggccgaatctggtgagagggaggagagagagcgagctgctggctctccttctccatccaccgccgctgccatccggctcccttcctccggctagatttgggagggagggagggaggggaggggcgccgcctctactgctaccgccggctcctcctccgtccgccaccgccagccagctcccctcctccggctgaatctaggagggagggagggaccgcctccaccgctgccgccggctcctccttcgttcgccggcgccgccgactcccctcatctggccagatctaggagggaggggagaggtaagcgtcgtcggctacaatggcccccgcctccgccctccgcaccaccggctgggagaggagagcaagtgaggggggaggaggggaaaggtgagggagtgaagggagaggtggagggttatgggtggaggagcgaggacttagtgggtgaaggataggaagtgggtagcgcgtggatggcggatttttgcaggcggaggacttaaggtccccgcctgcgaaataggcgggactagctttatggtatcatgaactacttttacaaatgatgattttataatccgtctgaaaaaataaaatcgtaacattgccaaaaaaaatcaattttttacccaggtgcatgtactaattcctgcgcgagttagctctgtctcacacagcttcgcgcgcacaacttgtttaatttagagtaaagtccatcactggtccctaaacttgtaccgttgtgtcatcccgatccctaaactcgcaaatcgatcgttcaggtcctcaaacttgttcgactgtgtcatcccggtccctaaacttgtagatcactcgtttaggtcctccaacttgttcggttgtggcaccacgatccctaaacttggatttgaatatcatctgggtcaaataggacggtctaaagactttatatttaaaaataattcataactttttcatgtgaactctaatgaagacaaactttatatcaaacttgtagcactcgacgcgatctacaactttgtagttgaatttttttttattttaagtcattttttgtcccaaaatgtaattttaaaattaaaattttaaaatctataaacatgcaacaatattttaggaccctaaacagttttaattcaaaaacttttcaactacagagttgtaggtcgcgtcgaaggctacaattttgatataaagtttgtcttcattagagttcacgtcgaaggctacaattttgatataaagtttgtcttcattagagttcacatgaaaaatttatgaattattttttgatataaagtttttagaccatcctgtctagggaccggggtgacacaactgaacaagtttagggaccggtgatggactttactctttaatttacccagtgagcacaataaaccccgcagcggcatcgtcctcgatcggctcgccacgatgacacttcgatgctttaggcttaaatagtaatatgcacgtgctaacgctacaatgacatttgactttaaaagacaatacatgttttgacaatcaagcaaagaatgatgtaaaaacaacaaactttacaatctaaacatgactaatagcatgaattagtatgtatacaatgcgaggaaggtaaatgttatttttcctcattctgatacatagagtttaagtttaatttgtccaaaatttctctcgtgtttagacttttgtttacaacttatgtagggcctaccccctattaaaaaaaataacacccattatctttctcatgcagcacgcttctccttccgctctcctcccccagcttgcgatatcagagcatccatcaaattcaaccgaaaccagcaacctccaccagacctgaccactcttaaccgctagttggtaatgtatatgagaacatttatcaaaactatcacttaatagatcttaagaaaacaatattttgcataagctggtgcgcaaaataaaaagcaacttcgtcggttctcctcttcctcctccgtccgtcgctgccgtcggttggctccccttcttcgaccgaatctgggtgggagggaggaaggggagcgccgcctccgccgccaaccggctcccctcctccggccggatctggagggagggaggggagagagcgagccaccggctctcctcctccatccaccgccgccgcagccagctcccttcccccggctagatctaggagggagggagagggaggggtggggcgccgcctccaccactgccgtcggctcctactccgtccggtgtcgccaaccagctccccttctccggccgaatctgggatagaccttaagaaaacaatattttgcataagctggtgcgcaaaataaggagcaacttgaacagccaatagagcaactcacataaaacactactaatgcaacgctaggaggggaaattttcccggaagtagtgttgatcactggtcgaaggccaactgcatcctgaatttattcacacgctaaaagaacagaacatcacatttatatgcctttaacagcaacaattttacctagtatcctttgctgctaacttctcccagaccatgcgcctgatatgcttgtttaaatgtatgtcctccaaaacagtagcagctctttgaacaactacactcaaaaggttagtaaatatttaggcatcatgatcatctttatgtagacaacctagagcaatatgccatctagtttcactgtacagctccgagaaccatccatattacaaatggaacttctaagtaaatattaaatattatgtcgacttcatacattcatgaaacactcaggcaatacaggctaaatgattggtatctttttaaatgtgtacagatattacaattgcaatcatacttggcacattaaaggtttatttttttgtgtcgattggatctttcaaatagtaatcaaagttaatgaagacaacctgatcacctcttagttagaccatgaaatcagtaaaaccctccactccaaaactcatgaatgcttagaggtacaccctatgcatgggttatgtatatgttgtgtttctggtggtgacctaaattagtttcagattacaccttcagccaaccttgagcttggacaagtccaagatcagcttttctatagacttcgctcgctacaatttagaataagagtaaaataatggtctgctgaacttctgaaaattagcaaaacttctgataattgaaaagacactgctaagacatctattttcagttatctatttagagggtagagaggtattgcaaattaaaaaatatatgagcctaaagcattttaacccaaattatatatcaatgtaactcagtaacaagcttgcaagaatgaagcatttaatagcaaaccataagaaattatttatttgaactgaaagccttagacttttacatgaaaacaacatacataaatttcaaacaggagatgcacacagaggaaacaatattagataatatatattcatggatccatatatttggaagtactttttttaccaccgtattcagataataccagatcggactttacgctgaatggcaatgtgacatacatcagaagtgtttttcaccagagttctcagttctacaacgatattaaatttagaaaagaaagcaaaccaccaaaatagttcgccaaagatcaagttaattttatcgaaaccaaacatgactgatgcgatgctaatgtaaaccggctaattgcaaaaaaaaaatgaagtagcagtgtttcagtttagagtaaggaatggtacgtcttctatctggtactgcagcaatagaaagctagtaagctagcactgatcatttcatctgttaatcatgatatgtacataattattcacatggttggcatatatgcatattttgttgctagtttggaacccatttgttatcatacatatttttttatatctttctgaaaatgagtataaaatgacacgcaattcaattttgcatgtaactatttattattaatgaacctgaaccatcaacatatttttgttgctgtacaactgggatatttaatgcttaaatttttacattttggtaggatgtattcttttctatgtgctcttaaattgaaaaaaaaaatgcacactcaaaaactgaaaaatacataagaggctttaaacactccattatagaacatgttgatcacattttagtccatactcacaacagattaaggttttccagcttttgaggcataattacattattacataaatggataaacatgtactgttaaatccaatcttgcagctaggccatatgttcttaagaaattatatatagactatacatagttatcatatatgacatgcacagagaaccgataagaactgttaaaatggtaaatttgtcccattgagacagaagaaacaaatataactgaaaagtggaggccttgtgcatctgcaagaattgggcgaataaatgataggactgtccattcatagatgcgaagcacaggctttttgggtagtttatgccaatgcattcaagacttcaagcacctaatagcaatatatcttaatatatgaaagttgaacccccaaaatgcaaaattacagcgccatgtcatgcaggaaatatggaccgtccaattttttgctcagaatgtcaagagccatcggatcctttaatcagagaaatctcttcccggtacttcaagaaccttctttgtaaaaagaatccttccatgtccgtgggaggcagggaccccaagccaagccaagcgcctctcctgcctgtcacctcatggactccgcatctgccgccacctccctccaccttgctgccaccatcgggtcgtcctcctccccataccgagcgccaccactggaccatcttcctcccatgcaatgcgccgctagaatctcctcctcccaatgtccagtggcgagatcctctcggatcccaaacgatgggagtgaatcgcctcctcatccgcatccctactgccatctcctcacttccaatgcccatcaccggagccaccacatccatctacccagatccatcaatcctgcactaccttctctagctagactaaattctttttctggagtgaaattaagctgaggtatttacttcttaatacttgggccttcattctctacattttatagatcgtgaccggtagatgaaaagtttcaaggaaccctataatacatataaatacattgctgaatatgatagtgcaaatcaacaccacgagtttctattttcttactgacataactactgcttagcatgttgttcttcaacttttcagggtgctgaaacattctcatcatttacccttttttttaggaaatattatataaataatctcagctggctgaccaaagcttgaaatttactttcgaattgctttcaactacaaaacataaaaacaaactgaaatcaccatgattgtgtggagcattataggacgagattgggtggaatgcagacagatttataaaactgaaacaataacatatcagaatatagtagaaaatttatgtcttcgtgatattgggtcaaagtaccagagaaagtgagtaacattaatttgttttcgcagagtgccaaaagagctaccaatttaattattgatggcctgagaaagtattaacttagtcttaaacatcatatattcgtagttgcacttatactgctccacgctaccacttaatgcttatactaagttaactctttgacaagtagtgctactgtaactggtagacaacccaaaaggtctacaactgaagtcaagttgcagttgcacttcagttgtaataagccatggtagatctccagttattgaaatcttattgccttattggttttaaagaaagatcaagtaaacttggagcaccataaaaaaaatccatatcgaatatactgtaatctatagaagtcctaaaagaaatcattatttacttaaaatatggttcgaacatgcaggcaataatcatactgatttttaggtgaaatgttacatgccacagctactttgtggcattgatcattgccatagtcatcacattattcaccgcaatattaatgcttccaatcttttgagtgacaaccgaggcatattgaaaatagccgattttggcctagcaagtttctttgatcctgaacaaatgtcggttcatcgattagatcatcagaaagaagattcccattttgttgatggttgatgaatgcaaagcatattaagaagcacaagttaagattataaggccactaggaaaggaagtgctccttatgaatcttcgacttatgttgttgatatttcgtaatgcaataaactaattctgtttaggcgcacacagttccgatatgcggctgtgacagcacatattcagagtatcaagacatccaaatttgcaataaaagcatttggtacttcagcccctatcagtattctttctcatgtctgtgttcctgcccttttttttacttccgccccaatcaatattttttctcttacgtcttggtaaataaaagcatttgcaaagaaaaaaaatcccaagttctgttccaattaagcttaaatttttttcaaggatttatgaatgatcccatactcggagtcaatgctttggtccttgcctggttggattgtaaacgtgatttttttcaccaacagaggtgcttgaataatcatatacaaggggccgtgtttttattgtcgtactttgggaaccaaaagtaaaaggttgatcatcattttctgtatatgataagtgaaagcatctagcagagaaagaggttatagtcgtgcgaatgcccgacttatttaactagtatatcaatgatagtaccatcaagagagatgtacacaatatcgtaccaagaattaacgattgttatttctaaaatgtgatttaattttcccaaaccagtaggccaaacttgtagttgggctcatattggtatgtgcaagtgtgcaacatatatggtctctctcttcaggtacctagctccctagtgttgacaataagcttagtaatcagtacaggtatcttgagcgttgattttctctcatgattcaggtcatccagtaaagaatccaaagtggcaaggttgaaactttaaaagaaattctcaccttatcctcaggaacacttttgcagaggttggtcactaccatttgctccatcttttttttttgccaacctaaacacctcaataaggactgacagtcttgacgtctttgccatttttcaaaatctagtaatcatcaattcattatttcagtgcaagcgtgaactgcatattagatggataccttgtttcttatctgaactaaatcaattgacagatccactatcaggagctagaacctaaaagatcatacgcaccatagctttcgatgttaacttctccaatcaaaggagattttgggggaagctcaggtggagatgcagaagaccaggcggcggcgatccatggcctccaaattcgtcgtcggatcgagccatggcccccaaattagatccccgcattcgctggaccgagcaaagatgggagggggcagtggagttggggatgaagaggcggaggcggaggcggcagcagcggctgaagtgacggggaggggaggagcaagaggagacgtaggtggaggtggaggtggcgctggtgaggcggcggcggcggtgaggacgggaggggagaggcggcggcgatgcgggcgtgtgggaggagtggagatcccaggcggagtgggctcgcaacttgccgcgaattccgaagtcaacgactcggttgtccccgcgaattccgaagtccgattacgattccaagtagcatgcttgtccggttcggtttctaccggtatgcccgctttaaaaggacacagcagaggccttcttttctcaccgcaaattccaaatttgtcaagtccaaaattgtcccctacaccaatggcaggcagatattacactccccaaactcatcctcctcctccacccgagaacacgctcgacgtcttcatggatggcgacaccataccgatccacaccaccatcacgtcgtcgcactccctcgctgcccaatttatcaacgagatagcccgcgaacgtccccagggggggctcatcgtcggcatcgacacggagtggcgcactgaccatctgcccaacggcaaaacatgttacaaggtcgcggtgctccagctctgtgtcggccgccgatgcctcttgttccagatctaccaagccggcaacatggtcccacatgagctcgcggagttcctcgccgacccgagcgttcgcttcgtcggcgttgcagtcaacaacgacatgcaacgtctggccaatgattgcaacctgagggtcgcctgtgcggtggatctgagatatgctgcggcggccgtgctcggtcagccggagcttgcgagggcggggctgaagagactggcgctcacggtgatgggcgcccacatggagaaggagaaaaacattacgaagagcagatggggtgagccgacgctgacgtgggagcaggtcaactacgcctgcatcgacgcatacgtgtcctatgagattggccggcggctgctctctggtgaacctatactggccgctccgttgtaggtacatacacgcagggcgaacttgccaccggtgcaatgtttagttcgaatataaattatagagataagtacgatttagagatggaattctaaaagtaaaatagagtcccaaattctagagataaatcaactataacttatccattcttggtctgtcgacacctttcacgtgtgccctgtaatgtaatatcaatcctataatcttcctgagtgtcatatcaatttgctaccaacctatcttagattatttttagtgatgtttatcaatagatcaatttcctttttagccaaccctcgactcttctctattcggagatgtatccgtgttgcttcctttttcatcaacgcagttttgagcacacgagtataacatattgatttggaataaatctcaaattctcaatccaggtatgtatatataccaatattgtgtgagaactcccgtcgggtacagtggtgactacgtggtgagcacactacgtggttcaagtgtctctccttcttttagcttgtgggcatatacaaatttatcatctgatattatataggccgtgcactgtctatttaccacaaagaaaattcgcaatgtcccccctcttcttcacttctataatcgggttgcattgaattgcagtgtctatgtttttttgacgctcggtactcatcaattcaccttctgctgtccctaatctcaaatttaactaatcgagttgagtttgatagggagtgcgggttgagagacatgggtgctagtgtgctactactaaagtgagctagctagtttgtactgtagtacattccacaaagggccgtgtgatctttcaccttttgatgtttggaccacttggccatgaatgctccggtctaaggtgcggtcaaagaatccacgttagattcgagcaaatgcggaggagagatataaatgatccactctaacgtgtggtcaaaaaatcaacgtcatattcgagccaaggtggaggagagatatgaatgctccactctaacatgtggtcaaagaatccacgttagattcaagccagggtggaggagagatggaagaaaaggggtggcctctacaagcttgtgaattgcgtgtattatgcaagacaaggtttcctcacgctagaaaaaaagtatctgcacgaggtccaaccccccccccccacacccccaaagcatgcacaaatacgaccattgaaaacttcggagcgacgtaccagactagagtgtcactgggatggtcgttgcctcaccggggaagcttcgccgacccccaacgccccgatccatgctgcctagaagccccaccaccacgtgcaaccatgaagcccaccagccctcgacaccactcgccgtcttggttggaatcttcatcggcctaggggccctaatctgtgccgcccaaagttctacgggcccaacatgctctaatccatgctgcccgaagctccgttggtcatcgtcccctgatctgtgctaagcgaggtggatctggaggagcagttgtgcccgtctttgctcttccgcgaaggagcaacgacgatggacacatgaggtcactgacagagtcccgtgtgtcccattgaagcagccaaaaccaggataagttgtagcagacgcacaaagaggagtcaaatgtcaccgttaggagaacgctggagagccgtcgccacagtcggggggagagcagaggttggggtagagtatggaaagtaaggaggggaaaggggagagacaatcaaataatgaagggattttatattagtttttggattttagggtgtttagtgtaaaattttgaactttctttctttagagttttctatatgcacaatttcttgatgtttcggcgaatatttactctttcctgtcttatttgttaattcataacctgatctaaatttagaaaacacgaggattaaaatagaaaatattagagactgcacaaaaagttaaagacacaacttaaagctacctggaagagatttttttgatgtggccttgtcctagtctgcaactctgcatgttgtgcacccaccattatttatgacctaatgcttccgaaaagtctcttcagctggtccaagcttggtaattgtaaatgggccatgctggaaacatagccgaaaagaaagctacgagcccgtccacgatttgagtgactaaaaccgtgctaagactgtaaatacaatggcctaaagaactagtatgaatatgcgacggaacacattgaacatagaattcaaaggaactaagcgaggtggatctggaggagcagttgtgcccgcctttgcttttccgcgaaggagcaacgacgatggacacatgaggtcactgacagagtcctgtgtgtcccattgaagcagccaaagccaggataagttgtagcagacgcacaaagaggagtcgaatgtcaccgttaggagaacgctggagagccgtcgccacagtcggggggagagcagaggttggggtagagtatggaaagtaaggaggggaaaggggatagactatcaaataatgaagggattttatattagttttggattttagagtgtttagtgtaaaattttgaactttgatctaaatttagaaaacacgaggattaaaatagaacatattagagactgcacaaaaagttaaagatgccacttaaagctacatagaagagattttttggtgtggccttgtcctacttgtcatgttgagtacccaccattatttatgacctagtgcttcagaaaagtctcttcagttggtccaagcttggtgtcaacgagtgatactcgtggaccggatgagttgagtatcggggtatgttggaacgagggtctacgtagtacgacatcaagcagacaaaagacaaggattatactggttcaggtctcttgtcaggtaatagtcctagtccagtttatatgagattgatgatgacgagaacagattacaaagagagtagacgaaacagatgataccggcgaaatcgtagtcgatgagttcgacgagacctcccggcaacttggctccgcatactccggcttcgtaaactatggtgggtgtgttggcgatgaaattcgatgccttgcacccctccctaggagtcccttttataccgtggatcatcttgacccccaataaagatatgaggatagttgatctagtacggtataacaaaaattctatcccttccgagtaggactttggaaatcgcttcactcgtagagatattttccataatttggaacaaattcctaacgatgtacatggaaacgatccgtgtacgtgaaggtataccttatcggtatattccataagtcgtaggatagaatgtatgccttatccgtaaccctaacacttggtaactgtaaatactcaaatttttagggaaaaatttttacgaaaagttttagttgtgttcttctcgatctttccattagagcgatcttgcttttaatcttttctttttatcttggatctaaattttatttgcaaagttaaaagctctcttttaaattttataaaatccttcttttattctctattttataaaaaaaccctccatcttatttctttcgacttttataaaaccctttatttatcccctgttttatttcttttgaatttataaaagtcatttattctctattttatttatttcaaattttataaaaccctccttttttatttcttccgacttttacaaaaccccttcatttatttttctagcctctaagcgttgctccagaacaaatttcctttggatccttttccaaacatctccaaaatacatgaaataccatctccctagaggcaacactcttcctttagagcttaccattctaccaccaattctgttcctatagaaattcttatatttccctacctacatttatttccaaaatgcagttttaccctccagtaaatactctctcctttgaaatcctctccacccaaatgatccatttttatccttgaggctaaaccactataattccatttttgttggaatttattttggatcaaaccactgtctaaacctaatccagtaaacctttacttcctctccatcgattcaaaatatttcgtggccaagttcctattttgattgaaccacccatttgatttctatggcttgatcccatttgtagcacaagaataatattatcacaaatatttgagtgattgcttttgtgctaggaaacttatttccaacttcctttagcccacaaatgaaccattaaaaatccataccacatattaattggctaatatcctatttatttccctccatttatttttgccaccttcccaaaatttatccaaagttagtagataaatcattcgtatttctttcccttccttttaaacccttttcaatttttaaaatttaaaatattagagaaaatcttttgtgacaactcttacatttggctctttttgaattttataaaattggagcattttaatccttttcacaatttatatctcaaaaataaatatctttgattttattttaaaatatttcaaactccttttactttaaaaactttattttaaattctttttataaagttcaaaagaccctcaagctttcctctttagtttttatctcatttaaaatttatttaaaaccctccatataaattttccttatttttattcctagaaatctttttttagttccttttctaaaatttcaaagagtcaacaactttccttaattttcaattcctccaaatcttatccaaaagtccacaaaaattctcattgtttcctattaatttgggccaaactcccaattcatttggctcattcttttcccccttactcaattttctttcttcctcttgggctaccagcccagccgagctgcccgcctcttgccttctctccctgtgggcacgccgccaccgacaccgcatcaccatgggcgccgccgccaccagccaatcatgcgccgctgccgccgccctgtcgcaccgtccccgccatccgctattgccacgccggcaccgttctgccaccaccgcataccaggggcccccggcaccccctaggttgccgccgctatcgccaatccgcggccgccgccgctactccgccaccaccgctgctaagccgccatcgccgttgtttttgccactgccgcccgacgccgagccattcccctcggttgcgtgtcgccactagccgccgccaaccaccaacccgtcatcgacagccaatcgaaagctgacactcggtgccgtcacatcactattccgagctgacgccgccgtgccgtcgtcgaccaactctccctccaccgcctttgcctcccatataaaccggcgaacccctcccattttccccatccaaaactcaaattctctctctctctctctctctctctctctctctctctcttcctcaaatccaccaccgccggctgtcgtgttcccttcgctcctccaccgtcggccgttgtcctagcccatgcgccgtccccagccgccgccggaagcgccgagccaccggaccgtgcgcaccgccccttctctgcctcccccctctttctctgtggctcaaggaagaagaagagataaaagaaggctatgacgagtgggccccacttctaaatagtaatccttttctttatttgatttatttcaaattccaaactttagacatccatatctctccaaccgttgatccaattccagaatttttttgacctaagttcatctagtttcaaaccctttattttgatactaaatttcctatttttaaaattttatttaaatttctttatttaaatagcttttccttatttatttatttactttctgattttaaattattttaattaacctttaaaaattattttaaatttatttgatatactttatatccctttaattttaaatttcttgttttatttaaaaacctttttaaaattaaattatcctttaatttctttaaaaccccatttctttattttaaaataccattttaaattttatttctttaatctatttgaaacccctttttgaattcaaattcctttgatttatttaaataccctttttatttctaaaccattcctatactatctcattgccactaaacagctactgtggacactttacgccttctgtggagacgttcgcgtggtctcaaactcctacatcaaaccgttggtcgtaaaacccggcataacctaatcccaaggttgaagtgtttgtctttgcaccccacgcctcaacgcatatagcggtcggagccttactactctctcgacctccataacacgctgcacactaagtccttgggctatgtgcaatcctagccgctctattgtcactcacgactatagagtaacactgttccgctccacacaaatctcctaactcactagtcgttgtgctgcttgactgtagcatcgactagacaagccatttaaggcgttatgctacccaacctcagcatcggctaaccaaacccaaatttctagccgtcgtgctgcccaactatagcaccgactagaaaccaaatccaccaaataaaccccacctatccaaattatcctttcttcgattttatttaattcccaacctttagaaaccaaaacctctcttttgttttccaaatttaaatctattttgaaccattcctttttccctcgctttgctccaattttatttattccttggtttatcatttctttgtagcatttttttatagggtttatttgctatctttttgtattagtacgttcgaccgtacagcaaattctatcgacatccaaggagcttatgtggacccagatggctacgctaaaaccacaagaatctcgaggcgtgaggcaagacataactaaaattttgatcatatagaaaactcaatataatcttcagtttaattttatgcatgatatattactcatttagcatctcatcggtagatgttaaatgccttcaagcattattacatgaggttatagaaagatacatggttatcattttatgtggtttattattcaaatatctttacaaacttaggaatctggttaaaatgggcatttgagttgaggttgtgattgttgaaagttgtgaatgttggaatttatgatgaagtttgttggtatggaagttttggatgttgacataatttttggtggtttaactggattataattacccccttataccatgggaaatgacatagtttgcgcccatccacacgaccaagtaattggacttagcctagtattgtcccactatatgaaagactgttgggtagctcattaggagcagttttttggggtgaatcatgcgtaaggtgtttgggcggcatgattcacaacagtgggcttcatgaaagtgtgacgatatagtaaccttgcctaggcctggcaagagttcaaccactatgatgaaccaagaccccactgtgcagtaactagtagtaagtgggactctcgaacggctatggtgtttacagcctttgcaaattgttctcatcgtgtgggtaaagctaggcaaacactacatagtcgtaccgtattcgaatacaccatgctcccgattaaggagatatgtcataagggtgattcctactcctgaagtataagtagttttaaaaaataaattttgaggataagaatgatatatgattttattactcctttatttactcattgtttcatttattcatatctcttcacctttaattatttataatatgtcttgctgagtacataagtacccactcttgcataatttaacatatagagaattgtgctaataagaagaccagaagatagcgaggtctacagcaacaacaagtttttctaggatagtctagcttttgcttgtggagttcattagttgtagtttagtagtttaggagtttggattttccttgtattttcaagtaaggatgtattagtgtggatctcttcaacctttaacaattgtataattaggttgtataaacaaatttgtataattaattgaaagctgttttgtatatcaatctgtgcgtgatcgaaatcctagacgatcacgagtggatatttggggcaccaggcctaaattgggtgtccccacaaaacatagccaaaaagaaagctacgagcccgtccacgatttgagtgcctaaaaacgtgctaagactgtaaatacaatggccaaaagaactcaagtatgaatatgtgacggaacatgttgaacatagaagtcaaagggacggttaaacatatactgttcttttgggtatatggcgccgttgagtttttaacaaacatttgactattaattttaataaaaaaatttgtgtagatataaaaatatttaagtcaggcttaaagaacatttagtaaaatcaagtcataataaaataaatactacctccgtcccaaaatgtaagcatttttgtcacaccccaatccggcaccgccgcacaacggcacctgataggagcgtgtcgtaggaaaaatggcgcgaaccgcttcctacgaaaccgcgatctcggtaccagtcccaggacatagtgctggtacccacggtgacaaatatgaatcattgcaaatccttaaaatagatagaggacttatttaccttaacttaggttgcagctcagaacaacccgagaatgcaaccgacgacacggacgaggaaacaccaacaacaacagcagcagcggaaccaacgaactaacacccaacaccacaggcgacggctgggaaccaggacgaaaccctaatcttcacttcactttatcttctcttcagagcggaggaactatatatatatatttatatagagcaagggtgagtactctcgtactcagcaagtcacgggaactgaggtgtttaatgcaagcttggaagagagacaaggttgttttgcaaatcttttatttgaagatattttgaaaacactaagtggtttatttctttctaagtttgggccgaaaagagacttgcgtctcgtttcgactttaagagatgtttttcaacagctcatttggtaatgtaccgacctcccgggtcagatcattacttctcggctcccagagccattccacttgattaatcggctcccagagcctttttcattttctcggactcccagagtccagctgcccagcagcacaacaatccgcttccactcgggaagcctagtctatgatgcccacagacatcccgaatcacacagattcgtttctgaccactcaggtcatccatctgccacataggctgattctggttacgattcccacaccacaacaacttttcacaaagcacaggcaaacaaatctacgcaacgggaaccaccttacatccgcccatgaccgtgggcacggctgttcgaacagttagttaacctctgcagaggggtacactttacccacaagacacgaacttactccagacactggccggtgtcagaggttcgcgacaaagcctttcccaagccgacccagggatacctcatgccacatagaaggatcaatcctcacataaacataggccattataggtgttcacaattcaaactccaaccacctcgatcggtaattcagcaagcttctcgttcttgcattaccaggaacccggtttgtccgaccccgccccggcgttcccaactattggcatgcgaggtttccctgaaccgactagttacttagccagggtgtcccattccaccttgtggttgcactttgattatgttcgatgagtttcccacaggaatcggtccttatatgcgaatacgggacagtgccacataggcacaacccccgcatcgcgagttttcacaattaattttatttttaaacacaccgacaccacatatcgggttttgaaggcttcacaaacccatttcccaagttttcgacaaacaacggtgtatgtgggatatttggtatatgcgctcagagagcacgaataccgaggtaccacaaggatggagcgacaaggaatcagggtagtacgacctacggaaattagtgcgactactgggtaggtccgtcggtttggcacgcaaaccgaggccaagcaagttaagtgtgtgattctaataatgcaagttgcaaacaaaataataatgacttttcaattataggggcaattgatcaaagggtgacttgccttgctcaaggccttcacgaagcttcacgaatcttcgagaaaacccgcgatcgacgaaaatccgcaaccgcaaccatacgcaaacaatcgaaaacctaaacaaaagaccaaagaaggatcctatttagactaattaatagtgccattaaatagatctcaattttacggaattactggaagtggaacggaggcgatcggagctacggatcgagggatatgaatttggaggtctaagtggattttctggacaaggaaatgttttgtcggaatttatggaaataatattctcaagaatattattgacagtcactgaccaaggaaaatgattcatgaaattttggaataaggaattgatttctgaaagagggggaaatgatttattgaatttatagaaaagagaaatatttgtggaatattggaaaagacattctcaagaatatctttgactcattgactagtggggtcaacaagaaggtgagagagaataaaattgagagggagcaaatttggacttgtagctcatgagagatggacactgacttggacggagggaggaaatatggacttttaggccgagcgtgaggcgcggcccaatgggttgaaggaggctcggccgagccattgggccggcgcgggcgcaaggaggcggcccattaggggcgcgcggaagggagagggggcggtccgggtggaccgaacccaccatgcgaggtcccgggtggggcgcgcatgtctgcgacatggttcacggagggatgggcgcacgcgaggtgcggcgcaagggtttcgggtgagcgcggttcacgcgcgagcaccggatggaccaaggatgtggcgggcccacgcgcagccagttggtgcaccgtggaccgtgcgcgcgagggggggaaggaaggaggcggctgaccggctcggctcggtcaaagccgaggtggcgccgacgtggcgcctacgtggcagccacgcgggccggtgggaggaggaagaagggggcgcggccgaatggacggcggacggcggccgagttcaccggagcaaggcgctacctcaatggaaaaagaaagcgcaccgggggagggaatggacgagaggaagcgagccgacggctcggattcgccggaaagaggccggaggcggcggattgcggcgacgcgcgccgctggcgagcaaagggggaaaacggcggcggtcgacgagggatcaattcaaggcggtgggagtatctccggggttcaaggagttcatctccggcgttggatggggcagagcgacgtcgtggagatctggcgacgagcggcagcctccgggagcgagcggcgacggtggcaagcctatggcgggtggtggcgaggctaggggctttgtccacgcgcgttcgggaggactaccgagctaccgcgcgagctaaaggaaggagggggcaagcgggaagggagaacggagggaggcactaccgagccgagacgggcgctgtgacgagcggccgacagtgcgggagcgagctctccggcctcgggccggggaaggggaggaagatgggtgcccggagtcccgcgtcacgcgtcctcgcacgcaccggtcttcccggtgctcggcggcggacggcgacggcgagagcagaggaagggcgacaatggtgcggtggagtaggagtgtgaagcgggagggattgagatgggaaggggagctcggcttcgggttttataggcgcggggtgaggtgatgtcggtttgggaggggagaaccgaccttggcggtcaagcgctcggctggcggcagcggtggtttcgtgggcgatgcgaaagcggcgacggcgtggatgcattgggcggcgaaggcggtggatcgtgcggcggaaattgaaccgcgggagcgggaggagcagcgccggctggcgcggggcgagctggcgctgggtcaaggtgggggcggcgagctggcggtcgcgcccgtggtccaggcggtggcaggcggtgacgccgatggtggtcggggaaagggaaaaagaagggggaaaaagagaggctcgctccaagccgattcaggaagggagtaggagggagagggagagctcggcctccgggttttagcaggacgcgcgtggagcggctcaggcacgcgcgcggggccgtgcagctgtgtggtgcagcgcggcagggcagcggggccgggcggctgcgcggcgcaggcgcggcagggctgacagcggcagcgaccggccggtcgacctcctcgcgagcgagcgcgcgcgacgcgggggtgcggccggatttcgaacggcggcggcggggaaatcggcgccgaggagagggagaaaggaagcagagagagagagcgaggaaagagagaggaagaagagaggcgatgcctctctctctcggcacatgcagcgcacgtgcggggaggtggagaagcgggctgagaggagatgggccggggaagaagagtcggcccaccgagccagagggaggtaaaatagactttttctgaatgattttgatttggagagatttggagtttgggttttgaatctaaatttgatactttgtacacaagggttcaaggagtctaagaaggaaacaaaacgggagtttggatatttttgggattcggaaatgtatttggcgaggattcaagggaagggattgactttcggaatttgatttcagagactcgaatcggaagaggaattttcgaggtggaggattttgatttcgatgagagggaacaacgggattaaattgggatccttggcacaacttagactcgcacacaaagaacaaaaattttcgcaattaggatttttgccgaattagtttttaacgtctcacgaaaagcagagtgttacaatttttagctatgaatttagacacgcaaaataattaaaaaatacttacattttgggacggagagagtaataattaaaaaaaagataataatcaaacgtatcttaaaaagttaacgatgttatatattaaaaaacagagtgaatatatcttttcaggtgaggtggtaaaaaaaatcttgtcatgcggtatctggtggacacgatttattgtataacggagcgtacgggtttcagtatcaacatgctgcccgttataacgtaggactatcatcgctagctacctgaacatgtgaaaggagaggtgttaaagctttgtactataggtcctgtttaaatctcaccctaaaatttttcaccatgtcaatgtttgaacacctgcatcaagtattaactatatactaaaaaataactaattacgtagattgcaactaatttacaagacgaatcttttaagcctaattgctccatgatttaacaatatggttctacagcaaatatttgctaatgataaattaattaggcttaataaattattctcgcggtttactgacagattctttaatttgttttgttattagcctacgttttatacttcaaatgtgtgtccatatatccgatgtgacacggtaaaaaattttacccctacatctaaaggggtggatctaaacaaagccataactattgttagcttaggatgtgtttagttcacgataaaaatagaagtttggttgaaattaaaatgatgtgacagaaaagttaaaagtttgtgtgtgtagaaaagttttgatgtgatggaaaagttagaagttcgaagaaaaagttggagataactacggcccttcccaacaattgtaccttgtcttgggggtctttggctttactatcggacgtccgattaaactgaaaaaaattggacgcccgtatatttgtcgcaccatattctgatcttctctatgtgatgtgggaatctctgcatgcatgtactccttgtacttttctcttctttcttctctctcatgggttggtgtacctcacatctatactactttttctaatcaattttctaaatgatttttcttctaaactattgatccaatttatgatgtgattataccattgtatttattttaattaaacctttataataagattcggcatgaccatatcatgagaaaattgataatattttttattgaaacatttttatatactatatgaaacatcgaggtgtaatgattgaaacatgacataatactactgaaacatttatataattttttatataatacatgaagcatcggggtgtaacgattgaaatattacataatatttactgaaacatttttatatactacatgaaacatcggggtgcaacgattgaaacatcacataatatctactgaaacatccaaataatacaatgtgcaacatttacaaatgaatcaacgaaacatcagaataagtcacatccacataacgccacgtacaaacattaaataaaaattgattatagcatgaaaacttaaaacgtgcaacatatttggattccaactgaaacaatttcttttcacacgtgaaacatcaaatttgaatggttgaaacatatatattattttgatcaaaatataatcatgtgagatcttattatgaagatttaattgcaatgagtacgatggtgtaattagattcaataacagatgagtaatttaaaagaaaaaagtattcaaaacttgctaataaaactttatcctttaaatagcaatgaaagagtacatatagagacacatactatgctgcaagaaaaatagagcacatgtagaatagcagcgtccgattttttttcaacttagatcggtcgaccgctccgaaaaagtttgggactaaactcggccttggtgcacacgcgacactcattacgactgtgggcttgtttagttcacgaaaagaaaatttctgggtgtcacatcggatgtttttgaccagatgtcggaagaagtttttagatatgaataaaaaaactaatttcataactcgcctataaaccgcgagacaaatcttttgagcctaattaatctatcattagtatacgtgagttactatagtacttatgctaatcatagattaattagactcaaaagattcgtcttgcgatttcctccctaattttataattagttttataaaaaatctatatttaatgtttcatgtatgtgttcaaagatttaatgtgatgtttctagaaaaaactttatgagaactaaacaggaggcctgtgtctgcacctgcgcgctcagaccgtcgactcgtcccacgctatcgaaccagtagccattagccaaaataaattggccatcccgtcgacgcgatcatctgctggtgctggccactgctgggtcgcttcagcggttcagccgcgcgcccgcgcctgcggccgctcccacgaatccactatcagctagcgcggcgcccaactgcccaagctgtccccgactccccgtccactgctcggcgcgtggcgtgcagaacaccacgtaatctcgtataattccatcgccgaccagaatcacgcgcaccggtgcacggtaccgtactacggagtactaccgtatacggagtacatagtaggactacctctgtcccaaaataagtgtaccttgtcttatttgaaaaatttatgaaaaaatgaaaatatttaataacacataaagtactattcatattttatcatctaatagcaataaaaacattaatcataaaaaattttcaaataagacgaatggttaaacgttgaacgtgaatagtgcaaaactacatttattttaggacggagagagtatataccaccatattccacgaatgtactgtcgcaggattactaacagcgacaaccggtggttggattttatctcaactccacgccctgtaaacacacatgttaaaagacggagggagaggtcgttccacatgttcttgcgtttggcacgaccgtctgcctgcgccgggctatccaatcccaagtccaccgcatggttttcctaccccggacttttgagttttgaagcgtaacaaaagtccatctactggtgccgtcaccatcacagaatacaggagattcacgcccccattcggcagtagaattactagtagttacttcctccgtctcataatatagcaatgtagtaccggatgagatatttcatattacaatgaatctatacactcttctattcagattcgttgtactatgaaaagtctcatcgggtactagattgctatattatgagatagaggaagtataatcattagcagttaaatatttcactcgcatatctcattgacaaggctcaaaacacatactccctccgttaaaaaaaaaggcaaatcctgggtttccgtgtctaactttaactgtccgtcttatatgaaatttttttataattcgtatttttattgttgttagatgataaaacatgattaatattttatgtgtgacttgcctttttaatttttttcataatttttttaaataagacagacggtcaaatgttagatatggaaatcagagtttttctttttttagacggagggagtattttacaggggtttcatcgtgtcatttgccacccgtatcacggattcacggatccccccaacaaacgtggaggcctaaccccagccgcatattcgcgtcccactcaacgacggattctccgaggccgcggggcgcgaggcgagagcggagagcgtcacgacgcgggctctgcaaggccagctcggcagagggggcccccttcgatacaaacgaagccgccgctccgcatcagcagcggcccaagctttcttcctctccttaaacccaaacccatccatctcctcctcccgctgcacgcgggtcacgtcgcacgcgcacctcacctcctattctcttctcttcctcgccaacctcctcctcttcctctgtccctctctctctcgctctccattcccaaatctcctccgcatcgggatggcgcaggtggtggctgcggcagggacggcggcggcggtggcggcggtggggaggccgctgggtggcggcggatctggggccgacgcgctccgcccggcggcgaggctgtcgttcgcgccgcgctggtgcggtgggagcgcgggggcagcaagggcgcgccgcgagtccgccgtcacgtccgtgattagccgcgccccgcgtctcgacgccgaggtgctgccggtgtcggccgacgacgacgcggacgtgaaggttctctctatctctctctcctcgtactcttttgactggtatctcgcaggtcgctagctgggtttatccccccgggtggatttgggatgggatggagtgtttgaggtgtccggttgctttcgggatgaaaagggcgtgaaattggcaccctgtgacggtgaaaccgagtttgtcacatttgggggtatcgttttcgtgcctgtggcggtgaaatttagagggcggagttgctgtaaatgtcattttcttcacttttctccatgaatacgttctcgtgtactttcggttttgatacgtttcatgcatccttaggagctcgtaggctggtagctaacctgttaatcagtagttttattgaatagatcattggaaaatatttttttccttagtaaaagtggccattcccctcttctctttcagctcatgattcatttggttttttagtttctggttgtgtggatctgggttgatgtactattttggaaaatgacattggcacaattctgagttagttagggaccttatcttgtaaggaaggaaaaacttcatacttgcaattccttatcttgtaacagtcttctaaaaaggtgcttttggaaatatttctctgcagagtctgaaatgtgctaatcttatttcccgccactgtgaaatattaaactacttgagcataatgaaactatctcgtcatgggtaggctacttcgaacaagaatgtgctacttctgtgattagtttggttaaaaccattcaagaacgttgtcatttctcaagccacattaagctatgaaaactcccaaccatcaagaagactcaattccttttgttctggtttggtttgaggtgaatactccctccgtcccattttttatggcgcacctttttttttgcaaagaccaagacgtgaaaataggtcacgatttcttctgcatgtgcccctaattaaacactaattaatctagcatgcagatcactcccatcgctcctcttcccataactcacgcatgcatgtagattagatccaaatgtccctgcccgatacgtctgccctctcccgcaaagggtatggcttgacaagccgattaattgtcgggttagttgcatgcggatatccaagcgttagatgcatgcaaagcagaagggcatcatggggaagaaagctacttaatacatgatacgccctgtaatttgggactccgtcgaaaaaaagttacgccttgtaaaatgggacggagggagtattatgcacagattgtcaccgtagttagttactgtgcattgaaagtttcagtaacgtagaatgtaatgctgtaatcttttaaaacatactcttatgacttgaaagtttgttaaactttttggcaataatatctcttttacaggaagaagaaaacttccagcatctcaaggccattcagcaacttgcaacatcagccaatggtgtgtggtctaaaccaaatgtgagacgcaagacaaagatcgtgtgcaccattggtccttcaactaacacaaaggagatgatatggaaacttgctgaggctggcatgaatgtggctcggcttaatatgtcacatggagaccatgcatcacaccagaaagttattgacttagtaaaggaatataatgctcaaacaaaggataacgtgattgctattatgcttgacacgaaggtcagtattatttctttgagtttttgtactctaatgtatgggcggttcacagtaatcatcctaagaacctgctatatttgtgttagtcttacacagagtatgatgtgctcatgctagagtgtttttttgcggtctacgcctcctctggaggtattgtgaggtagaggcatttctagtgttaatcaggaggtataatacatctactgagagctatatacctcctgcttaacactatgaggtacctatacctttcaatacttaccaagtaccaggaaaaaaacttgctggcggctgactctgcccttttcattttcttatgctatagagggtttctcggatcataatggtgttttacatatcagggaccagaagttaggagtggagatttgcctcaaccaataatgttggaaactggccaggagttcactttcacaattaagagaggagttgggactgagacatgtgttagcgttaactatgatgactttgttaatgatgtagaagtgggtgacatgctcctcgtagatggtatgtggatattccttcccctctaatctttaacttacttttgtctcctttgcatagacacacatatgattgtattcactgtaagcaaaacaactcactctatcgaaaacagttaagtgttaaaattttgctgtagggttagaattaattatttatttcatatatggcacgtgctcatacgtagagcagtagatagatccatgagtgatctgctcttggttaaattactaagctcttcaaatatcgtatatgcatttccttctgcccagagttaatggaatttaacatttcctttttttccattcttttgctgcttccctagagctcattcttgcgactactgtgaagtgccaattcacatgaattatgtgtcgtatgagtatgcgtatgtgggcacagtatacaacataattatctgcaactggcaagttctaagaacactgttacctgacattttttttagacatcatttcctagatgaagtctgctagtcttgatttgctgttaacattgctcagtcatgcacaactgattaacacttcttctagaccaccagatatttgtagaaatcttcttttctgctttgagatgattgtgtattctgatataacttcgattctatacggtttcatgatgtgcttttattgatcgatatgttgataccatttaggtggaatgatgtcgttgttggtcaagtccaaaactgaagattcggtaaaatgtgaagttattgatggaggtgaactgaaatccaggcgtcacctgaatgttcgtggaaagagcgcaaccttgccatcaataactggtaatagtcaacattcatttcactgaatattataaacactcttgtttcattctcattntctgaacttgcagacaaggattgngatgatattaagtttggtgtggagaatcaagttgactactatgccgtttcttttgtcaaagatgctcaagttgtgcatgaattgaaggatatctcagaagtataattatcccctacattatgaaaaatatccagcacttattcaactgtcttaatagtgtgttttgttttgattctcaggctccaatgccgat

SEQ ID NO: 9922 - DNA, 12583 bp, Oryza sativa
gtgtgaccgtgtgactagcttgcatgtttcgcaatcgaacagggagttcggatttgttgtaatactcgtgaccaaaaaaccatgagaaaacctttaaaattttatccatcagatttgctttgagatttgtgtatgtatgggatgaagaaataaaaatcaaatgcactcgtgggggattagggttcgatggcgaatttttggttgacggattagctttgagattcgtacatacattggatgggggaataaaaatcaaacgcgctcatggagtctgcggttttcagaacccaatgtggggttattatcatgtagtatgtcttcaccatactatgggtttttaaaattatagtgtaactacaagttagtgatgtttaaaagttttttaagtagacccctacaaagttacaacaattaatttgttatctccaattcaagtgaccctagtattattctgatcgggcccgacatggcagcagcagtcatggtcatggccccctttttttgcaattgccatgccctagttgttactccttgtttgctatatatacatgctatgactatccatgcaaatatatcttgcatgagtgatgagttcccgtcaggtcgtatgctacaacttcgttttactcatccactcgtacgtaaccatgtgttaggagaaagattctttgcatctgctacacaagtttcttgcaactaaaacacgtgaaacgtacaaaggaggagaaaataacatttggttcccccactgtacaagatctgtacgaatactgttatcgtcattgttctttgcgttcatgtctcccatcccacgcgacacatatactttgcctaggcctgtttatatcccacacaaaaaattttacatctatcacatcgaacgtttaaacaactgtataaagtattaaatataggctaaaaaataactaattatatatattatgactaatttgcgagacgaatcttttgaacctaattgctacatgatttgacaatgtggtgctacaataaaccgttgctaatgatgaattaatttggcttaataaattcgttaaatttgtctcccaatttatatgcggattctgtaatttgttttgttattagaatacgtttaatactttaaatatgtgtctgtatatttgatgtaatacggtaatttttacccctaaatctaaacacagccttattcaaagccatcatctagttgttctcttgccagagactgacggtacgttcgttggtatacgtactcgtttcctgcaacgaccgagatgcggattggagtaggtgagatgactcgcatattctaaaaccctcccgtttaagttaatgaatggatcgatcagagtagtactatttaaatcgtcgattagattccataaatcttttaaagaattgaaggacttttgcatcaagtcaaaccaacaggcacgcagagacagacagtaacatgagtctcttacaggtcacagtggcgttgtggacggaggattataaaaggcttggactacgtttgcaagttgctgctgctctgatcgttggatgcgtggcttagctagttggttaatcgcctcccccagatttggcagatttcataattgtttaatgctccaattcctatctgaccatcatgcatctcggctgaaaattttaattagggcgaaagtgtcctgtatcatgtggcgtttgttcctttgtgcatcttcagcgttgtgattttgactttcgtcttggcactttcctgcaagtttagcttcagttgtcaaagcatctaccgaatatagtgacatgcttcctaccaccataaatgcagtactagctctaatctctccttttctatctcgatctttacctagctagctgagataaaaatgttgcaatcgtcgcgggctaactgttaaaaatctctctcatggagtagtattatttgagcttgattgcttgtttgaactcaacatcaaaattattggctgataacagtgtggtctgtattagtatatatcaaaggacagagcactgtattcttatgtgtttcgtccagttttgggtttttctcggtacatatcgtaatcgttcatagtagtatggacgtatgtggctcaatcaaagtaatcattatgacgtctctatgaaagcgtagcatccttttggaagttgtttgcctaaaattaactgagtatgacatatattattatcctcataaacctaatgatttcaattgttaacgacaagtctaaggttattgttttttggagagataatgttactttgttagcagctttaatattgcacatgcagctagatattgcgtaaacaaaacaaaaaaaaaggagagatttcacaccagggaaaaaaaattcgcgaacgcacaccagggaaaatttcaaacgtcgttctaataaatggatctcaaatgagacaaattaatgtcactcttttgcaacaacaacttttctttcttttctttttcctttcctttttgcgagtaataagaaaggcagtgattgatgctcatggggtgtggcttttcatacgtggaacgagtcacatttttgcagctcgatcggagaggagatatataccacacgtcatgtcatactgtcatctattctgtagatgccgtggcgactataattaagagcaagttaaatagtatagccaactatgagctccaattcatctatagttaatctaatagcttattcatacaatagttacatactacattattaatacctggtcccatctgtcattcacacactatgtcttatagtccgtgctacagctggctacaaatctatagcccgttatccttctctctcctcatttatcttcttaaaatatatttgcagctggcttatagcctactattatgcctgctctgagcacctctatttatttagtccaaagtgttgatacagtagtacagtagatctcaactcccttccgtaccgaacaaggactttttttttggtttggacttaatatatttcgccctttaattcctaaggtggagtagatgctacacgcatagatatttctgattctagttatagtaaacatttgttcggtcaataaaacatccatttattttctacagaaaaactagtacgtagtgactgatgtctacgtacgtgatgtaattaaattaccggcgttagcgtggcccgatcgatcgatcgatcgatcgatcaataatgcgcgacgcgacacgatgagtttacgcgagaccagcgaccgatcgatcgatggatggagcgagcgcgtgcggggtgttacaccgaaattaaacatggcaagatcgagcgagaagtacgagtcgcgagcgagttaggaaggggtacgtcgcggttggaccccgaccagggaccgaccagcggcaggacgtcgccgtcccccggctggaccggcctttccgagacaaaaagcaggtgcgcacccaccaaaacctcccacgcacatctgccgcgcacgctaccccctctctctcgccttaaatgcttcccccgcccccgcccagccccgcgccggccgccgtccgtccgcccgcgcgcgggacacgtccctactccctaacccagatccccgattcggcacgcacgtagtacactcgtgagtcgtcgtgaccccaagccgcatgcttcccgatcgatcgatccaacacgcgcgcggctgcggattcacgtacacatcgcgcgccgcgcgcgcgcgcgccaccgcggtttcagacgcccgcgcacacgccgcgcgcggttacagcgtttcgttcgttgatacgagtagtttattgtgagaggttgtggttagctagctcgaggcgcggacgcggtgttatgggcgttgccgtgcactggcggagggcgggcgattcgcttcacatggggggcgagccgcgcgcgcgcgcggaggcggcctgggcggctgcgttgcctgccgcgttggttgcgctggtgcgcgacacggctacatacacacggtaggggtgcaccgccaccgccacggccactgtgcccgcgggtgctttttcttgaggctggcaccggtgcacgagttgtgtgtgatgacgtgttcgattggatatacattatattcacacacctcaggccgggctggctttgacctgctcagaaatccgtgacgaaagcgggcataactatccttgtacccacgcagagctcacctattttgacaaatagcagagatcagtttccttgtacggactcgctcactgttcgtgcttcgtttcgttgtttttttaggggtgtttgtggagcgggagctggacacacagcgctactacgctacgacccctcgctgaacattaaatagaatttcagggttttctccacgcgaaatccctgtcccaaaacagtggtagcacgtaccaccatgcacttcaaacacaacagcaaaaatggcctttgggcttggggtggtatgcgtatgatgcacttttgcatgattgcccacccgagctctaaatttttttgctgagagcgaggaatagtagcagaccaaacggtcttaggtctcctgtcattgtgatcccttttcatgattagatttcctgtactttctcctcctgttgcagggaaaaggaaaacgatgaagagactggagaggggaagaagaagaagagaacaccacctcccgtttcccgatgccccccctgacgcgcagaatgatgcaccgtctccgaatggaaacgccacggggccccacctgccagcttgacccctgctgctgctgctgcactgcacatgttattccccctccgcctccggtgtcacgcacgcacgcgacgcgacgcgatgccgaggcgtccgtaccaccaccgccagcatcagcggccgtcagctcgagatcggacggcacgggacagatggcagcaggcgtcacgctggcgtgtgccgcccccccgccgctaagggccccacgtgccagcgatggaggcaggcgccgtggggtggtcaaagggggcgcggggacggacacgtgtcggtcgccgcaacgtctgaatgttcgaccggtgcgcggcggtttgacccacgtgaccggctaccgccggtgcacgccgctgactcagcgcacccgtgaccgtggaccgtgttcccacacacacacccccaccgtttactgtagcggttgcaattatcagtacggccacctacaggggctaatcactgttctgacagtctcgccgagatctaagcaagggattattttgagattagaagaaggaagaaaaaccaaacaagctaagccaaggagtgggcgtctcatttggggcataaataatcaacttgttcctctcaaaaaaagctgaaatcaatttaatcgaaaagcaaaccaaaagtgtgagagaaaaaaaaatcctctcacccaaccatcctctcctccatccctctatctatctatatccatctctctcccttgcctcatcaccctagttatagctaagctaatagcctctcacacctctcgctctctcactacccctccactaccatactagtagcatccataaatcccttggctcttgcacgcttgcttcctcctctgtccatctccatctcgatcctggaagcgcgagagagagagggtgcgtgcgtgcgtgcgtgctagagccaagaaccacgagcacggccagcgtcggcgagaggcggcggtggatccggctatgtcgggcgagtaccagttccaggacgagctggcgccgctgttcgcgcggccggggggcggcgcgggggagatgcagatgctgccgtcgtcgtggttcgccgactacctgcaggcggggacgccgatgcagatggactacgacctgatgtgccgcgcgctggagctgccggtcggggaggacgtcaagagggaggtcggggtggtggacgtcgtcgcggccggcggcggcggggcgccgccgctgacgccgaacacgacgtcgtcgatgtcgacgtcgtcgagcgagggggttggtggaggaggtggaggcggcgccggcgccggcgccggggaggaggagtcgccggcaaggtgcaagaaggaggaggatgagaacaaagaggaaggcaagggagaagaagatgaaggacacaagaacaagaaagggtgagttaggtcacttcaccattaaattctctcctttttttctccttttttcccttgaaatcttgggtcattttgccaagttcttgatcttagttgctaataattcattaggatgagatcatttagagcttcttttttttgctgatccggtatcaagatttggggccggttttctgtgggctagattttgcttccttgctttgcttggtggtcattctttctttcttccattcattcattcattcattcattcttctattcctcctctttttgttcttttattcctttttaaggtagtttggcaaacgtgtgaacatatctagggtttcacactcagcttgcatgcctcacacactttcttccaaaaaatttaaaaccttgccataatgttttattaaaataagtcgtttaatgtatcagctagcccctctgatctttgttttgcttttcttgattacctgcctgctactgctagttccttcattcttcacaccttcttccaagttccaacatgaccaaagatctttgtaacttttgtctttgatccccttttaccaaagattatgcccaaaaagggtagataggaataaaagaaaagcaaagtagattgatccctagacaataagcatgccagtgttatccaccaccccattctgctacttggatcttgccagcagcttccttttcagtgcaatctccagctaccaacagtagaatccagtgtgagccgaaaaggggacgccatcacgagaaagctaggccagtgccactgtgccagacagggtgtgaaccccctaaccttgtgtacacacacgctcgcgtagtcgcgtgtgtctatccagtttgaacgggatcgatcccggccgtggccgtcgcttgccggacgacatacgaaattccgccgcttttgacgcggagaaacgtaccgatcgatcgcgagctgattggtaatatggtatggattggatgggtgcaggtcggcggcgaagggagggaaggcggggaagggggagaagcgggcgaggcagccgcggttcgcgttcatgaccaagagcgaggtcgaccacctcgaggacggctaccggtggcgcaagtacggccagaaggccgtcaagaacagcccataccccaggtacgtatgtacagttacacacacgtatagtacgtgactcgtagctgtgcgcgtgtacgtgtaccggccgcagtagttgcaccggacgcgcgcgcgcgcggcagaatgcgatgattgcaatgatctgatatatacggggttgatttttttgcaggagctactacaggtgcacgacgcagaagtgcccggtgaagaagcgggtggagcggtcgtaccaggacccggcggtggtgatcaccacgtacgagggcaagcacacgcaccccatcccggccacgctccgcggcagcacgcacctgctcgccgcgcacgcgcaggcggccgcggcggcggcggccgcgcaccagctgcaccaccaccacggccaccacggacaccacggcatggcgccgccgttgccgctgggctccggcgccgccgcgcagttcggccggtcgtccggcatcgacgtgctgagcagcttcctgccgcgcgccgccgccgcccaccacggcatgactacgatgggcggcgccgcggcgacgacgacgacgagccatggccttaacagtgcaatcagcggcggaggcggcgtctcgagcgagacgacgagcgcggtcaccgtcgccgcctcggctcagccgtcgtcaccggcggcgctccagatgcagcacttcatggcgcaagacttgggcctcctgcaggacatgctgctgccgtccttcatccacggcaccaaccagccttgacgcgacgaccaccatcaatctgaagctgaattaatcatcagactagctagacaagaggtcatttggctctcgatcgatcatgctgtttaattaattaacatctcgttacatctttttccccccaaatgatcaccttctgtttcgtttcttgattttgtttttttctttcgtgctgcgagatggtacagggttttctactgggtctcgtatcatttctatgctcttactagctagctctacctagctctagtactaagcacttcttgtacatgtaagcgcctaattaattcccaggctccagcattgcaccctgcaggttgcaggactgaccatacgagccatgataattttatgcaaactttacattgatcttctcctatatagctccattaatggaagagtacgagtacttcatatatatgcacatatgtttaattggcatgttgttaattaactctagctagctagaccaatcgagctaaggtttcttgcagggtggtcaatcatgaatgaattgaattttgaatggcgttgattagtttctctgatactggctttcgcttgtcatgacgggatgatgattaattgggggttcgttgtttcgtttggttggtaggaagagttgttaaggaagaaaagtagcgagggttgttttgctgcttgtttctttgcgagtactggtcaggtcgttccaaggctagtactagtaccactactactagcattacgactgatgcatagtgatgtaaacctgcctagctagcgaccgtgcatcgctgtgtgcatgtcattgtgcgtgtatgtgattgatatgtggaattaagagctttggggcctgattagctagcttgtgcatgtttgcttacatttatatatgggttctaagtatcagagataatcatgcattatatatattcatgggtgtcgcagtcatgcatgtttgtcagaattatggcaaagagatgatcgatgcacctaatctctaactctaaaacgtggctgctgaggcgttaggggttttggacccctctgcctcttacagtgcattgatgatgtgactcatgtactaacaaaggtagtagatctaaaagcaagtcaattaatgtgtctaactggtttgctatttcgtcggctacctgattgacaatttccagaatttggttccatgcgagatcgatcaaggggccagcgtgtgtatagactggtcatacacatccagctgcatgaaatataaaagatgtagtacagtatttgttttatttgggtgtacatgcatggagtaggtcagttagatatgatgacacatgacatttcagtggaaatggacatccttttttttaattttgtttttcctttccaatgctaagctagctatccccaatattattaactatatatacgtatattgtatatgccttcaacaaggaaaatcatatatatatttttcatgctttctatttataatttgctcaattcatgtatgtgctatgaacatgtggtgccaggctgctagctagtagctaggagtacatgctgataaccggcacatatatttgcgtgtgagccacgtgtaaattaatggaagagactagatatatagtcttgcatccttatatgtgccagctgatttaatctacatataaggatattggcacacacacacatatatatatatatatatatatgtgtgtatatatatatatatatatatatatatatatatatatatatatatatatatatatattcacacgcaattaatttacacgtgtaaaccaatttgaaatgtttgattatcaagttggtttgtacgagtaagaagtcaaacatttcaactggttacagaattacgtactgtgtccagccagattaattacacaagtacatgatctcaaacccaaggatttttggagtatctaattccctagctagataagaactggctaaaaacaattgtagcttttactttgaaacacatgtgacagaaatgtcctttctttaattaaaggctcggaaccgagagaaaaatatatactacactttgggcgagtggtgaccatatcccgttaattctggtaaggcaaaatcttcttgtactgtgcatgcgattgtactttagagacttagattcatcatctgcagaggggcatgcatacatgcaagcattatctcacttgcttgatgccatattgtttaatttactactaatagcagtttagtcaacaaggagtagccaaggacacctctggaccatatgtatatatactaatcgatccaagataactagattcatggtcatggacgcaactttgaaaggagaaaaacaaaatcttgtgcagcttttaaccaacagcagattctcacggcctcattcaattggcaggtacgtaccctcaatcttgtactaccagagggtgcccaattgcatctcttcaatttggagctatatttatatgtgagatcgtgcatgcgatatactcactattctcttcattatgatcagctgatggttgttgcgtgagtaagaaagatatcgatatatgcttggactgttacacatgtctacctagcttgtggctggtagattttgttttctttgtgccttttccagccttagcttgctgaattttcctatagtactattttacatgtgatgggcacaagtggatggatcaatcatgcagtatatgtaatttaattttgactataaccttttgtgttgggatattagaattattacgcatatatggccaaatcctgataggcatcagagaaccagacaacatactagaaggtcaaaagcattaaaggccacagcgcaaggtgtgcaccaactcaccgaacgtttatttttccccggcacaaaagacaaatacggcgtagactcgtgttcaaagtccaaccctgaatatacatgtaagtcaataaagatacagccgaaaatactactatataaaagcgtataatgctagttcactggccggagaaattaagttacaatacattttctttacggggaacacaccctttgttgtttagttcatcaaatacaaaaatccgtatataattaatacagtaacgttcattaatatgaaatatactgtggtttttacatactacttcttgataatgtttaatgtgttaactaatcgtacttacgcatgatgcattatgcatgcgcagatctctttgactgactggttaaattagcttattggagccctgggcttgcaagctgccactgcatacatcagctcaatagtgtgtttctagattaagtccaagatatttaatttatttccaggttagcttaataagatcatctgaacaaggcttaacacggatagcagcaaccgtcgcatcgataattaattgggctgcttagcaccaacaaactagatagctatcgttccatgcctttgaacacaagtgatatgatccaggtcaagcccaccgttataactccgcaatggccactcccatgcaaacgtccaaatactttggcctgctagatgccgatacacatcaaaggttagggaggactagcttgcagttgacaaagaaatttgaccggtcggtcaggctgatgaaatgaccggtctcacaatgacacaaagatagggagaaaaagattgtggctcctatcaggtggcataatcagctaaagtaaaagccaaattttaaattttcaaatttaattttaagattgatttttaaatatttttaacttaatttctttttcagcattggtttttaagtcaccaagaatacatatataaaatttttatctacaaatttatttttattttctaatagggaaaaaagccaaacgaataattagtactggtactgtaacgtgtgaagacatacatgatgtgcatatatcacttgtaagaacgttttttttcccgacggttctatatcatccctgacggcagagctttgctccgctgagagaaagtactcccggtaatttcctggtgattttcatgccctgtcaggaaaaagttgggtccactcgggtgcagtagctgcacttgctgcatagccaatccgtgcagtaccaactgtttcctcgtgcatcacttgcggctaacgttggctgtgctgcagtgcagccagtgcaaccgagcattgcagagacctctgtgctgttgccttatgctatttgtagtgataccaagtattctatccgtactaaaatataagtatttttagtatagtgacaagtcaaacatttttaactttgattattaatagaaaaaaattaaaaaagattaaccatgtaaaagtgttgttactagatttatcattaaataaactatcatagtataaaactcattttatttaaaacatttaatttttatagatattattgatcaaaatagcatctcggaaaccatgtttagagtctaaaaatgtttatatttggtactaaggaagtagtatatatgtggatcttgccatcgtatcatgtatcacaaactcacgtgaaacctctatttcgttcatgaatacttgtcgattatcgcatcttgtgacttcatatgtatacaagcatacaaaaattgggagcaaatactatgaagcatttttttttggggggggggggggg

SEQ ID NO: 9923 - DNA, 21552 bp, Oryza sativa
taaccacatttattgcggtttggctgagcgtgtcacgccgcatgtaacgcagtgcagtgcactcatttatccggtctgtgaccagtcacagaccggtcaggtcgtgggttaggtggcgacaggcgatctgacgcacgcctcgccccatcccgtcaggacgagggcttctaggcgctcgtccccagctggagctagcgtgttacctcccagagatggcacgttagtcctagtcagatatatgctaggcttcatcctaaccattacaggcaagatgttgtgtgaagaagggcgaacatgcagattgttaaactgacacgtggtggacaagaatgaccgatttgtgaccggtctgacaatggtcatgtcatcagcagacagccatcttcccacgtcgcgcctgcctccggcggaagtggaggtaggtatgggccgtcccgtcagaagatcattcggacaatggcgatgcaaatctccgtccattaataaagaaaagtcaaattggagggagagatggggcatgtggtatccccttgagatataaaaggaggaccttgcccactttgagaggggacgggacttttccagattgggaacccagaacgagggagaggctggctcatactttgtagttccttcatacacgaatccaccaaaacacaggagtagggtattacgcttctcagcggcccgaacctgtatacatcgccggcgtcttgtatggttcctgtctcgcgaaccttccacagattgggagcttagagtctcacccagggtccccggccgaaccggcaaaggggggccagcgcggtctcccggtgaggagccccacgctccgtcatctggcgcgccaggtagggggctctgcgagtgatcttctgagctcttgcactctttcgtgtgcgccaagcttttcctattcagcctcatggctgagcaagcaaaggcgcacgacctctctccgagtgtgagtggcgacgacggggagccgaacccacgccgtcgagctcgtactccaccgccccctccacgccaaagtcctaagcggggggaggcgctcgagagggccgaaggatccgcgacttcgacatccacaggaggtggaaaagagcggcgagatggggagcgtcgtctcctcgtctatggtgacggcagcacgccccagggcgcgctccaagctgcgggcgcgctcctatgtcacccgcccgtcgcccatgacccggagtctccagcccaacgttggctggacgatgtggccaaattggtcatgactgcacggcagcatctagatgctggtgggcggtcctccgccaccaaggcctctggtgctgctaccaccggctccgcgtcgtcaagacgaagggcgcggcgagcggcagccgctgttcgccattcggccaccactccttcgtcgactccttcgacccgggaagatctgcgtggggggccggacgcccgcaccagcatcgagcggcggcgtaatgaccgacgtgctacccacgcaacggagggcgcttcctcgtccagagtgtcacctcaacacggaagcgggaatcagccctccgtgcccccggttggtggtgtcggctgtagagcctttgtggcgagtcttcggaatgtccgttggcccccaaggttccggcccaccatcgccgaaaaatatgatggcagcgtcaaccccgccgagtttctccaggtctacacgaccgggattgaggccgccgggggagacgacagggtcatggcgaatttctttcccatggccctgaaggggcaggcgcggggttggctaatgaacttgccacccgcgtcagtccactcctgggaggatttgtgccaacagttcaccatgaacttccaaggcacgtatccgcgcccaggtgaggaagcggacttgcacgcagtacagcgaagggacgatgagtcacttcgctcgtacattcagcggttctgtcaagtccgcaacaccataccatgcatccctgcacacgcggtgatttacgcgttcagggggggtgtgcggcacaaccgcatgctcgaaaagatcgcctccaaggagccccagactaccgcggagctttttcagctcgcggaccgagtggctcgcaaggaggaggcctggacttggaacccctccggttccggtgtggcagcttcggccgcccccggatccgccgcttagacagggcggcgtgacaggaggaggaagaagaggtcagtccattccgacgacgagggtcatgtcctcgccgagtcgccgtcgagggcgcttcgcgggccacccaaaaggggaggcctgcgagcgacaaaaagaaaaaggccggcgctcccagcagggagcgcccaaccggcaagtggtgcaccgtccacaacacttcccttcacgacctcgcggactgccgtgcagtcaaaagtttggctgagcggacgaggaagtgggaggaggagaggaggcaggagcgccgagagggcaagtccccggcggttccttccggcaatcggcgaagtgaggccaagcagaaggcccctgccgaggacatcgatgacggcgatgatgacctaggtttccaagagcctggggccaccattgccactgtcgatgggggagcgtgtgctcacgtttctcgccggagcctcaaggccatgaagcgagagcttctggccgcggcccctactcatgaggcgacgcgccgggcgcggtggtcggaggttgccctcaccttcgaccagaccgaccacccaccgtgcgttgcccggggaggacagatcgcaatggtggtttcccccactgtttgcaacgcgaagttggggcgtgtcctcattgatggaggagcagccctcaacatcctttcccccgcagcctttgacgccatcaaggccccggggatgatgctccggccgtcccagccgatcatcggtgtgacgccggggcacacttggccgctaggtcatatcgacctcccggtcaccttcggtggacccgccaacttccgcacggagcgggtgaactttgatgtggcggacctcagtctgccctacaacgcggtcttggggaggcccgcgttggtaaagttcatggcggcggttcactacgcctacctccagatgaagatgccgggccccgatggccccatctctgtccatggcgacctcaaagtcgcgctcgcttgtatggagcagcgcgcggaccgcctcgccgtcgtgtccaagcccgagggtggcgacgagaggcttggcacatccgcccccgccgccccgaggcagcggatagtcacgtgcgatgaggtcccggtcaaggaggttgccctgggcgacggcccgtccaagaccacacggatcggtggtcttctggacggcaaataggaagacacgctcgtctctttcctgcgggcaaacgctgacgtcttcgcatggagaccggcggatatgcccggggtccccagggaggcgattgagcaccgtctcgccgtacggccgggcgcaaggccggtccggcagaaagtgcggcggcaggccccggaacgtcaagccttcatccgcgaggaggtggcgcgacttctggaggccggattcatccgcgaggtcatccatccggagtggctggcgaacccggtggtcgttcccaaggcgaacggcaagcttcggatgtgcatcgactacaccgaccttaataaggcatgtcctaaggatccttaccccctgcctcgcatagatcagattgtcgactccacagcggggtgcgaccttttgtgttttctagatgcatactctggttaccatcagattcgcatggctagggaggatgaggaaaaaactgcgttcattacccccataggaacttattgttatacaacaatgcccttcgggttaaaaaatgcaggtcctacttttcaacgtactactcgaatttctttgggtagccaaataggacgtaatgttgaggcttatgtcgatgacttggttgtaaagacgcgtaaccaagaaaccttactctcggatctagcggaaacttttgaaagtctccgctccgcccgcataaaactgaaccccgataagtgcgtgttcggtgtacctgcgggcaagcttctcgggtttttggtctctgccagaggcatcgaagccaaccccgagaagatacgagctatagagcggatgcgcccccccagcaagcttagggatgtgcaatgcgtcaccggttgcatggccgccctaagtcggttcatatcgaggctgggggagaaggcgctacccttatttaagctcctcaaacgctccgggccgtttacttggacggaggaagctgagcgtgccctcactcagttgaaggcgtatctcagctctcccccggttctggtcgccccggagccaaatgaacccttactactctacttagcggcgaccccgcaagtggttagtgcggcgttggtcgtggagcgcgatgaggacaatcctcattccgcgcacccccaccctgtgcagacttggcccgggagagagcagggaggagaggcccccgagccgaacggtggcccaaggcccccgacgaccggagttggccctctgcccgcttgtcagacggtgctaggagcccccgacccccaggaaggccctgaggccactgtgggaaggccgtacctatcgccctttgaccccgaggctaaccctgtgctgactcgacccgggaaagagcagggagaagaggcccccgagccgaacggaggtctaaggcccctgacgaccggagttggccctttgcccgcttgtccgacgatgccaggagcccccgacccccaggacggccccgaagccactgtgggaaggccgcccctgttatcctccgaccccgaggtcatcagcacagaagacaagtgcgccccgcgaggctgcttggacgaagagtgccccagggatgcggcccctagcgaagagaatcggccccaccgaaaggtgcagcggcccgtctactttgttagtgaggccctccgggacgccaaaacccgataccctcaggcccagaagatggtttacgctattctgatggcctcgaggaaactgcgccattatttccaggcgcatcgggtcactgtggttacgtcttaccccctcggtcaaatcttgcataatcgagagggtacaggacgggtggtgaaatgggcaatcgaactttctgaattcgatttgcactttgaaccacgccacgctatcaagagccagaccctcgccgattttgtggcagagtggaccccggctcccgagcccgtctcgatccctgaggccagcacggacccctcgcagctgcctcacaccgcccactgggtaatgcagttcgacggctccctgtctcttcagggcgccggtgcgggggtcacgttgacctctccgagtggagacgtcctcagatacttggtccgcctcgactttcgaacgaccaataatatggcagagtacgagggactccttgccggactcagagtggcagctggactggggatccgccgcctcctggtgttaggcgactcccagctggtcgttaaccaagtctgtaaggagtaccggtgctctgacccgtagatggacgcctacgtgcgccaagtacggcgtatggagcgccattttgacgggattgagcttcggcatgtgcccagacgggataacatgatggccgacgaactctcacggctcgcgtcctcgcgagcccagaccccaccgggcgcctttgaagaaaggcttgcccagccgtcggcgcgacccgaccccttaggggagacggatgcgcctgaccggcccccgaggcccgtcggagtccaggcctcgggacccgaggggagtgctcccagctcccttagattgattgcttggatcgccgagatccaagcatacctcacagataagactctacccgaggaccgcgaagggagtgaacgcgtccatcgcatctccaaacgctacgtgctggtagaagggaccctctatcggcgcgcggctaatggaatcctcctgaagtgcattcctcgggaacaaggcgttgtgcttcttgccgatatccatgaaggcgaatgcggagcccactccgcctcgcgcaccttggttggtaaagcttttcgccagggtttctattggccgacagctctcaatgatgcggtcgacctggtccggcgatgtagagcgtgtcaattccacgccaagcaaatccatcagccggcccaggccctgcagaccataccactttcgtggccatttgctgtctggggactcgatatcctgggaccgtttaggcgggccccgggcgggtttgagtatctgtatgtcgcgatcgacaagttcactaagtggcccgaggcttatccggtcgtcaagatcgataagcactccgcacttaagttcattaagggcatcacggcccggtttggagtgcctaaccgtattattacggataatggcacccaattcactagtgaactcttcggcgactactgcgaagacatgggcatcaagctctgcttcgcctcacctgcccaccccagaagcaatggtcaagtggagcgcgccaatgcggaaatcctcaaaggccttaaaaccaagactttcaacatactcaagaagcacggcgattcatggatcgaggagttgccagcggtgctctgggcaaaccgaactacaccaagccgagcaaccggggaaacgcctttcttcctcgtctacggcgcggaagcggttctcccatccgagctcaccctgaggtctcctcgagccaccatgtactgcgaggctgatcaagatcagcttcgcagagatgacctcgactacttggaagagcgaaggcggcgcgcggccctccgagccgcgcgctaccagcagagcctgcggcgctaccatcagcgtcacgtccgggcccgatcactctgcgtcgatgacctcgtcctacgccgcgtccaaacgcgtgctggattgagcaagctttcaccaatgtgggagggtccgtatcgagtggtcggcgttccccggccgggctccatacggctggccacgggcgacggcactgagctgcctaacccgtggaacatcgaacaccttcgttgcttctacccctgagggggggggtcgggtgtcaggtttcgggctcgggccaaccccgcaccccctcgggcgtgcagggttggccgggggctgccacacatgcacattcttatttctcttatttcagtatttcaataaaagcagtttcaatttcctaaaggctgtatctgtgctgttttttccttttgaagaatcttgacttgaaataggtcactcgtgctcaatcctgccctcgggggctcgggtcggctaaaatcgccaaacggggcccagaaccgagccgtgccccggggcgtggtgaactccgggggggggaatcggcaaaaacccacaatcgggtcacccataaccctcggtcaccacgttcccggcctggccagtctcgacatgtggatctccccaggcactagccctgacccgcgccttttgaggactgggacctgggcacgaacccttaatcaagctaagacacaaaaggaccacggcacagatcatcctcatctcatacacacagcaagatgaaattgacacaaaaatttcttcatttttgattacagattaagttgatctatacaaaaaagaggcccgaaggccttagaagaaagaaaagaagaaaaaactgaagaatggtgggggtctgggggctcaatccgatgcgcccgggtcgccggcctcgtcgtcactgtcgtctgcaccaccggcattgccctcctcgtcggagttgggggcgaacgcgagccgaggggccgagccctcgaagctgtcgacgatatggtcggcggcatcccggacctgcgcgcgcgcgcggtcctcggtcccaggagggaactcatccagcgccatccatggagagaaattggggtccctggcctggtaactcgccaggacgagctccaccgctccttgggcgaggtccctcaaggatgacttaattgtcttctcgagctcctcgggagccgttggagagccccggccatcttcgagaggcgctgggcgagacctccctggttggcggcgtactttacggtctgccctctccagaggcccacttgccgaccggcgcgatctaggcgggagacggcgtcccaaagcatgccgggccctacctcgcctgccaagcgaagggcttcgacctcctcggcggacgagtctagcgcgccctgcagatcggcgatggtgtgttcggcagccgcgaggcgggcggctaagtcgctttcgcccgcggccgccccgccgctgcgcgccctcgcgtccagctccttcgcccgcgcctcgagctcagcggcccgttggttcagtgcggccctctcggcgcgggcaccttccagattacggcgcgcctgctcctcctgcgctgcctcgcggagggacaggctgtccgccagctgttgcgccgcggcctcggccccctcgagagctcgctcccgctcggtgagcgcgtcctcgcggaggcggagcgcggactcttcttcggcgcaggcagcctcgtgcgccgccagcgttgcttcccggatggtgacggcggcctcgcggtccgccagatccctctccacgacgcaggcgctcttccagcgccatggcgcgcgcctcaagggcctcttcgcgccgccgggacgccgcttcggtctccgccgcccgctgttctcgggcagcggcagcgtcaagcacctcctgggcggcgtcgagcttcttccctagctccgcctcccagctcccgtattgaaggcggagggtgtcctgcgcctcgttcatcacggtggtggcaatgagggcagccccccgctcctcctccacttccttggcgatctccgccagcaccttcttacgggtttcaagctccgagacgtgccggcggtgagccttacggcccacctccaccatggcctccaccgagcgtcgcccctcttcgacacgcgcccacgcggcgtcgagctccgcccgctctgcctgcagggcctccacctgggcacttaacccatccaacaccgtggtgtttgcgacggccaaggcctgcagaaggggctctgcgttcagtggggcgatagaaggcgtggggaagagccgccttggagaggatgccacgcggctcgggccgccgatggaagtgccggactcggggatgttccccggacccggttggtcctgagcgtcgcccgagggagtgggcccaagcgacgtgcccgcagcctcgttgccagctgccccggaagttgtcgcctgagcgtcgcccgagggagtgggcccaagcgacgcgcccgcggcctcgtcgcgagctgcctcggaagtcgccatcgcctcgtcctggcgaaatccggctttctcccgagcggcttcctcggcctggcgggctcgggcggcctcctcccgagcggcttcctcggcctggcgggcccgggcggcctcctcccgagcggtttcctcggcctggcgagcccgggcggcctcctgggcagcctcctcggcttcccgtaggcgatccgcggcctctcgccggtcagattcccgcctccgggcctctgcggccgccggatcctcggcctcagactggccgagcttggaatggcgggagggacgcgacgggatctcgctgaaacaaaagaaaagaccagatgacgaacaagatgggtgagtgaaaactcgcgttgaaagaatgaatacagccacgatgggtgagagacgaacctgcgagggggtcggttaaacgaccactttggaggggaaatgaggtttccccgagatggttctgtctcccccatcttgcggggccgcttcttcttgcgctcccccttgggctgcgatgtcggcgcggccccctccgggcgcctgctgctggcacgcgccgccccgccccctcggggaggagatgggggaggtgatcctccctgcttcctcttcccccgggcatcggcagggcggctgctccccgggcccctgtcgcgggacccagaagcacgaccccctcccggggtagattgttcccccttgcggctcccgcctgcgccgtcgtggccctttggagctcgctcctctgaggccccgaccgctatcataatggtcaggatggaggcgcggtctggatcgctgcagagggggaggattccttggggaatgagggacgcctccacggagttgagattcagcacccgttggaccaatatcttgaagtcctcaggagcccagtcccatctcactccctggtgggtcctcatgaggtcttcggacccggtgtactcccaggcgccccgagcgcgccgctggagcggcgcaatccgacgacggaggtagtcgccgtacaccatggcccctgtgagcccctgggatcgcaggcccgccagacggtcgaggacggcgtcatagccatcccccagatctaccggcgcccgccagctggaagcctgtgccgggggctggctcggaagtcggaggcgcgcttcgtcggcgaggggggtgtagaaccagtcgctcttccagtcgtcccacttcttgcggagggcgcaggggatgtagcggttcagcaccggcccccgtggctggaagtagcagccaccaactaccgatggcggcgacaccgactgcacggtgaagaaccaccggaacagccgaagagatgggcgcaccccaatgaacatctcgcacagatgcgcgaagatggccagtatcatcaccgcgttgggggtgaggtgcgccatctagagatcgtagaactccagaacatccatgaagaaagaagaaaatggcggaaccagccctgccattgcaaaggggagaaagaagacggaccgccccgggtagtctggcgccgggcgtccctcgcccagcgtgactatctcccggccggtggcagattccggcatgaagcgacgcggcagcccagcctgcctctcgctcacgatgcgggaaggcggcagcacgctaccatcgagcagagcggagccccatgccatggcgccggaggaagaggagattaagagcgagtgcgtgtggcgaaggtagggcacaggaaagaaggagttagggcgcaagcggcgaagacaaggggaataatggcgaaaggaaggaaacagatcccttcctcagtgcctttatactcttgccaacgctgtgcccggctcctcgcttctcgcgcccactatttcgccccctcgcttctcgcgcccacgcttccactaatcccattcgcccgcttgcggcgcatgaggtggatatgcggttgtggcagtcgagatagatcatatcgtgcgcgcgttaattacgctcgccgaccgaagcgacgttaccatatctccagacgaaacgaatcgtcatgtccagattcgtgtgctactcaagtaatgtggcagtcttgaagagaccgctcattattgacagccgagttaccattgccgatgtgcgtgatttgtgaccgttgggtttctgcccaattgtggagaccggtcccacctgtcaccaggccttaggagtggcgtcacgcccgaccgcttcccttgaggagggcgatcgccctggcataacgccgggggctactgtcggtgacatgggaccgggggtatcatgactagaggcttgaggcagacacaatcgcccacgtggcctggcaccctcgggggacgtcgggcccgagggtgatgtgttcgccctcctcttagtccccccgagggggtcgggccgcacccgcctcggccccgagggccgaggcgccccgacccctcgtgggtttttgctccgcgtgtatgggttaggtgagcacagtagggctcacctaaccacatttattgcggtttggctgagcgtgtcacgccgcatgtaacgcagtgcagtgcactcatttatccggtctgtgaccagtcacagaccggtcaggtcgtgggttaggtggcgacaggcgatctgacgcacgcctcgccccatcccgtcaggacgagggcttctaggcgctcgtccccagctggagctagcgtgttacctcccagagatggcacgttagtcctggtcagatatatgccaggattcatcctaaccattacaggcaagatgttgtgtgaagaagggcgaacatgcagattgttaaactgacacgttgtcacgcccggaatttctatccaaaattccaaacgcttacatgtgtgtgaaccctcgtccaggaatcagccgaggcacacaataacaaattgataatagagtacaaatattactctaattaataagcgaataaaatgtcattacagaggtagatagttcctctcaatcaataaagttctagcagcggaaattaaataaacggcgcagacggctccactccacaggcagcttgaccaaggctacacctaatcctccacaccatcagcctcaatgtagaactcttcctctgatgaatgattgcaaggtgagtatatgacatactcagcaagccacgcagcaaatatgcaagtgcacaggataacaaaggatggcataatagggttccatttgcaaaagcagcatttagcaaacatttgagaatttgataaaacagttaagtaataattaagcaatattaatccaacgctatacaacataccctgttgtataggcccaaccattctgaacaaccaccccggctgcacagttctatctccaaaccaggaatgtaccattccaaaccaggagctaatcaaattattaccagttatagcatcttttataatgatgagaggtgtgagactaatcacgaaagacattgttagacccgcccataaccgcgggcacggctattcgaatagttttactctggccagaggtgtaccactgtacccacaagacacaaccccacatcatgtcaccatgtgcctcaataccaccacggtatctcggaaaggagttgtgacaatacccctcgcataacacaatccactgcagcgcaccttcctggatcataatcacccccttataaacaaggcatggactccccagcgacccccgtgggcttatctccgccacttctcagtctggtgccccgcaatgaaccatgctatacaaaagataaagccgttgcccatgctggcttgtggttggcacgataaatgtttcacaaccgaaactcgtgaaccggtccttaattgtcatgagcacgaccatcaaaaccatgtgctcacaacccaccattaccaggttttagttggcacattaattaattaactaatcacaattgaccatcgtgaactatcaataagccatcatgaaataatagtgagtcattagttatcccataagtgtactaatgtttctaagcagggctaagcaattatatctaatatctagttgaaccaatataaataaagctcaactagtcaaattaatataacccaaggtatcaaggaataaggtaatcaagtacgaaagggccataacaaagaataggtcaattccacccaatgacattcgaaaatagatgcaatagttgaatagaaacaatagctttaaataggatcaacatgctcaaagggttgtttgggatctgtgtgacttgccttgctggccttggaactcttcaaactcttcttccgcgaaaacggactctccggaaacgacggaatctaagcagaaaagagcaaaatcaccaaaacagcacataaacaagcatgaacagtacatgtggatatttttaatgtgtagatctcaattttagaaaaatttagagacttgaaccaactaaatcggagctaagatgaattagttatgaatttttaaagattaaatcggattaaaacacttaaatcggtttaaaattgaattatgacgcaataatgaattatttttgaaaaggaaaaggggatttattgcgtcagcggctagggtttgggtggaccgggcgcacgggcggcggttcacgcgaacggacggccgagattgatccgatccaaatcggacggccgagattgatcgggtccacggcggttcacggcggacggccttgatgacgccagcaatgacgtcaccgacggcggcggcggctcggcgaggcagacgactcgagcggcgcacgctcaccggcgaacggcggcgctacggcacgaacggaggacaccaacgggtagcggacggcacggcgaactcaccgacgaccaaagcgacggcggacgaccaacggacggcgacggcgacgaggttgaaacggcggcggtcttcggcttgacgacggcgacgatgctccggcggtctccgacggcagcgaaagagcggacgaggacggcgacgacttggcgacgacgacggcgaccttcccgagcgacggcgacggctggaacgacggcggcgcacggctggagcggcggcggcgaaggcaaagctagggcacacggcgctagggctactccggcgacgagaggcgaaggcgagggtggcggcgagaagagaagagcacggggatccttttaaaggggctcgggggcggcggcgaaggcccacggcgacggcaacggcgaaggaaactcgcggcttggagagaggaaagccgatccgattcgaactcgaatccatcgatttccaaaccgatttagccgaagtttccaaaggagaaaaggtagaggagatcccggagatcatttcccctctatcaattcagccggaaacggaaaggagcggccggattggaaagcggcggcgacggcagctcggcggcgcgaaactagggtttcggcccgagaaagacgacgggcctgacaggtgggacccacctgtcagcggctgcgagggcgcgcgcgcgcgggcggctgcggactgggccggactgggccgagaagagagagaaggcggttttgggccgactttcggcccaaagccaaaagaagactttttaaaactttttcaatttaaattatttcttaaatgcaattccatttattaaaaatacttccttagctcaaataaatcccagaaaaatctaggaattatagaattaagcaaagtatttaatgaaattttatctggcccaattttatattggaatttattaattaaacttagattttcttttcaagacttttaaaattatttctaaaaattccatttaaacaacaatttatatattttgaattttcagggtgtgacaaacctaccccccttaaacagaatctcgtcctcgagattcggaagaactgacaaacagatacggatgagctgacttcaattcatcttctcgttcccaagttgattcttcttccgagtgattactccactggactttgcaaaatcggataactcgattcctggtccttctctcacttgtttccaagatacggatcggtttctccacataggtcaaatcctcttggacttctatctgttcaagattagcttcttcggtaggtacccttaaacacttcttcaattgcgacacatggaacacattatggactcctgccaaagattgaggtaactctaactgataagcaacctctcctcttctactgacaatcttataaggtcccacaaaacgcggtgccaattttcctttggtctgaaaacgatgaactcctcgtagaggcgtgacacgaagatacacataatctccttcttcaaaactcaaatctctgcggcgattgtcggcataactcttatgacgagattgagccactcgcaatctttcctgaatgatctttaccttttcttctgcttcccttaggatatctgtcccgaaaacctgacgttctcccgtttgatcccacaaaagcggagtgcggcacttccgaccatacagtgcttcgtacggagccatctgaagactagcttgataactgttgttgtacgaaaattctgcataaggtagattcttatcccaacttccaccgaaatctaaagcacaagctctcaacatgtcttccaaaatttgattcaccctttcagtttgtccgtctgtctgcggatgataagcagtactaaagttcagcttagaacccatctcttcttgaagtttcttccaaaaatttgaagtaaactgactgcctcgatcagacactatcttcttagggacaccatgcaaacacacaatccttgccatatacaattccgccaagcgactaccggaataggttgtctttaccggaataaaatgagccactttggtaagtctgtcgactatcacccaaatagagtcatggcccgatgacgttctgggcaaaccagtgataaaatccatacctatttcttcccatttccattcaggaatcttcaaaggttgcaacaaaccggcgggtttctgatgttctgccttgactcgctgacaaacatcacatactgctacgtattctgcgatttcacgcttcatacttacccaccaaaatctttccttaagatcctggtacatcttagtactaccagggtgaatggagtataaagtatcatgagcttctttcagaattgcatcctttaaatctttgttgtcggggacacagattctctcacccaaccatacagttccgtgctcatcctccaagaaaccaatagcttttcctcttctcatattcttcttgatctcttgaatatcaggatcattaatttgggcttctctaacctgatcaattagagtgggcttcgcttctaaggctgcaatgaaacctctaccgacaattcccaaatttaatctttcaaattccttgcataattccaatggcaactgtcgtccttctgtaacattgcaatagctttttctgctaagagcgtctgctacaacattagcctttcccggatgataatgaattcccatgtcataatccttaattaattccaaccatctccgttgtctcatgttcagatccggctgagtaaagatatactttaaactcttgtgatcggtgtacacttctgtacgagtaccgaaaagataatgacgccaaatcttcaatgcatgaacgactgcagctaactcaatatcatgagtagggtagttcttctcatgcggacgtaactgtcgagatgcataggcaaccaccttcccatcttgcattagaacacaacctaacccaagtttggatgcatcacaatacacttgaaaacccttctttggatccggcaaaatcaaaattggagctgatattaagcgacttttcaactcttgaaaactccgctcacattcttccgaccacttgtacttcacatctttctgaagcagtcgtgtcatgggcttagcaatcttggaaaaattctctataaacctccgataatatcctgcaaggcctaggaaactgcgaatctctgaaactgtctttggttgcttccaattggttacggattccacgttactaggatcgacggcaactcctccggctgagatgacgtgaccaaggagtttcacttcggacaaccaaaattcacacttgctaaacttagcatacagttgatgttctcgtagcttctccaatgcaaggcgaagatgttcctcatgctcttctttggttcgagagtagataagaatatcatcaataaagaccaccacgaacttgtctaagtattccataaacaccttattcatcaagttcatgaagaaagcaggggcattggtaagtccaaaagacataacagtacattcgaacaacccatacctagtggtaaaagctgtcttaggtatatcttcctctttgattctcaactgatgataccctgatcgaagatctatcttggagaaaacagtggctcctttaagctgatcaaacaaatcatcaattctgggcagcggatacttattcttgattgtcacatcgtttagtgcacgataatccacacacattctctgggtatggtctttcttttccacaaaaataaccggagctccccatggtgatgaactcggtctgatgtatcctttctgtagcaaatcatctacttgcctcttaacttctgccaactcattggctgccattcgataaggtctcttatggatcggagttgttccaggtaccaaatctattctgaactctatatcccttttaggcggcataccaggtaaatcatctgggaacacatcaggatactcccggactataggaatctcttccaaagttatctggttcagtcttgaccttaaagactcagatgacaatgcatgaacagttacaactcgaccatcatagctgttgagagttacttttctgttggcacagtctatcacacctttatgtctggctaaccagtccatccctaggatgacatcaaggtccttggattctaacaagataagattggccagaaatggtactccttgaatttctattctgacagaggggctacgttgcaaagagagtgcttgattacttggggtactaaccatcaaaggacgtctaagatcttctacttccatcccatgatttcccgcaaaactcatagataagaatgaatgtgtagcaccagaatcgaaaagtactgttgcaggaactgagttaacaaggaacgtacccaaaatcacatctggagcatcttgagcttctgcagccgcgacatgatttacacgagccttggatgctggtacagcagagttattctgggcagggacaaccttcacgcgtcggggcttcggacacttgtcagcataatgtcctggatctccacagttgaaacacaccacgggcttgttgccttgctccctcttggcaggttgttgctgtgctggaactgcaacaggacgtggagcttgattacggatattgttgccagcattgttgttgaagaactgacgttgcggacgaacaacagacgaagaacatccctgtggcatggactggggtcctaaagtaaggcgcggcttctgattatttccctgttgtgtcttgaattgagcaatccgacgtttcttctgctccatgcgattgtacttgtcctcctgacgaatagccttatccactaatttctggaaatcaggataatctccaaccataagtgggtaagaaagctcatcattaagtcctcccaaaaacttctcctggcgttcttcatcattgcgcacatcttccggagcataacgagcaagacgattgaactcgtgcagatactccgtaacagagcgagatccctgagtaagcgacctgaactccttcttcttgagagacactactcccgatggtatatgcgtcttccgaaaagcagcggtgaattcaagccaagtgataggttcagcagtagtcctgttaaggcggaagtgatcccaccattcagaggcagggccatgcaactgatgtgatgcaaatgagaccttctcctgatcagtacactgaagtaaatccaacttcttctctatggcatgcagccaatcactagcttcaacaggattagtggtactagagaaaacaggcggcctcacacgaagaaattctgctaacttgttctgtggaggtgcatgattattcccttggttttgctgattctgaaattgctgcatcatcatgtgcattaactgagtctgttgagcaagaacttgagcaagggttggattctctccattgttgttgttattggggttgttgaggttaggaccattcccgttgctgcgagtgttcaccatctggcatggacaggataagaagagaaaacgggggaaactacttaggacagagaattactttaacttttattgatcttaactgagtttcattattacaaactgaagactctcacaccactaaactcaccaacttcctaacactcagaagcaaacaaacgcatgcacttacatcccaccactgatgtaaataacatgcaagacccacacacacaaacaaacttaaaacaagcaaactaacacaacgatctaagacaacgacttaacaagtcactctagttcttccgagcataggaggtcgattgaaggctcgttcggctcatcttcctcatctttgatagctacccactcaaacttggaattgttgcgcttgggttcttcttcttcatcactacttatgatgatgacgggaggatttgctggggcaacttctttctccaccacgcggatctttggcgccaattgataacgagggacaaacaaagctctcttccttgcggtgagacgaatcctggccttctgcggcggtgcttctcccttcaatgcggctaattccttctccaagcgatccaccttgtcttctagcttgcaaatcttaccacgattccgatcttcacgatcttgagctgctaacacagtctccgcacgactttcatccatagcccacagcatctcaaccaaatgccttgtagtagcatcattctcaattccttcagtctcaaggtaactgccacggtcacttccctgtggttgacgaggatggtagcgatactcagtgtcggccaactgatcactgtagcgatcacggagctctcctatggcgatccttgccacttcctgacatgcatggatataatttcttcctccagcttcgaacatcactgatggaatatcttcactattgctgtttaaggtgactttgacacggcacctctcttcatgacgatcatgacgaatctgggcataaaaaggggcagtcccaaatccaatgacaaaggacatcttacgcaactcctggacaaaaccctcaacaccaaacaggtactcaggcttgtaacgcggcatctaaagacaagtgaaaggagggagttaagacctttatccaattaatagcacaagtttttggattaatttgaataaagttagaaaatcagagtaaaaaggtaagtaaataaagtaaaccaagctttgcgaaataaattaaaacatttggaaacgaggtcacaaattttgtaattttgaataactggtttcaaaagaaagttataaaatcaacatactaaatttattttattgcagcaagattaaataaaacagtattgtaaaacttttgctagtaaatgagccattagtacagtaatagatgtacagtactaataacactggaataaattttgaatgagaaccattaaaggagattatgaagtgcatgtgccattagtttggtttaattaaaagagaaagggaggagaacagttctacttttccaatatttttcagagggcttctatgggtaaccatttggcataacctagggtcaaagaggctctgataccaacttgtcacgcccggaatttctatccaaaattccaaacgcttacatgtgtgtgaaccctcgtccaggaatcagccgaggcacacaataacaaattgataatagagtacaaatattactctaattaataagcgaataaaatgtcattacagaggtagatagttcctctcaatcaataaagttctagcagcggaaattaaataaacggcgcagacggctccactccacaggcagcttgaccaaggctacacctaatcctccacaccatcagcctcaatgtagaactcttcctctgatgaatgattgcaaggtgagtatatgacatactcagcaagccacgcagcaaataagccaggggcccggataaccaaggatggcataatagggtcccatttgcaaa

SEQ ID NO: 9924 - DNA, 42878 bp, Oryza sativa
  unsure (1)..(42878): unsure at all n locations
ctaactattaattattagtacacaggggatggagacaccacgcggatatcaaatcagggtatattgcacgggttatcagcagtatttctcatagtagaatctttcgctgacaactaatctagataatgttggtgcaggtttatctagtgacatggtgaagaatcatgtcaagaatgtggtgactaacccaacgtcgtcagtcgataacattccagcgccactgtgcgacctcccgtagacagagcgagaggaaattgtcaatgtaaatacccgattacttatcctctcttgatcttaactcattttgtaggagtagtgattctaatactttcaagaatcgcccttaacggatgtgattgggggcattgatcgaccactaggaatctgcctcgctccatgaggacgttgaggcacatccccactcagccattgccctcgcagcagtgaccgcaatatcctcaggcgttggctctagtggtgcaataggagtcaaaaggacactttggaccaaatttcccagagccaaaggagcagggatgctcaggagggttagtgtctccgtggtaagtaaaacatcaacactactaggttctcttatggaatttgtcttagcgattgatgatttattaattggcagacttcttctgccaagaaagcctcctcgggcgaccgcggctagacctttgcttctgtcaaagcaaaaaagattctagtaagttgacctcttactttggttatcttcttgtttgattccttagaatctagttcgtcgagtttgattgatgtgtcttatagggagtgcgatcaccttggataatggataggagcaaagtagtggtagtatgatagtatcaactaggcaatcacgcgtcgttcaaaaactaaattatccccaatagagctgctactagtagtagtagtactagcatataaatccttctttttcaccaaaagaaacatttttgtatataattgtcaccgtcacgttgcgagctagccatacgtatatatcgtccgtgtcccctccggccggttccataaatagatgcaggtacgacaagacagggtgcattaatcaaacgacggtgttcgaaggaagctggatccccaagccatctgcgaaagcgacgcccatcgatcgttcgttcatcgatgaggcgatgatgcatccatgatatatgctctctctctctctctctctctctctctctctctctcttgccagggcctggacggacggaaaggatgatggtgaatggaatggaaggctttggcttcagctatagttctagccttcagaactacttaaagtggacaaaccttattgcaatatatcgccatgccacttgctagctatagctagtagcgacgattgaagaaaggttggcttggctggcgtctctctctgtagccgccgtaccatcgtcccggggcttaattgcgagaggccgtgcgattgctccgtcacaacagtagccaaaaaagagaagggaaaaaaaagaagataaagaacctcgaaagcgaaaagggaaaaagagagagagagaaagagaagatgagacaccgaactttaaaaggcgatgcagttgtcggcgtcgtacggcgacggcgagaaggaagaagcaaccggtgatattcacagagccagaattgacctgcgtaaccgggtgatctgcagctggccacgattgacaggtttactggtgtggtgccggctgagatgacaaagatgggttaatcttagggggtgtttgggagagaggagtagcagcagcaggagaagaaaaaggttatagtaacagcacggtgtcaccgtctgatagctccagggcagtgtgaaaactgttcattgtatttacagtggcctacagcaacaggatggatgcgtgaaatgtccattctttatttgggggttgggtgcgtttactatggatggcagtggcacccgggaaatgcgtttttccactccaaggttgtcacattattggaggatgagcagagcagatgaggccatgagggtctatgggagcttcattggatccgtcgaatttggccgcgcgccccctgcaaaaaagataacgaatgatggttagatttgaggtggataatgacaactgactagccctcctgtcctgagtgacagcatgagctaacactgtctcccaacaaaagggtactgagattgacagggctccagaattcacgtttttgagggtgtcgcatcagttgcatgtgtgaaattaaatgagatctaccaacagtgaggatttaggtcgagaaggacaggcagtgtgtaacgtaagtaaagctatggcagtatggcacaaacaggaaagttatagaaaccaacagaactaaaatcccctccgaattactgtttctatatgtgaggaggaatggaaagcgatgctattttctcttcttttccgctacctcaatgttaagcagcaaaaatccaaatatacatcatagaatgaagtgataaggagcatggaggacaacttacattattgaggatgaatggaggctgaagagaaacaatcatgagatctacagttattcaacctgaacagattccagaaggtccattactgattttcggtcaggcatgctgggtatggctccctttacttgaacacatagagatgcagcagcagctgaaattaaaaattggaaattgaagcctcaagcaaagtatgctaatgttgaagaacaagaaatcaattgcaatcaaatgacgaggagagggtgctttcagtaccagcaaatctcatgcactcttccttaggtttaccctcaactagagctacagcaaaagctgaggtgaaagtgtcaccggcaccagtcgtatcaacaacttctgtggcaggaattatcggctgcctgatcggctcccccccttcaataaataaagcagatccttgtgatccgagtttaaccagcacttctttcacaccctgtagacagaaaaacacagatgaatcggatcacaacttctaatcatattctcataaacaattatgcaccgtcaatatgtatgatatatatattactcgacactggatccaatgagaacaacttgaacatgccctattaaagagagtgattggagtaaatgacatgaaaaacgttcggttgaagaaccaaacccctgcactggcagctataacacacctgtagtttctttgcatttcttttcttacaccgcaatatacattaggcacaggttacatactttcaggtaattgcagccacaaaaatctcatcctgtttatacagcagacaagcatgaagagacatccagattctccatgaagaaagcacacagattctgtgtactgaagttaattaagagcttccagccagcggccagtttctgatcagatgctgacatgctgaagtgttatttctccaattgtgctaccagggttattcaacctactagttcagtatcattcctgggattgactttctaaacaactaactaatgtatgtcctgtccattttattagagaacaaagcctgcttttaccaaactcacttgttcaataaaagtaagccaaaagccagcataactactcaaatctaggatttagcactacatgtaattgttgggccattggtgtataacatagccacatgccagcctagccacctaggtaaaccaaaatgcacaaattgttacagcatcttgcttaatcatgttttctgtacccagtcatctagccacttagcaatacgattcataggtagtgattcaaggtcatggcaaatatcccttttgcgtgtgtatgcccgatccaatttaaggtcatggcaaatatcccttttgcgtgtgtatgcccgatccacttgcatgtagacaacatatgtgttcgcataccagagaactaaaacacaagatctatcctactaacggtatgaaaacacatgcacacagagacatacacaaatgggataatgaaagaagggcaggaggcttttgcattttcttaaattagttaccttgatgcaattcctcatgttacaattatcctaaacataatattaaacaaacagtcgtggttaatcaaaactaaccaatgagtattgatacaagtcagcaatacaagccatctattcgctccctctattttacaagacacgaattggtttggcgcagtcttcaaattgaactttgaccagaaatatcttgcaacataatgctcaatgtagaaaatcaaagattatataaaattacatagaaatacaaatttagaggtaccacctttgtactgctaaacctaatgtaaatagcctaaaggttggtgaaaacttatgaagtttgaaatctagaaatatgtgcacatgttataaatctgaacggagaagtaacctaagagctatagttaagttatgaatatgaggggaagaatgtgcataaaaacaaaccacataaaataagtctaatttggacatctcaccattttatggcatgctcctgcagctcgactgatctgttcaaatgtttctgtaggcatcccagtcaaacgtgcaagctctgtttcatttggactaaaaatatccaccaggctcagtagttccccagggacaggagcatccattccaccggcgtccaagataacaggcacacctgcaccttttgctgcctgaaaacaaaaattcagcttattacaaaacagctttactacgcttggatatgtaaatacacaaggtggttacagcattcccaactatctactatgaatgctcagatttcttaagtatatgatagtgcaatctatgaaagatgaaaattacgaataagattggatttatcattctgataatacattgaaatcgattgcggagtaacataaacacgaaagtagcactgtgcagccaacaagatcatttggtccaagtggagtccctaagatactaatcttcacaagttcttcagaaaggactgaagcacgtgatgctgtgcttaactagatcagtctaacatttgcccacataactgcatggaggcatgcttgagataccataagaatttaaaaataaaatgaatcacccttctttctgcatcgttggatcttcaggaatcattaactctttactcccacaaatcagtcacacagacaaatatatatgattcctttcagagttcagacatatgttgaagcaactcagcaatcatgatagcgctgctttatttttcttaaatgcattgaagtcacaacatataaattctcaagtcacaacatatgactctactttcatttgcactcaaacaatactagacatcacagaatcaccaataggggaaaacaaaggtaactgcaaacctaatctttatgagcaaatacattacagaagaaagcagaaactggatgttgtaaaagtatgctgtcctcacatgagaacaagctctccctgtacaaaatccacatgttttgtcctaaccctcattggttggtttgttatgcttctatggagcttagtgaaacagataggataattgcaaagcaccttaccacaagctaacagcattatatatatcaaaatcagagtgttgaatggcctaggtttcaagtgcaagtccattaaacactcatacgcaacagactgtaaattccagccaaatgaagatgccattagtctagacatgttccctgttttgttcaaactgatgttgatgatagaggagactgtgtgaatgctgttgggataataccatgcatacaggttaggaaaaaaaaaacatagcttctctaacatgccgtgtggccagatatatcctatcttacacagtgtacaaaatagtgtgcataaaattattttgctcagatcatttgatatcatgaggaaagaataccaaatccaaagttggttcttcccaccaaaacttatgctccctccgtcccagaatataagaagttttagagttggacatggttattaagaaagtaggtagaagtgaatgatggagggttgtgattggatgagtagtgaaggtaggtaggaaaagtgaatggtggagggttatgattggttaggaagagaatgtttgtggagaggttgttatattttaggacaaatcctgatggctaaaagttgttatattttgggacggagggagtaacatagacttaagctttagtagtgcattaagcaataataagcataaaacacaaattcactaagaacaagataagcattgaacagacagcacatcaaaatttggaatacttttgtcaacaacaaaaaaaacatgcatcttccgcttagaaaattctaatctatgctcaatatgtctaatcaactatccagtttcctaccaacgaccagatcaaaatcataatctggagtagccatcacacagatatatgtagatcaaactaaatgaacagagctaagttcagctaacagataaaagccaatccacactgtgtttttgctgcaatatgacctagaaggcttgaactaatctgcactaatgcaataagctcatcataccacacaatttcggttaactgtaggccacattttctcacttcgttttggtcaaaggcacggccaagctagaagccattagcaaatttattaaggaacatatctagctacgaaacactatcaaattcaatccaatttgacgaccacttaacaaagtgcgtaaatgagaaaaacttgttcaaatctaaagagagaattagagcaaccacctgcgcaacctgcacgttgacccaatcgggtatctcccgctgcagcagcagcacgccagcccggcggatcaggtccaggtcgtccgagccgacccccgaggcccacccctccatgttggcgccgccgacgatgatgatggagttctgcccgccgggcatcagcatcaccacggcgtggcccgagggcgcgccgggcgcgcgcgcgacgcggtctaggcggacgccgccggcgtccgcgagggcgccctcgaggagccgcccgttggcgtcgtccccgacgcgcgccacgaggtaggtgggccccgccgcgaggcggcccccgcaggcggcctggttggcgcccttcccgcccgcgaggctgcggccggcgcgcgccgccaccgtctccccgacgagcgggaggcggtcgacctcgacgtagatgtcggcgttggcggagcccacgacgacgatgggcggcgccgccgccgccggggcactggcggaggatgacagggaggcggagggcggcctgagggcgaacgagaggctgcccggcttgggggtggatcccgggaaggaggtcgtcgccggcgatagtccggcgagagggaggcggaggcgagcgtcgagagtaggcatggctgatcgatgagagagaaagcgacggtgtcagcgaaggtcacggggtggactaaagctcaagtctcggatgacgatgatgatttggctaatttggttttggatcagagctcaaatcccctccctgatctgctggaaattccgaatttccaacagatttggttcgagactttggctctatcggcctaattaacatatcctatacacaactactccatccgtccaatataaacattttggggcaattgcaaatttaccactactttgaatcgttattgcaaaactgccactagaaaattgcaaaaatgccactagaactgtcattcgagtggtatccttgcaatattcaaaaaaccggtggcaaatttgcaaatgccccaaacatttttaagagctgaacacgattattaaaaaaacatgtagaagaagttaaaaaaaacaaaaacaggtaaaagtgaatggtgaagagttgtgattggttgagtaatggagatagattggaaaagtaaatggtggatgattgttattggttgggaaaagaatattgggggagaagttatattttgggacggagggagtagtaagtatcctaaaagaattatataaaaaaaagttgaacacatagctctaataatattacacatatatataagattttatcttcaaatttataatattttagctcacaagactaaatttgaataaaattttactcttaaaactgttatttttttattttattatggctaaagtataataaatttgaatatgaaaattttatagatatgtgtgatagttaagagtacgagtaaaaattttcaattatcacatctctagattgcacaaacgctgttaaaaccaggaacggtaattttcctcgtaacaaaggcctgacgaagttgacctgggagcctggcccacacacgcaacgtttcggcccgtagcaactataggctggaactggatcgcaactaagaaaaaagtacaccgaaggtccctaaacttgtcatcgagttacaaaatcatcccccaaccataaaaccagataccggacgtccctcatctaaacaaaccagataccggaaccagatatatctggtttttttagttgggggataattttgtagctcgatgacaagttgatttggtgtactttttcctcgcaactaaataggcctgaacgggatcacggcacccgtgcggccttcggtaactgggccggagcggtattagcgaccaacgtgaggcccactgtataattgggcgtgattccgtcgagtcgcgcgggccgtcttatatttgggccggatcgtgcatgcgtgtcagggtaaactataccacacacgaatacacacgatctagtgaagtggagccgtagctgcagtacacagtaattacacacagattaaggtgaagttcacacagattacagtataataatactcctttaaacatgcagcgaaattacttttacttttcttattcgaaaaaagaaattacttctactactttgctacagatacagaagaagcgtaaccacgtttccctttctccgtccctctccggtgacgtgatgggctcgtggaccgatgactcagaccacggtcgcccataacatcaacggccgagatgccacccccatcaccacaaacctctcatccggaccgtccatccacacaccccgcttgctaaccaaccgtgacacgcaacctcccccctccgtctccccgccaaaatgacatccctgcccctcacaacccccgcgtcgaaggcggtttttcccgtggagtgacggaaatacccctacccccctccctctaatgcttctctctctctctcttctcctctcccctctactctctttctctctctctctctccccccttctccgtctgcgttgtgctgcgcgagcccccggaggcgaggcgactccgcgtcgccttcccccccgagcgcgcggccggcgagaagggcgggaggcgcgggcggcgaggtgctcctcttctctctctgtgtctctcgtcggcgacctcgcgcggtagcctcctctccggtggtggtcgcgcgcgcgcggacggtcgacgagggaggtttggagggtgggggcgcgactcggggttgaattcgctcgagctgactcactccaggtaagaattgaacagcgattcgtgtttccgagcagaattgagtgaattggttggagcggttccgctgatttacggcggtgatctgggtgctctctgttcgtgatttcggggtttgtttgatgagatttcagcgtttttctttttctaattaggagatgttagtttggtagggaggttgcggtaattcgttgagatggctgccacgttgtgaattttcctttctagggtttgggtcttcgcgttggtcctaccgtgatcccacctggttgtccctcaatttcgttgcttccttggctctactgacgctttattactgccgatctagccgtagaaaattatctttctgcaatagtaccgtagctgtacaaatgatctcgtctaaagcttctgctctacttcattttctatatgcagcatgtttgctaatctttttatgttgcaagtacaaatctgttgattaaggcatgattagtaggttaatacgtctactgctatgcgattacttgcgtaactgaagaaaggaattaatttaaccattttaacggttgcacctcctttgctgttaaaagaactaaaggagtctgcttttgaggaagcaactgagtgcttgtagaaggcgtgattgaatagtaaaaactgtcttaagaaagctagatcttttctcaacggcaggcttttcttgttataggttgtactaaatgtttacgttccttcatgagttcattttaaggctgtgtctatcgaccatatatattgagatctcatatatatttctaaggtgtattctccaacttttgtatttgttctgcagagggttttatagtttcaagcacaacgctgctcaagatgccagcactgaggatgaagaggaactttgacgatgatgtttttagggatgagtttgattccaaacccacaaaatctatgaagatctcacattttcaagtcagcgaactagagcagtcagctgtgttgaacttgccttataaagatccccacgatggtaagtgactgcaggcagctctgtgggagttaaggctgattttttactgatgtggagtttctttcaactttcccttaaaatatatgtaatttagctgtactgtttattacagttctcttgaacaggaactgtgtgtgcctaatgttgcattcggaagctattttttataggtagataatttaacaactcatgtttgttaagttggttttacttagctatttggaaaatgtgtttaaattgtgcattgttagtgatcaaaggttagtgagggtgtgcatatttcattgattctatttcctttttcagagctggatttgacaactcagttagctggccaggacattatgatcatggaagctgctagtttggatgatgctcttggaggagcatctttgctcaaggtgtggcatcatcatctgatcatatattattataattattattgtcgcactttacttttgtgttcaaccgtttggcttcaatacttccatttcattattataagtttcctcttgtacttcagtttgtctctccaaactaattagtccaatgaacttctgattacaaatgagtaaccactaacttctgagttctgattatggagatataactattgcaatttctttccaaagttcattgcactaatcagtttggggagacaaactgaaatgcaagaggaaacttattataattaaatggaagtattgaagccaagaggaaactgatttgtcatttgaccttgcacttccaactagtttcagttaatgatttgttataaagggcagaaggcattgtgtttgtttcttatttgtgttatgaactaacatttgtaggctaggtatatagcttcattattttggtgtcttctctcctattttatgtctcagcactctatatcagaatcattattattctgttattttatagaatcttctgcaatgtaatgtttccatgttgatttacaggatttaatatctgaggtggcagtttcaccaaatatggagaatgatatgttagttaattatgaagacatcagatctcagttaaatgtagtaaattattttgacaaaggtaaggagcaaccctttcaccttaagtgacttaggatatatatccattaagcgaagtagcaagattaattttgctatgcgctaggtatttacacttccatgtgcgctttgcattttcatattgcaattagcaaagcatttacaatgtgatgccatagattctaagttatctgaaaaccaatcttaccaagaatagaattaaaaacaagatttctttgctagtaatgactggaatattcctttgttacttttaaattatattggactttttggtcatcagtctttatttaatgcatgattctgatcattctttgtgtatacacttttgaaaatgtgtaaaaatatgtatgctacattagcatctggtgttgcaaatttaatatgattatttctgtgcggtcaagctatacagtatacactgaattgctgatagggaattgtatataaatgatccaaatttcagaagttctactgcaagaatgccacattaatctatttatgtccacaaactggacactgtttttgtctttgtgccaacttatcacaaattctgattttgcttggctggaggatttctgatcttttaatttcattgcatctcttgctccaaaaacgatgtgccacatatgtagtttttagctgagatagcaatgcaatcatttcaattccccctagttcgaaaacctttttgtcataatgccatgtcagtctctcaacattatatcgttgaacaaacctaggatgtttgcttaaattgataacttgagatgagcttttgctgtacatgctatctttggcctctgtataaaatcatgatatgcaatatatacttgtccattctattgtggaaagagaaaggtgtgcgctggcgctatatgcaaatgatcataccagaaattcatggtgactgattgtctaggcattttgattggtattgaatctgaataatatgtgatagtggcaaatccatcaaatatatcaccagattaaacccacaagattatcattttttttgtgatagtggcaaatctattaaatatatcatgaactgcttctcttgaaagttgtccattcatctacctattgccaacggacgaattgctaattcttgcagttgtggggcagtaactgataagcatgatttgaattgtgttccttattttgtaatagctccttgaggagaaaatgtagaaatatttatttgggacatgcttatgttgaacatttagttattactactcaaaagcaagtttcagtttgtaaatgtgcgtacttatttataattatgcatggtattttttgcagatgaagatgcaaattctgcatcatataatagctgtaccgttaattgtcatgaagaaagctggggctcgaatgagggttgcagtctgttggacatttataatcctgatgatgctttctctttcctattggatacgccctctgagtttctgggtagttttactgcattatatgatgaagttgtaccaattgattcattggtgaatataagtggccgatgtggagtattcccacttactgagagcactacagaagccagtattggtaatgagccatgcagatctgagggggatatgctatttagtaactcagaggtgttagagtggctcaatccacatctggctgaggaggatttgcctaatctcgttgattttactgagctgaactcacatgctgtatcaaaggagcaaggggccaggaaggtcactcttgtacttgatttggacggtatgttgctggttttaaaagatttattattttttaggactctattgatgtttcccagagaataatatattgttatttttccttcctgtgcagaaacccttgttcattcgaccacagagcagtgtgatgactatgactttacctttccagtgttctttgatatgaaggagcatatggtttatgtgaggaagagaccacatctccacatgttcctccaaaaaatggctgagatgtttgaggttgttatattcacagccagccaaagtgtttatgcagatcagctgcttgacatcttggatccagagaaaaaactgttctctaggcgttatttccgggagtcatgtgtatttacaaacactagctacacgaaggatctgacagttgttggagttgaccttgctaaagttgtcataattgacaacactccgcaggtaaactgctgataacttgttctgcgctaatgcacttcgtgttctaaatgttgtcacttatgtttttaagaaggttcagtgttaaagtgtcctggacctacatctctgaatttttgaaatctcccattcatcaactatcgcatgaagtatccgatgagcacctgaatactaatttccatgtttcattcaggttttccagttgcaagtgaataatggtatacccatagagagttggtttagcgacgactctgatgaggcattacctcagctgattccgttcctggagacccttgcttctgcggatgatgtccgacccataattgccaagaagtttggcgacaaaaaggatattgctgagattttccaataaatgttagggatagctttttgtttactcagatagaggaacagaaacttaattaacatgttaaccgggcttgttgacctttttcttttccttttttacagtgggtggttttcataggattaagaattttggtgttagagctagttgtgaattgtacatatcctcgtatttcttaaacagttctgtacatagtatgctgccggaaatgaaagtgaacttcacaaattttgttctctgtttccttcctgttaagtgtcccgtacatttgatgttgccgttcgatcagactgttgggactgtccaggacggattcttgcatctctttttcccactgtcagattctcaattggcaactaattaatttagtcgcaattgcgttgtgcaaacttatgtttacatgtttttttctctcgagatcgttgaaacatcgctgcatttgaagtaatactcaccacgtccaaatataatttgctcgtcgatgtattaaatttcgtagcatttgaagcacgataccacctaattcatgtttgaactctggtctacaggtactgctcatgctgtaagcctgtaaccgttaaccaaatacatctcagtagttagtggtgcggtcagttctgacaatcctaaaacacaagtaacatcaattcactatcatttcccatcactctaagagaagcaaacagttcattaacatttactatagtcctcagatttttttttttttgttcttttttatgttacaccaaaatgtactcctgttctacaagggaattgtctcgcaagcatttgtgctcagacgcccagtgatacaaaaagaaaacacacaccaccacatgtccacatgtggaacaaaagaaatggctgtctctggcagtaatatatagaatcaagttattgtatatacataagctcgctatttttattcccataagttctctttcattcaaagtagatcactcgctcatctttttcccttttctcccatttctttttcttcttagcagcaaataactgacggcacggcaatatggcatgcctttcttggcaggctagatcaatggctagcaagatgtttgtcttttccacattctgtaatttcattttcaccgcctcgacgcttcctcgatcagattgttggtcctgtattctttgtctgaatctttggctgataaggcacttgggtacttggattctttcatgttattaatcagctcagcggagcatttttgaagtggccattgcaccctaatacatcctcgagaccccatactgaacagtactgactttattgtagttacctccaactgcagcaatgccattaaaagggccaattccctgcatcatgttggattgtaaggcagctctgtctgctacatcagatttcgcctttgaaacgtagtaagaggaagctctcaaatcatgggacatatgtgacaccaccttagcatccatgaaatgctctgatggctggtaccgcatgcgatctttctcaagctcctgctggagctctctttctgagctatccgatttacggtggtaggcatatgctgataggttggtggtggctggaggaagcactggattccttaccacccttcgttgattgtatgggcccattgcactcaaattctcaaatggtattacagggcaagcccctcgtcctgttctacctgagaaattatcagaagaaaatatatcagatggaatcctctgaagaaatgagcttgataaatttatttaggagaaactattacctggaatcctttggggtacttgggaagttatattttgatgatctttgggaggaattggagcagaatgaactgtagtagtcctgcaaattagaaattaaaggtcagcaccaatattccaacggtggtctatgttattgatatcacctcaaatcacacactttctgatgtgtacagaggttttatagtaccataaaatcatgaaacaaagttttataatgatgcaagtacgatctatctgtttgatttgatgcaattttcttaacagaagcaaacttggcatcataatcaacaaaaatatactttcaatgggaagaaaaccattgatggttaaaacggttttagccaccttgggagcgaaacatgtttcctgtctgatggaacagcatctccattcttccctccattttcttccaggttagcaaattgtctccgaaagttgtcaagggcactgtgtaataacaattaggtgcaaccgaaaatgtattagttataaccaatggggtgcagaagatgggaataaacaaaaagaaaggaggtggggagcatgactgatggaagagaatccatgggacgaacctaggatataggaagtttgttttttcggttccattcatgtaatccttaagaagttgaggatgatactccagtatttcacggaatataagttccttcacatcctctttagtcacctttctccgctcaaactcaaactccatctttgttattggctggcatgatggttctctctctgctttcgcaaggcctttaaaatatggatcagccaacgcctgatatgtaaatcaatgaaaatgaatatcattagaatgatttcagcaccaaatgacaccaggtgcagccatcacatggaagtacaaactacagaagttttaattcgacattcattaataaaaactaacctcttcggcagttggtctatccttcgggtcgaatgctaaaagcctctgcagaagtttgagtgcagcaggatctgcttttgggaatctctcagaaaaaggtactggctgctttttcctcatactgctcaagtacctccttgctttctcattccgaatctgcagttacaacatgatacctggcatttattatggatagttcactttggagcattagtcattgatgaaaggcaaagcatacccttgtaacagtatccattgatggagtacccaagagatcagtcatcagatccaactggtgaaccacatttttaccaggaaacaaaggcttcccagttaaaatctcagcaaaaatgcagccaatactccatatgtcaatagctggtgaatactgcacagtacaatcgatttagcatccattgaaatttacagaggagcagatattagttgaacagttggcgtaaaagtgaagaaaatatcagctaactacattaatcctatcacttcgcctagatgtcaaacagacgaataaactctcaggttactgtaaatgctgtacttttcaaacctaaccaaataatactaataaaactatctatgatgatcaatgaaggcaatacctactaaaaaggtagcaaatgccgcctatgaatgcagcttctgaacaagacaatttggaaggaatgatccctgttataccagctggtaaaaagccaaatcggaatcaaaggggatgaatggcctgatgtaaaatcacatatagctatgggggtacttgtgcataaaaagggttatgtacaacaggataaatttaacacatagacattaatttttcaggaaaataaaaaatgaccgcatatgaagtttctaaacagtaacatgtgcatatctgtagggagcttggaatcaagtcacccgattaatcaagataaagtaaaattgagccagacatcataaaacagaatatagtcacacgatcgttgtcaaagatccaaatgaaggcttggaggaatgggaaagaggccacaaaatgtgaagtatgatttatgacgatatgtaacactagttaattcgaattgtgattgctaaatattaggaagtccacttagcatcaacagtagttgctatgactgacataaatggctgcatatcaaggaagggccacagattgacaagtgacaactattgtataccagcatgttggcataccaccagtatagtgtgtgtggccatgaatactaggctctagaatagctgccattatcattctattggcataacactcaatgtattacactagttaaattgaaatattatgtctttatgatataaaaatattacatttctctatgataaaatgtgtacagtcagaagagcatgcagaaaaccatagcaaaatcatgtatagggatgtgacaatgaattttaacagaaaatataattcagcaatataccatcaagtagaccaagcaaatcatgttatagggcttctggggaagtagcccaagcaaatattccaacaaacaacacatgagaactgcagattaattaccttagtaaagaaagaaccacacaactcaggagccctataccatctagtagcaacataatcctgcaaaaaacaaagaaagaaaattatgaaatagaaaataaaacttacgtagcaaaactatgcatgtactattgcagataatgcaatatatgaatgtacaatgtcacacaccgtccagaataccgttgtaggagtgtcattaaatgccactcgtgctagaccgaaatcgcatattttgagtttacagttagcgtttgccaatatgttctttggcttcaaatcacgatgatagacattagctgcagtacataaactgatggttaggataagcaatacatgtaaaccaagtgcatctccccattctgaaagatctaaatgagcatgcagtttaaaactcgacgagaaggattttcagtggtgataatgttaatggcttaacagtgaatagcagaaaacagtaatgatgacatgttgtacaattagtcaatttctagatagacaaagaaagtgcaagtatagtatctagtaatcaataaaagatgcaaaatagtgggaaatactttaaagaaataagaggatggcaacaaacagaatctccacagggcaaaaataatgtaatgaacagaataagcaactaaaggcaaatgatgtgggaatgacaatttcctttatttatagtggacttatttattgggctagcactgtgccaaattcatgtgcgagcacactacaagatcgtttatgctcttcatgaagcataacaaagaacccaaaaaaatgtgaataaactttacccaacatttcagagaataaattatccctcaacactaaacaaatattacagtcatcaataaacgctgtgctagctcagacctcagtttctaaaaggaagcataccagtatgaatatatttcaaagcacgaagcatctgataaagaaagaactgatgatgttctttggttaagtcatcatttgccttgatgacttggtggagatcggtatccatcagctcaaagacaacatatatgtccttgaagtccctccttgatggaggtagcattatatgcttgatctcaactatatcaggatgccgtaatagccggagcaatttgatctcacggaggattcgggcagcatcagataagtgctcaaagatattgtgtattttcttgattgcaaccttgtcgccagtatgttggtcaatagctgaacaaactacaccatagcttcctttgccaatgacttcctgtattttgtatctgttagcatcaccatattcgctgaagaaatccatctctggcgaaccctgaacataagtcaataaattgagttaacactatgctggagatagcttgtttaaaaaagagggagtatataattcaaagctaatgtctttgaatgcatagaagagtacttgctaacagaccactgaaacagcagatggttaatctgcgtacaacaaattcagacagatcctagttcaacaaactcagatagatcctagaacgagcaactggactctagtagctgatgtatcagaaaagacagtagctacacctgcccttctgatgcaaagactccttagtctccactctccagcaatgagcaaaacgaaacaatcaaagcctaagaccgaacaagactaaaaaaaaagccaaataatgactcttaagaagtgctcttggcctctggggcataaaaccatctcgatcaatatgcctccaaagtgggcatggaatatattgattagataatccactgggacaattaaaatgattggctattcttttcttgcaagtaaaaaaaaccaggaaggtaagaaagaccgcagagctggcttaggataaacatatctactcagcgaatcttataccgcatttgtgatgcttctaagtagcatctgaattaatcttctctccttggagtgttatctcggattagaagtggggtgggaaaattctctgaattggagtactagttattcatcaaggcgcaatgagtattcgactgactcgggaaaagttgtcaaaggatgtcatttcctttcgagggcacaaaaagcagacgtcgcccagcaccagaaggtttcagatattatcaagaaggcatccacggttaaatcgaatagagaaccttctgacaattcggataatttccgatccagagaaaggcgaaggggaggggggaaaaatctcttttgcgaacaaatggaacatgagaatcgagaactacagcgactgcagagctcaaaatccactgaaattcaccacaatccaacatacggagtcatccgcagataaaagtcgagcaaaaaagcggaggaaaacaacggcaagaacaaacccttactacgctcgtacgcatccgaatccgaagctccacgagaaagaaaggaagggaaacaaatcgttcttttgcacaaaatcccccgactccatataactcaagatcgtctcgacccgcgggacgaccaaaccgatctccaaacgccaaccacccatgaccatgagaccaccaccctccaccaaaaacccaaccacccccggcgagaaacaccgcgcaacaaaaaatgaattgccacctcctctcaccttcctccgctgctgctgctgctgctccgtctgcatcgtctgcatcgccatcgccgccgccgccccctcacctctcctccaccgccagcgacgaatccacccgcatttgcctcgcctcgccgcgccgccgcatgcgacgccccgcccgcgaggtgctagggcgagcgagcgagcgagcgagagggagagatcgatcccacgcacccacacccccacacgcgcggggggatcgaaccagcgcaatccccgaccgggacgcccgccccgccccgccccgctcccacctccccccctgcgactgagcaactcgcgccgaggaggtaggccgcgcgtgcgtgcgtgcgtgcgtgcgtgcaaagccgcctcgccttcgggagttcgtgttggcgtcgcgagcgaaccactgcaaaaatcggtcggggtcgcggacgcggtgggggttaaaaaaaaccaacgagctcttgcagttgtagtagttgtagcgagagctcctcgtccctgtctgtcctgtcgcttccggcctccgggtccgggaggatcacgctaaaaacacgcacgaaacggtgaaaccaaccgtgaaactgcggtgctgtgccgccgggttggttggtgggtttcgggcgcactcggtgcaagcgcaaacgcggcgtggcgtggcgggcaccggggttggggttggggattggtttttttgggtgggattttggagtgccttttgacgctgtggtgtggtggtggaagttttcggctctggtcggtcggtgcgccggcgagcagggttgacgctgttttcgcgacctttttctccctattttatcctctcgccgttgctttaggtgtgcgaatcacatggccatatatatgaccaagctgatcgggttttcaggcctttttttttccttttttctctcatcgtgcatcgcccttgggtacgaagcttcgtgcgccgtgcgatgtaacatgataagatatcgcaattatcggtggttagatctggggtgttggttcacttgcccggggtggcgagatatataagacgataaggttttgatccgggaattctaaaatagtcgtgtatggcatgtgatgctaatcatgctcttttgcatgcactgtgtgtatatctgtttctccttttttattttctttctacgatacctttttgcaattattattccaattaaaccgtctatatgcatcacgtgtgatctccccgccctaacatgctctgtcaactttgcgtttacaaccctaacatgttgtcagttttcgatcaattacgatgggaaaccagagagtcggtttacttatattagtactctctccatcccataatacaagagttttttactttttgcttgtactgtttgaccactcgtcttattaaaaaattgtgcaaatataaaaagaaaagttgtgcttgaaatactttgaataataaagtaagtcacaaataaaataaataataattttaaattttttaataagacgaatagtcaaacagtgcaagtaaaaagtcaaaatcccttatattatgggacggagggagtactatttttttcacaaatctatttaactatgaatctattttttattgatatttatattaatggtgacatttttcaaatgatacaatattaatagtttgggatttgatagatttcagttatctaaaactacacaccactaatctaaaattgcattgttatgcaaaagtgcaatactctctccatccagttggaaattgctatgcgtccgactcatatgtacaacttacattcgactagtgtatatataggtataaatgctgcttgtttgggtccacatgataagaaacaagctcagtgattggttgatatgacatagtcggacatgagtcggatggctcggtcatacgtatagcagagttccatccagtttggtaatcccctaaacaaaaggcaccaagactaaagaagctaaaatattcatcattcaattaatcatcatcggttaagttgctccatcgcttcgtgtctcgtggattgcgcatgttttaaatattgcatgtcattacaccaatagaaagatattggttggttgtatgcaatacattcaatgatgcacatttactctttgtacaaataaacaaagagatatttgttaggtgatgattattttgggaagataaatataagatggagggagtattagtttattgtaactgcaattttgtattagtatggttctatgttacttttatgttgagtttgaatacttaatatgcaactttttatgttctttatgagttgaaaatttatttgatgtttgggttaatgtagtttattgttttaacatatttatctatgatacaagggattttctttttgaatatttattaatagtgagagtaatcaaaacaattaggttcccattttagggttatgatgataagttgagaacatttttggtcagctgaaatctaaacacttcctaattgtttcggataatggtagaaaaagtttttgggttgattacacacaatttttaaatgcatttatgtgagatcgggtgcagtacagatgaaagctagcgttttattgttagaaaattttcctgcattatatggataataaagaatttaatgctgttaaattatgagaaacaatcattgtgtaaattattgccccctttttgattgctgcgtccaaactatgactttttcctaggttgccctgtcattgctaaaattatgtgtacgagttgctatgctattttaaataaggggaaaatgacattttagctagttgtcttcacattttctcccatgcaccctgtaaggtgtagtttggctgctgaactaatatcctttgaactagattgatcgttaagtctatttaattatctccttcaattatagccaagcctaaaagataattttgaaaaaatacatttctttgtgtctaacaataataatagtcgactatgcaagtagatgaacagacaattaataatttcaatcttaaaatgtgtggaaagacaataaatgagttaggccatagagttatcacagtactaaactttttgattatgtgtaggagggagaagagtccattctttctttatatcaactctaagacgcaaaatctgatgtactagcaattgctaactcaagtaaattggaaggaataccgggaatagaaaattcgatatggagtaatggctagagccaactaaagagttcaaccgtatttaatatatttgtaaattatatccctatttgtggataactaagactttaatatccacaaattgaacttaaccttaactatttatagtactatggattattagaagccatcttatttcatactgaaaatctcgtcttttcgatcgtcttgtcggtgtcacgtgggtcttggatgttcgctgaagcaaacacagcaaaattataattagcgtgtgatgcgtgcgtgcttatgttgatttacttgcacacgcgtcttcgtcccaacttttctttgttaaagtatgatcgatcgattaccagcgaaccctttaccgactctagctatagaatgagtcacaataaacacggagagatgacatccacgtcgttccgttggtgtccatgcatcgatgaaaacgccagcttcgcgcaagactagggctgtgttcttatgccattccctcaataattagtatggtacccatagtattaaataagctgccatctaaaataaaaaatgatgtgacaagtgaataaataagtaaagggaaggaaaccaggtcttccataagacatggtttctacacaatatttaagacatcatatgagataaatagcattaaatttaagtatgaaaaaatgttgtttacatttaaagagtagtgtccagtactagtttcttgatgatgtgtagtttatggaaactatgtctagtgtcttagattgggaatagccttaccccaagtttcctaactcatttccctcgttttccgcgcacacactttttgcaaaaaaagtttctatacgaaagttgcttgaaaaatcatattgatccaaaaaaagctaatacttaattaatcatgcgctaatgaaccgttccgttttccgtgcgcattgttctagttgggaacacgctctagcgaacagagcctaagggttatttagatctaggggtgtaaaattttgacgtgtcacatcggatattatatagggtgtcctatggagtattcggacactgataaaaaaaactaattgtagaatccgtcggtaaaatactagtgaatttattaagcctaattaatacattatttgcaaatgtttactgtagcaccaaattgtcaaatcattgagcaattagacttaaaagattcgtcttacaaattagtcgcaatctgtgcaattagttatttttttaagcttatatttaatattttatgtaggtgttcaaacgttcgatatgacatggtgtaaaatttttggcagggatctaaacaggcccatattctgtcaaatatgtttggcacttgctagcggcctatacatatatggacagatcacatctccgtacccaaagacaggacagagctagcggcctagcgccattttttcttactccgtatcgtttagagtacagaaatttctcggaaagcgacgtccccagctctcgcgttaaccgaccgttgctccttaataatgtaagccaacgtgcggcgctggtgcgctggtgggccgatcgaccggttcggggccaagccgcatgcggctgattcgcggcgctggtgcttgccgcctccctgccgttgatacatccgcgcgcaggtgacgcgcgtgacggcggccggtcccgtgaatccgatcgaaattggtgagaggtatcccgcggtttggtgttgttgctagctactccctccgtcttaaaaaaaaaaagacaaacctgatttccgtgtccaacgtttaactgtccatcttatttaaaaaaattaaaaagataagtcacgcataaattattaatcatattttattatttaacaacaatgaaaatactaattatagaaaaatttcatataaaacagacagtcaaacgttgacacgaaaccccagggtttatctttttttcttttgggacagagagagtatacgattgatgaggacggcggcggcggcggcagctagctagctgagcgagagggggtcgccgcatgtacgacggcgcgcgcgtctcgtgcaagttggctgcaggcgagcgacggacgagagagcccgagccccggcgccgcgcgacgtcgcgtcgtccgtgtcgtgtcgtgccgtgcggtgcagattggcagatttgcgggggtgggtggggggggggggggggggcggatcggtgaatgcatacatgggccggccggatctccaccgtcgcgtcgtttttgttttaatttcgtttctggcaggattggtatatacggcaactgtgatacatatgggtgtgtgttattgctagtgtggacgaattttggcctgatatctcagatgcgacgtaacttgtttccttgcaaaccggttacgaattgagagagtacttattttatactactgttcatactagagtacgtatcaacactactgttcatactgcatgtctgtaattgcgaatcatatagttactcctacgtagtatagcttatgtagtcgcttagtgctattgcagtttcaaaatgcatcgatccttctatacagaaatgagatactctgtttctgtgtcatctgggcttaggagtccgtctaccggtcgaattataatacctactctctccgtctaaaaaatagacaaaccctatgtttctgtgtctaactttgactgtccgtcttatatgaaatttttttataattcatattttcattgttgttagatgataaaacatgattaatattttatgcatgatttgtctttttaatttttttcataattttttcaaataagatggacggtcaaacattgggcacggaaaccagggtgtcatttttcgaccattcttttttttttaaaaaaatactacctacgttttaaaatatactaacagcctatctagttagagatcaaattcattataatagaacatatcttattatatattatattgttatagtttaacacgaaagtagcgtataattgataaaaatgcaatcgaacaaaccaacatatccagcatagctctgtactaaatacagaactctatcctaaatatgaataagcacttatccacaggggcgtagctaggggtagtcctggtgggctcgggactacccaaaatctggcccagagacccccacccccaaaaagtttaggcttaaattggttgcttggtccaaatagcccggaaatatatgcggttggagggattcctagccactcagcgtctcaccagccagtagcgccagttcctgttcgcccgagcccgacaccgccagcctcctcgactccacgctcggtgccgccctcggctggcaggctccccgctatccgcgccggcgctgcgccatcccctcccctccttctgcgactccgcgccgggcgctgacgccgccaccgccatcccctcccctcctctgcgccggcgccgcgcgtcctcccctccggcctccccgctgtccacgccgtgccaccgtcctatcccctccatggctcagcctaacaaatagctgtctaaatggctaaatcgatttgtgaattgtgattagagattagtcagtctgtgaatatttgtacattttgaacttgtttgttaagtaagctacttatgtatgttggaagacattatttctatcacattttcactaaatttgtatttgtatatcaatttcatcgtgcaagaaaattttaccgcgtgacatgaacgtgtgaactaggactacccaatgaaaaattcctggctacgctacagcttatccatattcatatgatagattttttttttttacggagagctaatcaagagtacctcaggagagcaagagtcggtggccctagctagaatgctgtactagatcgatctatccatttctccatttcgtgtgcagcaatacagcaccacagaaacatgagcaagcagccaccgtcgaccgatcgattcatcgatcgatcacaagctagctcgacgactcgcaataatggacgctcctcttaactttccctttaataattggcgatgtaattaatccaaatggacccacatgcctctgtcggcgtaatatgattgcagatgttaataatggatagtcaacagtagtgattgataataattggatcctgtttaatgctattgatataatcgcttcggccatttaaacaggtcgttttgaacattgatattttgatgtcatgtctttttttacttgtggatacagtctataatgcctacatgtcttatcattactctatctaattggatatttatagaacttacttaaaatataaccatataaaaatattttgtattttttatgacaagtctattgtaatcgttttcataattaagttttaattttttttactatatacattgcaaaatataacaattaaacatggaaattaatacgtcaagattcatagtcaagagttactatattttagcatggcgtagtaactaccaagatattatagtttgactgcacatattttaggacattacttcctccgtactcgtaaaagaaatcgtttaggacaatatttaagtcaaaccttgggaatataaattattaataactctcaagttgttgagttcgaaaatataaaaattatattgagatcgaaaatataaaaattatatgaatagatttgtcttgaaaaatactttcataaaagtatacatatatcactttttaataaatatttttatagaaataagaagttaaaattgtgttttggagaccgtgtcgctgtccaaaacgattttctttatgagtacagagggagtactttttaagaagggaggtagtacaatacaaaagtatgatatttaccattagagaaaagtacattttacccccctgaactatcgaggtcgatcgaattacacccctgaactcgaaaaccggacattctacaccctcaactattgaaaccgggcaaattaccccccccagcactgttttaggtggttttgggatagacttgctgacatggcattctagcgtggcaaaaaaaaaaaaaaaaataagggacccacatgtcagtctctttatctcctctctatcccctctcgccggctagcctcctcctctcgccgcgggagaaggcgcctccgccggccacgcgcggaccacctcctccgctcgccgcgggctgagccgcctccgccggccacgcgcggctccgccgcctccgccggccgcgcacggccccgccgcgagggcctcctccgctcgccttccagctccacgcggcttcgtcgtctccgccggctgcgcgcggctccaccgcctccgcgggccgcacgcggctccgccgcctccgctggccaagcgcgcctccgccgcctccgtcggccacgcgcggccccgccgcggctccacagcagctagccatgcatccacaataatcggcgcgcagaggcagacagcaggcggcggcacgggacggcggcggcggcgcggtgtacgaggaggaggttgaaaacgacgacggcgatggcggcgacgggcggctgagacggaggcggagacggcgtgggcggccagcggcggaggcggagctcctcgggcgtcgcggcggcgacagcgcggcagcagggagcatgtagagccggcggtggcgcgcgggaaggcggcggggcgcggcggcacggcagtagggggcacgggcgtcgccccttgctaatgcggtggtcggcggccgcccgagcgccgcaaccgaggtggacaaagaggttgaagacgacgacgacgagctcgggcacggcccgtgcgagctccgtctcccgctgccagccgcccgctccgccttcgcctcagcctcccgccgcctgaggagctccgcctctgcctcccgaggagctccgccggcgcgaggggaggaggctggccggtgcgaggggatagagaattagagaggagatatagagactgacatgtgggtccattattttttttatttattttttgccacgctggaatgccacgtcagcaagtctatcccaaaaccacctaaaacagtgctcaggggggtaatttgtccggtttcaatagttgagggtgtagaatgtccggttttcgagttcgggagtgtaattcggtcgacctcgatagttcaggggggtaaaatgtacttttctcttaccattattactatgtatttatagaaccccaacataaacaataatattgtgtaaagttcccataacaagttctattatttccatacatcaaattcaaatatttaaaaccacacacacatgtttatggctccttcgaaacacatgattaaaaaatatagataaacaggaaaaaaacacgggattttaaacagaaatataagtgtaaaacggataattgcaaattacaagaaaaaaaataagaatgatcatttgaatagacggtaggaaaaatacaagaatcagatgagtgcgatagactcaaagtattcttttaggaaattggagttcttaccaacttttctctaaaatatatgtaagattattgattcaacataaatttcaaagtaaatggtaagattaattcaatccttgtatcaaagacctttctaggaatttttttataggcttgaaatccaatcctctaattttttatatatttctcctactaattaaagagggccttagaattttgaaagtatgactcaagaaatgtccacagcaatatttttctttaccatgccagtcttggatttgatggctccgatattattcaaacatgcgtgtatatgaagggttgaacttggagtctttcggataaccatcgttaatccaaacatactattacaaaaacacacaaaaaatgaaatcataaaaatatggtgcgtgctagctagctctccacaactggtaacagtacccgataagcaagtacattaaacgccaagaaaatcaccctaccactctctgtctcccacgagccatcgcactcgtatttgaccgcagaatcgcacgtgatctgcgcccttggaagtatgctcaacatggttactgtgcggctactaatcccccatggcattatccagtcgacgatcgagcacagctgagtgtagtactagtatgcctgggtgacacggagagtactgaaacgtaatccctccgtactaataaaaaaaatcgtttagaataatattttaagtcaaatcttaggaatataaatcatgaataactcttaagttattgagtttgaaaatatataaattatatgaatagatttgtcttgaaaaatacttttataaaagtatacatatatcacttctcaataaatatatttatagaaacaaaaagttaaagttatattttagagaccgtgtcgttatccaaaacgacttcctttacgattaccggagggagtacgtgctcgccggcaaggagaaccgtgcaaattggaatttctcgctgcagaaatccaaaacagtcactagcaaccagagcatttctttacatgtaaattggaccgacgtatcggctactgcaggtcagcaattatatttttaaagaaaatttgcgtggacgccgtgatgactaatcttgctgggtttaacactgactaggacaccaagtaggtctagtcttaaatttttaatgtctcatgtacgatgaacttagtaataggtggtgatcgaaagaacgtaacattgctgaagtatatagatctccaatacgaaaatattctctagaaaagatcgcaaattattagggaacaacgaacacaattttgaatgtttggactaaaatacttgatccatatgcatgcctatgtggcgtcttaatccacgtcggcctcaacaatactagctactatatattatgcatgtgttaatttggttttagttcgcacgcgctagttgtacagattcatgtatagaacacgtattttgtaagcttatctaccaatgcactcagctcataaaattgtactccatccgtttcaaaatatttgacaccgttgactttttagtacatatttaactatttatcttattcaaaaaatttaagtaattatttattattttcatatcatttgattcattattgttaaatatactttcatgtacacatatagttttacatatttcacaaatttttttaataagacgaacggtcaaacatgtgctaaaaaatcaacggtgtcaaatattttaaaacggagggagtatattgctagtgtaatttacttttcttttaattaggctaaagattgtagttcagttcactcgaacagtcagttagatagtgacaggggcggagctatagtgtagcggccggtgtcaggcgacaccgataactttcggtaaaacctatagttaaactgcttatccacatattataatattatgatctaattataattagcattctatgacaccaacgaattaattttctggatccgccactggacagtgatgttctaatttaatttgcaaattgcttgatttgggttgcttaccagaagtgccatgcagctatgcagctttccttttggcacgatgtgtatgcacctgtagcaccttgacgacggggtgcagatcaaacggccaaaaagatggacgccacctgtagaagatccaaggggaagaaggcagtgtcactttcaatttttatttttaagactcgctttcaaattagtgattgtttcttgtagtctccatcaacaccacactacctgatctaaaaggaacaaaaggagtttgctaattgtgattacaggtgtgcctacgctcactacacaagggttaaggaaactaggaaagcgtttttctccagtcctttttcattgaaagatgcaggtacaggttaaaagaaaaaggtatacaaggtatacacagagtcagcatgctataacttgctagtgtactaaattatgcttctatataacttggacaatttctttagagagagagagaagttggacattctctgatactactacactctgcaaatgcaagacagtttgaagtacagtgacagcctgactggttaacagcacgcnatgcatgctcattaagatcaatgaaagatgggcaattaagcaaggtaatcattttttgaaaaaaaaaacacaacaaggtaatcagatcaacctcaccaatttatttggatcagagacctagctcaaactcctaattattcaaccacacaagcaggtacggcaatgccagacagtgacataaattcagcagcttaaatatttcatccgtccaaaaataaaaccaatccccaatgtgcaggttcatatttaggatttagttttttttacagaggaagtatgtctgagaatacggcacgagtatccacgtcggcaactcggctaatcctatccatagttgcctacctgtatggacagcattcgaagcttggcaagtgaagggaacaagtgtgcaagtgccaaaagcttctagcccctctccgttgatctcatggaccacctgcaaataaaaataacaatgctctcaaaaggggacattattatgagccagtgctttggggcactttgctgcatggcacttttggtgctctccctatcaatgtctagaaacgatacgcatacgaagaaatctatatgtatactaaaacatttaaggctggacacgaatcctctgtagtagtgtacttacaatagcagtggttgacaagtgaatccggttccacatgtcagtggcagctactgtagggacaataatactgcagtctgcagataatcccaacggttcaaggcttgtttggatgaaaaaggatttacatatttacatccacccccaatccatcatgttttgatttttgttggttggatatgttcatatgcagatgttaaaattcatccagatttttttaaaaaagggggaaccgaattaaaatccttgttattgcaaacaattcgaagagatcgactatgtgattattttggttcgccttcgccaaacaagtccgaagagaatctttgtagccatcagatgtatatatatcagagtgcaaggtatttcatgggcttagttcataccgagtacttggtcgatgtatacataccaagtactctgctcatccataatactccgtatacatcaagctcgacaatatcataatcagataataatgactacatccgactataatgagatacagagtttctagcattgcccatattcatttagatattaataaatatatatatgtgtgtgtgtttagattcattaacatttatatgtatatggactcccagcctctgttggcagcttggatgaacttacaacggatggcagtttcactgcaagactggagcaagatctccttcgggtcggtgcgcaaagagatacagcggttggaaagaaggctgaagttcttgcgtaacgaggtgttcacggatgctatcatccgggaagagagacttttggaacagcagttatgtgatctctttgaaagagaggaaatcatggcaaaacagcggtctcgaattgaatggctgaaagaaggtgaccgaaatacatccttcttccatgcccgtgcctcagcaaggaggcgcaccaacaagattaagttgctggttagggatgatggttcctcctgtagcgaatctcaaggcatcaaactcatggctgagcatttctttaaaaaacttttcacctctgagcagtgtgagtcagtagaggaagtcctagaggccattccatgtaaggtggacgaatccataaatgaagaactgtgcaaggcctactcggatgaggaaataaaagaggcgttatttcaaatgggtccaactaaggcacccagcccagatggtttcccagctcttttctaccaatctcattggaattttttggagaatgacatctgcagggcagtgcgtggttttcttacaggggacgaaattccagaaggcctgtgtgactctatcattgtcctgatcccaaagatccacaatctggtgcacctctcaaaatttcggcctatcagcttatgtaacgtcctctataagattgcctctaaagttttggctaatcgcctcaaaatcttcctacctgacatcgtgtcggaattccaaagtgcatttgtgcccgggcggctcattacagacagtgcacttgtggcgtttgaatgcctacactcaatccgaaggcaacatagcaaaaatcctttttttgctctcaagatagatatgatgaaagcctatgatcgaattgagtggtcttatctccaaggatgcttaacgaagcttgggtttgcccctgcctgggttagttctgtgatgagatgcgtcacctcagtcagatatgccgttcgcattaatggggagctaactaggctagtgataccttcaaggggcataagacagggggacccagttagcccttacctcttcctgttgtgtacagaggggttgtcctgtttgctgcaaagaaaggaatctttggggttgctccatggaatcagaaacggtcaccagggtccgccaatctctcaccttctttttgcagatgatagcattttctttgccaagagtgatccaagaagtgttcaggtcctgaaatctaccttacagtcctattgcaacgcatcagggcagaaaatcaaccttcaaaaatcttcgctcctcttcggccgatactgccctgatgccatcaaaacatgtgtaaaggactgtttacaagtgtctaacgaggctcttcaggacacctatttgggcatgcctacggagataaactgtgcagtaaccagctcctttaatttcttgtctgaacgggtatggaagagagtgaacgggtggaatgaccggccactgtcaagggctggtaaggagactatgcttaaggcagtagtgcaggcgattccgacctacatcatgagttgttttcaagttccaacaactatttgtgataagatgaaatcctcaatggccaaccattggtggggttatgaagatgggaggaaaaagatgcattggcgctcgtgagaatggctgtctacgccaaaatatcttggcggtatgggtttcagggacttggtcatttttaatcaagcgatgttggccagacagggttggcgtattctcacagatccaaattcactttgctcaagggttctgaaaggtaggtacttcccagactcagatttttggtctgcccctaaacctcgatctgcctcctttacctggcgtagtattttgtttgggcgggagttgttgaaaaagggggtgcgctgggctgttggcgatggttcgaccattaagatcacgaaggacaaatggataccaggtgtgcaagcaggaatggtgaatacccgcttccctatccctgatgatgttactgtcgattggctcatgaatcctgaaaggaatgcttgggatgaggagattgtcaaggcagttttcaacgatgatattgcaagagaagttttgcaggttcccataagtcgtcatgggggagaagattttgtttcttggccacatgacaaaagggggttgtttactgttcgctctgcttacaacttagtgagatcaaatttatttgtggtggctcagagttccaatgggagaggacaacactctggagcgaatgtggactcgcaattctggaaggcactttggacaatcaatgcgccggggaaaatgctgatacatttgtggaggtcagtacatgattgtcttcctacagggttccaactccggagacgccatgttcctgctacggagggatgcatcttttgtggtcatgatgatagaattgagcatgtcttccttgtgtgcccctttgctgcaactgtttgggatgccatcaaggagaagtttcagattaacttgtgcagacgggaattatgcaatataaggcaatgggtgtttgatttcctaactcgcagctctcacattcagaagacagtcctggctgttactctgcggcacatttgggaagcgaggaatttttctaggaataaccctgttactacccacccgcgccaagtgattcacaaaattgtgtcgtatgtcgatatgattgtgcagcactgccccaaggataggaatgcctctgggtgtgatctcccccttccagttacaaagtggaaaccaccgccgccaggcatggtactaattaactcagatgctgcactcttccaagcttctaatcagacgggtttggcctttgtaattcgggatcacagtgccacctgcctgcttgctgcaaacaagaggataaccggattgctctctccagaactagcggaagctttggcgatccgtttcgccttggaacatgcaaaggcggaaggtttccagaatgtgttgatggcctcagattgcctgtcagttatcaagagaattcaatctggggcacgagacctttcagttgttggcgttattgtccgtgatattaagaaattggagactgagttcctggaatgctcctttatcgtttaaccaatgttgcagcacataccttagctcgttgttccgagtctgctacttgtaatatatttcgctatgtaatcccggatcattttcgagacgtactcaatgctgatgcaatttaatcgataaggtgctgcctttgtctaaaaaaaatctatatgtatatggaacaatgctagaaagacttatattgtgaaacgaagagagtagtatgttccttcaaagatttttttccccaaacctcaatcatcgacaagcgtttctaaaagcctcaccatatatacaaagggggtacagtacaagtgacacgactcaacagccacgggcacaacccattttcatttcgcggcaattgctttctcctttctactagattagtggcgcaaatgttcggtacatgcttttgccatgcatcgtcattagccattgatttctccattatcgctagcccctgtgggctccctgttcctttttgccctagctgcatacaatacaagcatggttttctgttgtcctgcttctgcttgtgatgttcaaaccacacgaattttgcaaggatgaacgtacggaaaatccccaaatccccaagcaaaattcatcgccaaacaaatgtgctgtgattacgtgttgatgattaattgcttggaagtcgctagaaacagtgtatgatgcgaatagaaacgaacggaaatggggctcctgctaataattcgaaacgagccgctgggattactccctatcgctgtggatttggctgaaccattattacggtaaagtaataatgaccgtgcacgaggaggaaagagatcattttactacaacttagtgaccgagtaagccaacgtcgatgagtacaagccgtgccatacatgtcactcactgatccccttcaatgatggtgttaccaacaaataatgcaaccgagttaattggaaatggatggattatgatattgatatatacttaagaaaagtatttaagatagatgcatgttcagatttactcttaaaagttgattctttcgaatatataggtgtacacgtagagatgcaagcgggccgactcgtgaattcacttataggtcaaataaatgataattcataggttttcgcgtcgtagctcagccgcatctagatatgcaagtgggtcgatacataaaacatatttatacatcaaattaatatgtaacccgcgagttaaacccataggttatacactaattttgtctataagcgggttcatggataagccctatgtacacgccatggttgccacgtcgcgcacgttttttacgcacgcgcgagcgggtgcgacgacgtgtcgtcgtgtccgccaagaaaaaaaaaaaagggcggcgagcactcgcgtcgccgctccggtcgagagcgtgcgcgaatttcctcatcttgtgagacctcgcctcccggggcgattggtgagtacgccgtgtgaggcgaaatgtgatattgtgatggaaccagacggcttttggcatctgcagtgcagtgcagaggaatatgaatggtccagagacaagacaagtagtgattcctggtttggtttgctaagcactgtagtgattacgaggcctgtttataactttatatgctatacccaagctaacttacccaaggtgtgacgagtcactaaaaagtttggccaacaaattattatccacaacgaaatgagtgtcatctgattaattttcttatggtggaatctgtgcactcatattcaagtactatacttaacatagatgcttgaatctacgactaattataatttcagtgatcgatacattagtggtgtcttcgttagtcttaagatatactacctccttctttaatagagttaattagattcatgccattataaattttatggtttttttaaaacctaagccagcattactggttttatattaagagagagagaaactgtacagacaagagacaacgacccaaattataagggaaaccgggcccgaaaaccatacagctgcacggttaattatggggaaccggctgaaacccaacggacagaagaaagcatgggacctaacacacaactaacaacaacaacggagcccaaatacaggacatcgttgccaagctaaacacaaaaacggcacaacagctccgacatcacagaagaggtgttatcgttgccgagctagccgtccaagcaacccagcagcgccgacttcaccactgcagcgacactgaagccacaaaagtcgccaaagtgaaagcagctccaacatccacaatggatatcagccaagccaccaaagagccacttcctccacatggccagcaccaactctttggaaaagactacaacacgtcatcgttgccaagcgtcgccgcaccccaacagcgagcagctccgacttcatccgcagaagcaaccgaagagtgtgtcgtccaccatagaatgaagcagacccaagaggtttaggcctcgccgaatgccaaggaaagaaaccttttgaaccgaagggaccatcaatagtcatcgatgtaaggaacttccccgaagcgacgcccccaagaaggacacgacgcgtaacaccgtcgccgctcgtccgaagccggagcaaggttttcacctggagatttgtggggcaaatggcagagcaccatgacaacgccttcaagaagggaaacagcgccaacagcgtcgtcatcatcgaactggccaaaggcacggcaaggctttcgccagcgtctgcacattacccacacaagccccccacatcgacggccacacgatagtccacgacgtctcacaagcattcaaccctcgacgcaacctaccgtcgcccacactcccctgctgcaccgaccagaaccggccaaggccgccaagggaccggtcgtcgaagctcggctagccatccatgccgccggccgcgcttccacgtgctgcaccgacctctgccaccgccggccgcacaaccacgcgccgtcgccagcctccacgccgccggccacgcctctacacaccgcaccggcctcccgctgccagccgcgtctccacgctgctgagccagcctccacactccacgtgacgcacccgactccacgccgccgggccggcctccacgccacgccgccggccgcatctccacgggccgcgccggcctccacaccgcgggcctcgcctccacgctcctccacgtgccaccaccaccagagccacgcctcctctgctcccgctgccgcctgcatccccgctgcctgccgccgccactgcatccccgccgccacccgcctcccctcccgcacctggctccagatccagcaatggtcgacgtggattcggtgatgcccgaggtcgcagactccgtcaccgccgccttcaccaccgcggcccacaccccgccgccagtctccgcctccgcctgccgccgccaaccccgcgccctgcgccgcctgtcgccaccacgtccacctactgtcgtcgcccgcgcgccctgcacgcctccggcctcgacgacggcgccgctccgaccggcctccaccctcaaattcgcccatgccagatctagggtggccgccgccacgagccctgcccggccgtttgctcaggtggcggcgaggcagaggggaggggggaagaacggcggcggcggtgggttgggtcgccgcccgagttgcctgagcgggaggcgacgtggggggatacgaggcccgatgtaaggttttgaactattttatggttttaaaatataccattactatttaactatttgaaacgttaccattacaatttcatatatatttaaaatataccactacttattcaaagtgttctctaaaaatttttggactgaattgttcattttccactaatggagctagatctggccggctcttgcgacggtgcgttctcgatctgatgctatctccatcctcctcactctggtgcgaccttggtgcccacaccctctgtcctccaggttacaaggcttctgaagaattattcagagtttgtttatctctaccatggtttcaatgatgaaagggctttgtgaagcgcagggggaagcgcgtgccatgggaatggagcacgaggaggcgcggtgctcgccgccggcggcggcggacgtgacaacggtggccgcggtcgaggctgcggctgcgaacttcatcggctgctgctgctggactgcttccttttcgtgttcagtctctgcatcttgcatcttcagttaacagtacaaaaattgacaatcatcgacatcaacttgctgaatttgagtgtccaagctttgaatcattcaatcgcttccagcggatggatacatatttacatttcttccagtggactgtcacctgctgtagtgctgtagctccaagacatcggatgcaggccggatccatctccattagtacaatttggtccaaaaattttaaaaaatacacaaaaggagtaagtagtggtatatcttaaatacctgtgaatttgtagtggcacgatcttaaatagataaatagtaatggtatattttaaaaccgtaaaatttataatggtatgtatccaatcaacctttttttaatatatgacaccgttcactttttagctaacgtttgactattcgtcttattcaatttttttgtaaatataaaaaaatttaagtcatgcttaaagaccatttgacaataaatcaaatcagaataaaataaataataattacataattttttggaataagacaaatgattaaacatattttaaaaagtcatcggcgtcatatattaaaaaatggagggagtatatagaaaaattattatctgtaagtatggcaagatttgacttaaaaatgtgcattaacaaattagtgaaatatggtttgcaacagtttaaagaaccaacaaaaaaatatggccacttaacattgagggcaaactttggcagcgaatcaaaaggatacggagaagggagcgaataggaataagttcagttcatgaccctcaaatatgatcgaaatctagtccataaccctaaactataaaaccggatatctcgacccctaaactcctaaaaccgaagcaattcgactccctaggcggttttgggaggtggttttgctgacgtggcgccacgtggaaatattgaccaagtcttcattacacgtggcgttgacgtggcaactacgtggcggtagaaataaaaaatatgtgtgggacccattagtcattcacacacaaagaaatgtgggcccactgacatgtagggcccacaagtcagtcctccttcctcctccctcactcccttctctctctttctctccccttcttcccccttcgaccggtggcgcgcggggacttcggcagcggtcggcggtggcggaggcggcatccggcggcggcggtgttcggcag

SEQ ID NO: 9925 - DNA, 43041 bp, Oryza sativa
  unsure (1)..(43041): unsure at all n locations
tatacaaatctgaccatatatatatacagtttctcttgcagagcaaaagtatgttcctatatattaaaggtctgaagatgagtactaaaaaacacacaccttcatatatattcacggcaagagctgcacataaccagtcaggactgcaatagctaagatggccaatggcggcactaggacaaatgcgccaacggtggcgaagaacactgagtcattccgtccactgaccttggtgagcagggcctgcctcttgatgttcctcctctgggagacggtcagggagttgagtttcttcagaccttccttgagcttcttgcccaacgggagggtgtactcaccgtccctgtcaccgataaccgctgaaagttgctcacgaatagtagtttgcacacggggttctgtaggagcaccgttctccacgcctgatgagccattgtgattagttgccacatatgctaattttgggacatgaatgagaaagaacaacgcagaattgcaggttttgtgtggcacataccaatgccatcagatgtaggggttgtcagctgctccaggagatccaactgggtgcgcgccgaagaaacttcagaacaaaatgtgtcaatgttaagccatttggcaacaaaagtagcttcatgggaacaagtaggctatatgttcaatacttcaatgcaacaaaatgaactaataatatattgtagtacccatacttcaaatccctggactatgtagctacatttatgctaatagaaatggggggcctgggcattgctctaaaaaaattaaagacaaaaaatacttcaaatccctgacagactttcttcgaaaataaaaacctctgacagcttaacacaactcaatgatactacagtacttctgaaatttatggtcgagagattagaatcgtttcgcaattgaattcacaccatgtctgtctatgtaccgaattgcacaagctagagtggtatgactacacgaacacgacaaaattttcttaattctaattgtccaggtgtattgtgacgattcttttgagtactatatctagaaatccctgccgactcctcattggcgtcttttcgaacacaatttacacgttgcaaaataactctgattgagcatacaagtgcagactgcagagacactgaagcagttcgtggactactaattattagtagttaggctagcttacatgccagatcttcacatcttctctggacattttcctagaggacatttcaatcctacacatatgagaatccagaggtaactatcgaagtcgaggaggtgtacggtgtacctgagatggcggggtcctgcgtcgcgccttcctgccgggcggcagccgcggccttgcagccggcgcccagcgatctctgcaccggggatacggtcgccgccctaggcggcaccctgctgctcctcacggccgccgcgtccacggcctggagcctcgtggcggacgaaggcgggaagctgcacgccatggctcaccctctcctcctcctcttcctcgacttcgctggaaagtcggtcgtggcaaaaacaaaaattcgatttcaattcccttttcccgtttttttcgtggcgagcgagcttgcgtcaccggccttcacggttccaaccacaagaggagaggagagggaagccgcgctgcgcgcaccacatgtttgagctccgtccactgagaggccgggcccactgagccagcgacttgggccgcatctcgtggaagaggcccatcaaaacgagtacaaactccagcccagcccacttcgccgagtcgccgacctcccctctcctttcctcttcttccccaccggcgagtcggcggcgaccgatccctccccgagccgccgccgccgccgcgatgtcgtcgccgggagagagcgggccttcggcttcggcaaaggacacggatgccgcgcagagggcgcaggagcaggagcccgggaagcaggggggcgcgacgagggagcggcggatggagtcgctggggtggctgacggagtcggcggtgatgccgaagaagcacaaggccatcgagggggtcggcgccgcgtccatcctcgacctcaaggcgcagctctaccgcacccaggaggaggcccgcaagcccaccgcccacgacgccgccgcggcggctgctgcctcgggcgagttccgccgggccaagaagcgcgccgctcctggtgaccccctcggcgcgaagaattccggcgtcgatgcccgcgcccacaagtacgtctccttactacttctcatcgacctgattatccggggaattgacgaatcagtcccaattgctgccctttgctaggtattagatgccttgaaatggttattgttcatatgatctagtagtaggaggatgaacggaatactttagttgcaatctgtagttaatcctcatcgttctttgctgaacaaaatgaataatcccctttgcaacatgactagatttggtttgggcttataaatctaggttatgtgacttgcctatcatacaaggcagcaagctggaattacttcagaacaatatcagtaactggttcatattggagatcaatgtttttatgcttctttgtattggatgtcatggaatttgattaggtaaaacaattttagatagtgtaccttttagcaattgtacagctggtaacaaatgtagggcccgttgcctgtacttctgctacattggtcatttctccataaagacacagcttttgttcactagtggaaattaacaatggatatgatcaaagaacaattacggctagatgttactatttgatgttccttccatcttgctcagaccaatcatctgatatcctgaccgcaatggctcttaagaagaatttccttttctcattcagcatttctacacatcgtcagctaactctcccctttgcatttgtctagtgtagcatttctaagaatgttgattacgtattttgcttattatgacgtccataatatgctacctgtgttttttcccctcttgctcatgctcttgaccagcactaatgcctaattcctactttgatatttgcttttgcaacagagataagttggagctaaaagctgtgaaggatggttcagtaagttatgctgccttagaaaagaaggcagaattgtatgaaaaattatcaagaggcgagatacctgatgaagaagacaaggaaaaatattgtgttgactttttccaaaagagtttcgatcatgtctatgagcctcggcaaccagagagccagagtgttattgacagggcagaaccagaaaatgacaatgatgattctatgtcaagtgccaaaccagtaggccttggtcgaactggcactactattgacagagatgagcacaagcgctttgtaaggtactgttttctctggacttggcacaagtgaatttatttgtgttttgagttgctatttatcgcccgtttatttccaaagcatgcgtataagtgtattgctctgatactgaagaagagcaaaaacataattggttgtccttgcattttagtcatttgatgcttacatagaccattcaacatgaatttacttcctaaaatgttggtattttgtgcatttctgtgtaccaacatttctttttagcatgcccatatagccataatcaattgtagtaatccttaacaacagtgttgtgccgccaaacagttcacatacttaagtccagatctcttcatgtgatcaggaccgtttgtaaatctttacaagctgtgttcatcggcacgatgtaaggccttccagtttcagtaaaaaggaataacatttcatcaagagcttaatgtgtaaaatacgaaggcaaataattctttcctgaacatttagatgtgcaactatgtcatcagctaccaagtgatactatcatttaacttccaacattgacacttatgtagttctgttaacattacgacaatactgtgtctcaggccttttattgacttgtgccatgatgttctgcagggaggttcatgaggaagtaagtgaggcaaggcagaaggcttcaacaatgaaatcccgacgacaagagcaggaggctgctcgtagagagaaactcaagcaggcttatttgaagaaacgcctggagaagttacttgctgagaaacgggccacttcagcaaccgacgaccaaccagctagctagtccaggttttgtatgtcctcacttatgtcctgtagcagccttagtagtttcatggcaattcatcatgagttttcctttgaaagtggttctttgatttagcagaaccaaattcagaaaacgttgtcatgtaaagttgtttctacagtttgattcaaacaatgttgtttctacagcatgtaattgtacaaatctacacaattgaaaggcatcttcatcttcatgtgatttaccaggtcttactgtgagtccctgggtgattcctctcttgtatgcaaccataatccctttaattagggggaagcatggtggtatggagccatggtggtgaagtagtgggtgcatgactttacccaccagagttcaaatcctagagcccacgaatattacaggcctgtttggcacaacttcagcttcagctctacctctcttggagctggagctcagcctaatattttcagctttatctataatgggagcggagctaggtggagcactctcacaaaatgaactagagatgtgaagctgagtttagactgttccacaactctactctagatgtaactcgtagagctaaatttaggagttagaactctaccaaatagaccttacacatatgcaggtttgctttcaacagaattttagtgaggttaggaatatgccactagtttgtttataggctagtcatttaaactgactcacagacaaactgtttgtttgtttgggcttcggtttcttagtcaggtgtaattctgccattgtaaccatttgagaagcttctcgtggggcatatatcccttctgcgctgtactgtaattcggtgcatgcatatgcatagctaactcaaaagctggccaacgtcacgaccaaaatctcgttggttgtaggtgccaactttaaaatggtaccagtgcacaaccgagaggagaaagaagcaggttccatattctatattccttttgtttggatgaaagagaaccgctggtgttaaagaaaaccaaggataaaaagttcgctggcgctttctgtgattctttccaaatcggcacataaatttcttgggccgaactgcatttcatcccgcctcctctcctgcgagttgtgcgtattgttccctgcgtcactgcgtgctcttgaggccgaaaggaacgggatggccaagacggcgccggagcagaaagcagtgacgccggcgacgccggcggcggctgcggcgagcccgttcgagttccatgtgtatgggccacgcaacctgtcgtcgacgacatggagagacctccttcgatcgagctggtaagttactctcgcgcaaaagaaagatacgatttcaagatcaaagaaggctgcttggttaagttcaacgatctttgtgtgtgtgtgtgtgttgtgtgtgtgttgttgggggatcttcttttcaatgagtttttataggtttagatcattttggttgtgctacggtgcttgcggagttagcattgtttgagttatttgtttgatcttcttcaattcctttactgggatatagttcatgtcctcaatgaagaactaggattatttttcaggttgtaaatagtccgatcaacaattttggctttagtcggtttatgtgcctaatacaggactggtggtgaaagttttaaaatcatgttctaaacaagttgagagtatatttaaaaaaccacaactctcttgtcagaactataagtttgctacaaactttagatagatatttcacaaaactacaataacaataaaattgttttattatcaaataaactacaaatttaagtatcacatgtgagcccaacttgcaacaaagcagtaatatatttgtgtctgatgaggggggcctaatcggtcaaacaaaagtttacaattctacgataaaatcattaactattattgtagttctatgaaatggcgcaactaataaatcgataatttgatagcacaatacttgcagtctactccgtttcaaattataagtcgttttaactttagtcaaaatttaactattttaagtctaactaagtttatagacaaatataaaaatatttatagtatcaaattagttttattaaactaataattaaatatattttcataacatatttgtcttgggttgaaaatgttaatttttctataaacttcatcaaatttaaagcagtttgaagtaaaaacgacttgcaatataaaatagagggagcggcgaaatttacttcgaaaaaaaaaaggagtcacacctgcacagttgcgcaaaagcattcccctcttgcagccagctacagcctacagcggcttctcacgttgttggcgttgcgcggcgcatgcaggaagaacgccaactaccggcgaatggtgatcgcgtgcttcatccagggcgtctacctgctggagctcgaccggcaggagaggcgcgacgagcgcaccggcgccctggcgccgcagtggtggcgccccttcaagtacaggctcgcccaggcgctcgtcgacgagcgcgacggctccgtctacggcgccgtgctcgagtgggaccgccaggccgcgctctgcgactacatccccttccgccccgccggcgcgcccgccgccgtcgtggcgctgcggggcacgctcctcagggcgcccacgttccgccgcgacgtcaccgacgacctccggttcctcgcgtgggacagcctcaagggctccgtccgcttcgccggcgcgctcgccgcgctgcgcgccgccacgggcaggctcggcgccgggagcgtgtgcgtcggcggccactcgctgggcgccgggttcgcgctgcaggtggggaaggcgctcgccaaggagggcgtcttcgtggagtgccacgtcttcaacccgccgtccgtgtcgctggccatgagcctcaggggtttcgccgagaccgccggcgagctgtgggggcgcgtgcggtcgtggatcccctactacggtggctcctcctcctcctcctcccaggccgcggacgccggcggcggcggcgagagcgaggaggcgaaggcgatgtgcaggtggctgccgcacctgtacatcaacaccaacgactacatctgctgctactacaacgacgcggcggccgggacggcgaccgtggcggccggaggaggaggaggcgggagcgcgagcggcaaggcggtggcggcggctgcggcggtgcgagggaccggcggcggcggcgcgcgcgtggcgaggatgctggtggcgtccaagggcccgaccaagttcttggaggcgcatgggctggagcagtggtgggccgacgacgtcgagctgcaggtggcgctcaaccacagcaagctcatcgaccggcagctcaggtcgctctacgccgccccgccggccgccgcaagctaggccgacgaaattgctctcaaccaatgacgttgattgtactgctttagtacccagattacattctacctggaggatttacttacgagtatctcaaaggtttatagaagagtggttaaaaaaattgcgtaaaaaaaattaagattaggatatctcaaaaacaaataaagcgagtttgattattcacatttcgagcaaacaaaagaaccattataactgaactggaaaaacttaaaatgagagagtgaaaaaaagagagacaaaagaacgactccgctggggatcgaacccagaatctctggttccgtagaccagcgccttatccattgggccacggagtcctggatgcttaatgtgacatactatttttctttagttaaaatgaatgaccaagagaattgtaatttcggtgcccaaagatttagttatttcaagcactggtggtgtaccagcgaatactcgatccaaagctatcactttatcacaagacgatagttcactctagaatgagcaggaaactgactatatatagattccattacaaagctcagtgcctcagttctgtaatatacaattgattcgtccatccaattacttgggtgaaccatcggaacaactacccgacgttcacctctagtcgtaatctgattcctcggacaattcaccgctttcctgcattgaaaataaggtaagtatgattttttgcatggaaaaattgaatagacacgaaaaaaacacgtgcaatatatatgcagaaaatacacctttttcttgtcaaattcagccaccgccttctcatactctgcacgcttctcggttgctatatcataatacttcactctttcctggtgtaatgaacaaaagtgaaattgttgacataagtatgatatgagtttatgtctaaaatgcaatgcgcaaaaatgtgaaatgaagctgtacatatctgatatgagatattgtattgcctagaccatttattttgacaatgagtcagaattcctacatagtccactgtgtactaaactgataatttgaaagcatagtattatttaagaacccaaaagaagagcctgaaaaaacaaaggaaatatatatttaccaatcaaaagttcaaaacaacacaaatagttcacccggccttttctggctttgattgcatgaatggtctttgagtgaacccaaactgctggagccaacaatttctatcttttcctggttcaactggcagtttggtccaaactatgatttctaaaaaggaaaattccaaactacatatctggtatttaaagctctaaggaatccacaggtgatcttgatatgcttcacagcagtagcaccttcttttgttttccctatgggttggtagcatgaaaaaaataggaaacatgggtatttggcagttggcaccaaatcctttgaaatgcgactatactaaacatacatggaatgaacctactgaacaaaagggggaaaaagtaaatatgcaatcatgtaccattatccaactgaacagtagatgtaacacctacaaagtacattcttgggcttctacagttacagtccatgtcaatgtattactttagctgtttgagcgtatcggctacaaagcttctacagttgcaatatatgtcaatccgatccttcagctatttcgttagaattactccctagaggcctagactcaatgatcactttttttgtaggctgtaccagttaattcaaggaagtttagaataaatagattagttatctagttttaacactaggcacataaacagtagacaaaaaagagcagatatggctcaaatatccctttttaaactttgaaattaaaccttactaatacaatacactgaagcaggaacttctgcttgatggtttaaaaaaaaagtgattttgaaacaaaagaataagtcaatatacatctcaactccgcatgtacagatttgtggtgccatcatgtttctatcaatcattttatgtgtttgttgggtttgctaccatgccaaaatgttggcaatgccaaaacataggcaagttttggcacttccagatttttggcaacttttgtgtggtgtaggtaaattttggtagcaaaccaaatggtgccaaattactatacaagaagccaacattttggtagggcaagttttggcttcaaaccaaaacagccatgcgttacaacttacagagaagcatggtttggtacttgagtgatagaaaatttacagcaactagagacctaattgaccacaaacatcactaaggtgaaatcacaaacctcaaatgtcattgtattccatttctcgccacatgccttccctacctgcagggtaagatatattactagatgactaagtagcttaaagcttcaacgttaactgatggaaacttacttcttgcattgattttacacttggattttcttccttgtaagttttccgaaaatcctcccttcagcagaccataacagtttttcagtaaaacttgactgagttgattcagtacaagatatgaaaataagaggcaaaaacaacagagtaacttttgtgttttggttacacctaaatggctaaatttatgtgaaacacctcaaggaagtaagcactatgtttaatgttgatgactggatgcggtataaagcatctagacaattatggtagcatgtaaatgttgccattactctctatcagtagctaaaacacttcgtaaccatcaaaagcatgaccaagtcaaaaacatatgcattcattttatatcagtaaccacacatctttcgatgcaattgtggacaaggagcatcagatatgcctgttcaattaggtaaaggctgtgcccttcgcatatgttgcaggggaagcacacactttggtactcaaaaaaaaagtggtgcatagtttcagttgccaactcccaagataggaccacaaaataacctgcctcactccgtctttaggaaaaacaatcaaattctaataaagaacagggcaatcctatataatatcgcaggataactcaaataggaatctaggatcccagccttccaaaatgagatgtaaacaatgccaatctacataaacttggggtgaaacctgattgcacaagctacaacaatgagtccatccatgactagggaacagatcgaaaaatgcacctcagattgagatgccctgtaaaacctagtaaattcagtccctaacatacccaaccattttcctaattgccacggaccggaggcagtatcgtaaatatttcgcatgcgaacttgctgcaccgtattaccaccaaggcaccactcaattcgaagttggtgagtaaaaaagctcctaaaacaaagttctaatctatgcaaggaaacaattcgattaataaaaagaaaaagaaataagcccccggtaacagcagcaccaatcacctcgtggcaagagccagccacggcacgcactgacagaccaggcaaatccacacaaagagaaagggaaccagataatacacgcacatgaagtagaagaaggcggtgggcggcttcttggggcggcgccggtcgacgaggggctgccccttcttccgggacggcggcggctgcggctgcggcggcggcggcttgggccgcggcttgacaggaggcagccgcaccgttttcagcggcttcggcgccgtctgcgacctcgtcttcatccctccgccgcctgggccgccggggtttttagtacacgcggcgagggtttaggccccgagcagccggagccggaggagacggaggtttgcagcggcgaaaggaaaagagacggcgaagcgaggcggagaggagagagtagactagatctctcgttgggccggccgtgcggcccagtggagctgggctttcggcccatgcagcctcggccgctgctggtacaagtggcgcggggcgttgtgcgtgctggttttgcgatggattagtaccacctcggtagatggaggagagggaggaggacgtgatgggtataagacgggggtggggggctagctagagaggcatctttgcgcttggggcaatgacgcagctagtgaggtaataccgaggcgcgtcaattgctggttgaaaactatttccaaaccccctctttggcccgtcagggccactgagaatttctggaagggctccttctcttcggggagggtaaagcccaacaaatcttgaatcccaaaatttttatacctcaaaacaattttacgtattttgctcggtagaagctgcaattcggagtctataaccacactaccagagttaagttattaataagttgtttattttttaattaaagtttttttaatccaatttatataaaaaaaataataagatttatgatacttttttcttttgattttatagtattatccacattaatatagatgactttatccaattaatatagatgactttatagcattgttgaaaatatagatgactttatagcattgtcgaaagtgttacattatgaaacagagggagtattaaattagttccattaaattataataaatatattttaataaaattttgtttttattgaaaatgctactatgtttcgctataattttagaaaaaaaaatcaaacaacttataatataaaatggaaggagaacaaatttaaaacttccgttttgaaaaacacacccttaaaccagtttagaaaatgttcttacgaagaaaaacgagaaagtagaataatttcttattattaattaactggaacttttatattttatatttagatcttaaacctaaaataacaatgtatccactgaaacttttatattttagaccctaaaccttacaataaccatgtatctattttagatcttacgtgcaattagtcttttatgtgaccttatctttacatgacccatccgagcctctcctactttatctatttcctctccctcccccaatgtcttcccaccatggccatttttcttcaaagacaccgacgactccaccaccttaatttttttcctctccctcactcctctctctctatattttcgtatagattctattttcttcgaagaggctgacgacttcgccactacaacgctacttcattgcccatctctgcctctctccctctccccatccaccatcatgcaaccctcccttcttcgttgacgtcagtgccgtctcttctcccttctcctccgttgaatcaaatagctcactggatccgaatgtgagcttatcagatctcgccgcgagctcgctggatttgctgtggagagtggtgatgaccatggtggcgagcggcgatgacttgcatgacagtccttggtggcggtgagcggcgatgaccatggcaaatcctcctcgcccgaaatctctttttcaccaagcatatcacagggcttcaaacttgcccaacacgtggccccgagctatgggttcctagctcctgagctgaggcatggtcgaggtaaccatgacctttgcaggttgtgcgtgacatcgtgagaccatgatccccaatgaacttgttttagataaatgattgctgatagaagttattttaagatgatgggagtatattttgtttaatatcccttccttatatatatatatatatatatatatatagagagagagagagagagagttactttgaccaataattagtctgttagatataattttaagtcaaaaaaataatgtattagattaatatttaaaagtacttgcttacaatatgattgtatttttctatcacataaataatattttaatagaaatgattattgatcaaaatattttttatgaaacaaaatacaccttatattttaaaatagagagtactacttttccaatctatgcaaccatattgcttaatactgccttcatccaaaagtctaagacctactccctccgttccaaaaaaaactcaactcccttataggacaacgaatttggatagattctagtcacatccagattcgttgtcctagaaggggtcacatcccttactaggttgagttttttttggatggagggagtatttctttgtcaccaaacttaagaaaaaattaactcattcactatgtgataaaagcaacaaactatacatatgcatttaaccagtaagtaataagatggtttattagattctggtcaacaatttaatttcacatatagagattataaatagatcttagacttacaaaagttttaaaaatataaaatagatcttagattttttatagggcgatagtagttatactgatagtgcttttatttctcatcgtactttccccatgcatctaaccactgctcttagaaccatcaaaataatttcagcttaatcttattttattttgttaaaccccttaaaaatgcttattcttgtgaaggagagagtatttaaccctctacttggttattatgccgttattaaaggtcaactatcttagggtaaaggtttactttagaaaaacggatctagcgtgggtgttgggggaagttggggggactcgagtctcctctaccacgctggatcaccattgagagaaggcgagagaggagaagggaaagggaagaagagggtgagaaagaagagtaggagctggaagagacaggacacatctctattaaaattccagatccgttcctgcacttgcaccacttgatgattgacttaccaatcgagagtcgttgttatatactatgttccatgatgagtggtactatatatgtcattgtcagcaatttattccactgaatgatctgatccctgtcccgcgtaggcgcgtggggtgtcacttacgcggtgcatccagacgcgcgcggtacgcgccccagacgcggcccggcgagtcaaccaaccggtgagcaactgctcttttctcaattgacacagatctgcacactccattccaaaatgattttattttttattatcttatttattctaaaataattttatttttatttattattatattagagtttataaaaaatgcatttaactagagtggaagaaagttacattatgatttgatagaatggagagtattttatttctttatgttggtctaggttggcatgtactccttctctaatttattttttacccatcccacacataccaatataaaacaaaaaaaatacaatacaaatatactttattagattccaatataattatttctcactctaactacttttaatataattattttccactttcacaaactccgatacaataattatatgaaaataaatttattttaggataaacgagaggagccagaaataagcttactatagaacagagagagtatagaatagctataaaataaagttattttaagtcggaggtatcactaattcgatgcgatatctaccgatctttatactccagttacagattctgagattccataactgcgggcgatcagcgcaaaatctaaaaaaagaacaacactaatggtaaaggtctaatttacctaaataataaggattggataacgcgtggtgatgtggtgatgcggtccgtaccccgtggtcgagccttattttacttctataaaatcaaacgactttaaaaaaaatgtggaataatttatgcagtgcaagcaacacctttccaggactgctaaagttattatttataaatttctacttttttctataaaaacaaatctattacataactgttcatatttgtaataatagcaatatcatattccattatatttattgtttatatgatggagggaataactaaaaaaatagtttcaggcttagaaaagttgcgacggcagtgaatggtgcctaaagccatcccaacccaaaaattatcaactactttccatacttgccatgtcatatagacactatgtatagaaattactccttccgtttcaagttataagacgttttgaactgctttaagcttgaccaagattatagaaaaaagtagtaacattttcaactcaagacaaatttattatgaaaatatattcaattattaatttgatgaaactaatttagtattataaatattgttatatttgtcaataacttagtcaaacttgaaacagtttgactttgaccacggttaaaacgtcttgtaacctgaaacggagggagtatatatccaatggatggtgttttcacattaaattcttatccaatcacctctcttttctctcctttcatgcatctatccccttgtttttatttttggtttttgtgtagagatggtttcttacatgagaaatggtgttttatctttttacctctctactcattaactctcttgcatattagatttttgcttctgtgacaatataattaatgatatggacactatacgacatgtagggctggggatggcctaagattagtctgtattgagtggatatcttaaagttttaaaagttcctctttaaagtttagtgcgtgcgcgcctatctgtttcgtctaatcgggaaaaagttactacctccgtcccaaaatataagcatttttaactatgaatctggacaatatttaactatgaatctggacattgtccagattcatagttaaaaatgcttatattttgggacggagggagtatatggttttggcctttttacagttccgtcagtaaatgaatctttttgtccctttcaaataaatgataaatcgggattattaaaggatttgagtcctatagtttttctttccctaaatgagcctttagaagaaagggattgggaactattaaatcccataaaactctaattgaatacctaaatccatagagttctctataagtttttatcttcccgtaaattcctgaatattaattttgtgctctatccaaagttttaaacaatcattattgtactttcttcctgtgtattataatcccacgtttatacttttgttctttctactcctgcattttcttgagcatgcgtttaaaatggggttacggattttggattatagattgttggcttcctaagcgactaaacggtatttaagaaacattttttcggtatttcttagaaactttttccattaacctttaccagtacattttttcctttattcaaacaatcattatcatatttttcaagtgttttgtaatctttttgtctatactcgtgtttctaacttgatgaaactccacgcgttgctttaaaagtttagtatgataatagtagaaacatgtaatatagctagacgtcttaagcttatagaatttgtatatttgatcgatccttgcaaaggccataacaattaagttgatgtggtttatgataatttaaatggtatatagattgataatttaaaagtaaaagtaaggtgatgtaactttataagagaagaaaatgaggaaaataatttgcactatagattaataatcaaaaggctaaaagcaattgagatgatatggtttaatgagagaatatagaaacattaactaaataagaatgaactatatatgggatattgtagaaaatgataaagagatatatgttgaaatattatgtaaattatgtgggatgatgatttaacatacttatatttttaaagttttaacgtataataaagtatagatgatatagtatgcttgtataatgtttaagatgtaacaatttctaatggatgattatatggtatttttgcatgttgagatttaagatgtagtgggttgtaactttatagatagtatagataaaatcttgtgtttttcctacttcaacgttttcttcagcatgcagtttaaaggcggttctgggttaagtattataaactatcacgtgcatgtttcacaagatactaaacggcgtagtttttatttaaagaaatcgttgtcaatatttcttagaaagctttaattcaacgtcctaatatttaatccgtttgtttaatatacccttaaataattatcataaactcattttcatccatcacccgtcatcccacagctaaaaaaccatgccttaagtttgctggaagtcccccaaacaaatgccatgaatagagaggtgaaaactggagagaaactcccaagcaactcccaaagtctcaatctgctcaacggacatgttccaatgattcacttgttcgttattaattgttacattttctttgtttatatatacgcacatgtaaggatgcaggaagacgatcgatcaaggttcacctcggaaaagaaaaaagaacagaaagaaagacgatctagagggagccaaagattgcaagatcgatcgcaaggtaacgtacacgtacaggtgagaggaatcgatgccggccgacgcgcgagctgctccgccgtcgtgcccgttcccgacgatacggtcgcatggcgccgccgtggcgaggtcgcacgcctacgactggctcgcgctgctcctcctcgtcgccgtcgacggcctcctcaacgccatcgagccgttccaccggttcgtcggcgccggcatgatgaccgatctcagataccccatgaagcgcaacaccgtccccatctgggccgtcccggtgcggcgcaattataattatctgcgatttttatgatccgtccctcgattaagtttcctctttaattacgtgatctaatcaggattatctctcgtcctaaatggcgcagatcgtcgctgtcattgggcccatgattgtcttcaccgtcgtctacttcaggaggaggaacgtgtacgatcttcaccatgctgtgctaggtacttaaatcttccaacgttgccctccattccattgcaacatctccttaatttctttgttgtgacgaacattttgatccatcgacgagcaggcattctgttttcggtgctgattaccggcgtgctcaccgacgcgatcaaggatgccgtcggccgcccgaggccgaacttcttctggcgctgcttccccgacggaatcgcggtataacagcaaatctcaacttaattagcccctcaaaacagtcaaacctctctggaatttacgccccaagaacgcctcgcttatcgagcgatacacacatgtgctgtgctgtgctgtgcctgtgcccaggtgttcgataacgtcaccacgggagtcatctgccacggcgacgcgagcgtgatcaaggagggacacaagagcttcccgagcggccacacttcatgtgagtcaagtctatatatctcactcccctcatcacataacaatagatcaagatcagccaactgaatgtctgatcattcttctatctagattgattgagtgaatgatataaacaagaacttactacagtgaaattccaatcactgaattcacggtatatatagtgagtttgtgacactgacagcagaaagccagaaatgatatgttctcgtgctctgtggctgcagggtctttcgccggtctggggttcctgtcgtggtaccttgccgggaagatcacggtgttcgaccggcgcgggcacgtcgccaagctgtgcgtcgtcctcgcgcctctgctcgttgcggcgatggtcgccatctcgagggtggacgactactggcaccattggcaagacgtctgcacgggaggcgtccttggtacgtactccactatataccactgacactgtacatgcttgatgaagttgcggttttatcagaatcgatattgtgagctatatatctcgttctctctgctgctaatggtcagtgctcgtctataggattggtggttgcctctgtctgctatcttcagttcttcccggctccttcagatgagaaaggtgtgttctgctttctcccttcgtttctctactttcttgagatggattacacagcataccgaccacggcgtccaacaaaggattaaaatcacggtggtgtaatcggattggttaccagttaccactcttgaaccaccaacggtatacgggggagccgtcaaagaagtttaaatttgaaattgaaatcatattaatggtatatccttagccacaattataataaagaaaaaaagtgcaaattgagaagtaggcaccttcaatagaaaaaccgaaaaggacagtccgctcgtcaccgtaattcaacacaagtcgagttatcgtgactagctgccacatgtggccgtccgcaccatagttcgagagaacatcaaggccaaatctgacttctcaaggcaaccggatctacatgagtctaagttgttagcctgctagatctgtctcagcccaaagggccacaatatttgagctaattctaaatattaaaaaaaaacttcaaagctagtaacttcttaaaggatcaaaaacagctaggtccaaacgggccaaaggtcaccagatccaacagcatcgagcttgagagctgttgcatccgagttcattagatgagaagtggaggaaagtaatggcagatgatatatgctaggaacgacatagtcatcctaaatctggtgacatttagttccgcctagcatgagaggaaggggagaatgtgccgcttaggaaaagtgtcacaaggaggtgtcagggagaggatggggcaaggaataggggctagcagcattggggaagcgaaggtagcatcgatgacagaaatagaaaggggagcatcacccaggagaggggtggagaagaagtgtgacaagtaaggaggatcaggaatctggcaacggcccgaatcaattggaaaagggattaaggacaattcactcatcgccacaattcaactcaagccaagttatagtgaccagttgcccgcactatagttcgagggagcaccaaggctagatctgatttctcaaggcaaccggatccacacaagcctagaccgctagattcgaccatctcaaaccggaggtctgctacatttgagcacattttaagcataaaaaatcaattccaaagctagtaacttcttgaaagaccaaagcagccagatccaaacatgcctgaagtcactagatctagctgcattgagctcgagagccattgcagaagagttcattggatgagaaaaggagtggaggcctaaactggcaggtgatgctaggagcatggtcctaaatttggtggcgtttagttcagcctgagtggaaggggagggggtgctacttaggaaaggtggcacatgaaggtaccagggagaggcctgggcaaggaagaagagcaatagtattgggggagtgaaggcaccggaaatagacagagaaaaaggagcatcaccaggagagaggtggagagagagtgtaactcgggggatcagaaagcaggtaacggccttaatcaagtgaaaaaggggattaaggtttcttggttatatagattttcgtaaaaatgagtagtctgttgacttagatacgacgtatgtctcgtggataattgtattttgatctacttatgaggtggtaatacttttcatatgcttaggcatatgaaaatgtatgcattagccatggaaaaatgtttgaagatttttaattaaaaaccgactactattggaaaataaacaacaagttaccactgataaccggtttttaaattaaaatgttggattcaagcttttatatggcaaccaaattgttattcgctacgtgagagaacgatattattttcttttctaggaataatatattcaaaaccttgcattaactagtggttgcaccacgccaatggcagggttctggcctcacgcgcactttaggtacatcaccgagaggggaagcgagaacccaacgcagcaagccaccgaaccactggacgccatggaaaccggtaggggaggccaatgaacaaggtgcaagcaagaccaatcttgtgtatataaggccataatgtacagctcctcctcaaggcacgggaggtaatcgtcgttagtttgtaaatactttggcgtgggccaatggtaccgactaacttgactactgacctgacgcaaataggtgttgtttgtacatactgtatgtattttcaacgaagtttgtacatatgtattggttttgcttacttatgtactcctatgtattttaaataattttagtgtctaaaattccgttcttctcccaagaatggcacggggtcagatcaagctctgtgttaaggcctgaactggcccatcctatttgggcttgaattcaagaaatcattgtgaaaagaaataagtctattttgtgtcccacatcttttgcttctaaattctggttgaatcacctctgccatcttctaaaactgttacaaatagacttcttctatgcttcggaaagtggtttttttaacgtggttgagtcgatcagaaacggacggaaattagctttagcatattcgttttcatattatcttttttggaatcgaaaacctggatacagaaataaaatcaaatattatcgaatacagataaggagcgaaaacgaaacggaaagaatatggcaacgaatatttgccggtatataaatatcccctcaaattgagtttccttaatcaaggaagagatatcgcttgttttttatcaacgcctccaacatttatattgtcaattttataggtggtcccacaaccgtatgtgaaaatcgattttcatggctattctcttaagagacccacatgtaaatatgattattcattttttaatcccaagatattttacaatatttatagcttacttaccatatcactaatcaagttcttgttgtataaattggaggtgttatttattttatttcgcatcttcaaaacttatagtgtttgttttatagtttaaaaagtttcaaatataaattttataaactataaagtggtagatcccattaagctctacaactttgatatggaacacatctccatcaaatgtcgtttgaattgcatatctgagattttgtaaaaaaacatatatggtattttataataaatatttagacccttaaataatctcaaataataacattatcaacaagaaagttgtagatctcatcgagctctacaattttgatataaagtttagggataagcccatcttacaccctttaactctttacttcgtctaaaatacaccctcgaactttaaaaccaagcatttaacaccccccaactattaatatcagacaagttacacccctgaacggtttgtaggctggttttggtacggtaggacgtcaccataggatgccatgtgtaaaaaaagcagtgggtctcacatgtcagggttagctttcttttcttctcttctctctccctctcacgggcatagcctcacagaccggtgttaaggagtagagaatcgaagctgctgccatgcgccccgtcttcttcaaccttgggcaagcggcgggctcatcatcgagctcgccatcggccccttcttctattgagctcacccaaggggacatcaccagcgccgcttcatccccttgtagccgtcatcataggcacacgccatagctgcacgtagctcctccgccttccctgtctcacactagcatgccccttcgcggctccgccgcctgtgccgattgcagctccactatcatgcttcgtctcccttagagcaccgcatccgctccctccaccaccaaaatcgagctagagcactgcatccgtcccctcagctgagcttcacgtgccctacagccaccgctccagcgagctgctggcggcgatagatgcagctagcttgggctgctccatcatcgatggagggaaggaggagaggtggcgtgacatgtgggaccctttttttttacacgtggcatattatttaccaaaaccaccctacaaactgccgggggtgtaatgtgtctagtattggtagtttgaggatatggaatacccggttttaaagttcaagggtgtactttagacaaagcatagagttagggggtgtaaaatggacttttccctaaagtttatcttcatctaactctgtatgaaaaaagttatgtatatatacgtgttttttctaaaatttgatccatgtctgcggatatccaaacaaaatttctggatagtttccaatcatttcccttattgtatttgtttttgtttccgactaaaaaaatccgaattcatttccgaatccgagaatttccagataattccgacctatctgaatttgaaaaatggtccggacggacaaaaactatccagtttcaaccctacaagtagatgggacttgcagttgactcgctgagaacatgtccacgcttgaggcaaatgcctataaactaccggcaaattgggaaaaaaaaagaagaaaagaagaaaaattgaacttgcacactcacttgatgaagatacacgagttgttttctgaggcactgcatatcttttgacttaggagtagtaattaattatacttcaccaaatatgcatactgaaatcaattgggccatccaccatcaaggcatcaacattatctctgcagatgcatcagacggcaataaggcatactcctatgtactgctacgtgcgtcccccaatgtccctagtagcggttttcagtcagagcgctcttttcccggcatgtcgcacgctttgctgctctctcattctcctccccacagccactgcagataaggtggtatgttctgctacaaacaggccttgtatggtcgagctagcagcagattaaattctctctcttcttgcaagttcgactagattttcaggtggtttgatgtggactgtagaatggatagaatcttaaaacgtgcttgctttggaggatatttcgtgatgtcgtcaccacacgtcgcaaagaaagggacgtcgcttgcagagaccatagtaaaacacatcacctctacagtgatcttatttgtcgataatattttactatcagtattctcttcggtgaaaactatatcaaccattgtttttattataaatatgttactaataattaatgtggtagtataaatagatacgattcattaaattaaaaatacaatcaacctagattaattcttttataagtaaagatcatcataaagcaccacctttcgcatcgatttttaaccttaagcattgtaaaaggtcagttcggataaggtgctagttcctcaagttgagttgcggtacgtagaacccaacaagtcaaaaatatcgtcgttgagaaatgtcatgcgcttttgttgtttactggtactggcgctgccgatcgcgcgatgagccaaaccactaccgtcgctttagaaacatcaaacagcgaaactgatggtagaagacaagcgtgaggacagggaaaggaggataattcatcccaccaaacgtagaaaaagagacgggcagaaattaatggtgtgggcgttggtagttttctcggagggaatcagtagaaaatcagcactaggcttgttttatatatttaccctcggttataatgcccattcacatagttttgaaattttgtactagttctttttttccctttacaaaagactactgcatatattatctatcactccacatagtatgtaagataaatttcgattcgtaggtaacgaaacgaatataacatattcaattgtgaaagtgtctatatatttatcgtctgatttgggtgtatattataaattggtcttcacatgtttgttgagtaattgatgtgtgaaaccataatttatctagttcaatttctcaagttttttttcatcattatctaaattacatatgctccctccatttataaatataatgagtcttagattgtttatagtagagtttaagttgaggtgaaattgctctatccctaaaagttcaattacttgattggaacagatcacgtctagagatgtaaataaagtaatagaagtaatggttggaccgattgtgaaattagtaggtcagcgatgtaatcaaatctcttatatctgtggataaatggaaaagaccaaaatttatggatggccggagtatgtcacaaacaattttgctatatatttgtcgacaaattttcctccaaaaatttgacatatgtaattacagtataatcatagtgtaattacactggaacttgcatgggaggacactgtgacgacaatgtaacagctcttgtggttgcgtcctactcaggccgtccatacactatggacgtactataattacatttgtcaaattttcaagagaaaatttatcgacaaatgtataggtggtcccacaaacaattactcaagggtgagaataaccgtctcacccttgtaagaaaataattgtgtcttatcttttgaggatagtgctaatagtgaagtggggacaacaatgcctataatagtgggagtacaagatgctatatgtgaggcacaaattatattatacttgtaaagtgatgttgttccctaactcagcgaccttgttgtgttgtaaaatgtaactcttttcttaattttaatgaaatttggccaataaatttctgcatacccaatgatgaatgtattacaactacggaggggttgaatttcgtaaatattcggctaaaccaggctcctctaaaatatggagaaaagaagtcttatatatatatttttctaaaaaaacccaaattttgttatagaaatttttccctttcaatctaatttcactattgtatctacaaaatttctttgatccaacaaaaaaaggaaaccctaagggctcctgggtgaagaatgcacggggcacggcctcgatgtcttatgtctaccggtgcagacgcccatgggccatggctaatcgtgaacgtacagggaccacggtgcacgccacagccggcaaggtctagagcaatctagaggcatcaatctgttgagcagtcgcgtccaccgagaacacgtatggatgtacgcacgatcgacgaacaccaacccaattatctcagctgaagaggcgatcgatcggttaatgtaagatgatctccgttaaatcgtacggatttaattaagggcgcagatttacaacacgatcgaactaattaaccacaagcaaaaaaattacatacatgcatgatggttacgaacgcggccagctgcggcgagcagaattggtttaaatctggcagccgcagcagcagaagaagcaggagagcgcgaggccgagcacgacggcctccaccacgtacatcacgcggaacgccacggcgtcggccaccgccgtcgcccagccgccgctcccggccgtcttccaccgcgacagcgaccgcgtcagccccgccgccagcctcgacgacgacccgccgccgccgccgcccgcctgcagcttccaccaccgctgctgccgcccgtgcacgcactcccgcggcaccatcatccgccgcagccaccctccccgccgccgcggcggcttctcctcatcggcccccgccgccgccgagccgtgcagctcgacctcgacgcccactggcgtgtagtgcccccgcctcctcggcaccgccgtcgtcgtcgtcatcatcctcttcacccaccctcctcctcctcctcctccccgccgctgcttcactccccccatcgccgccgcctttccaccacactcatcagtcgccgccggcgccaccgccgccgcaatctcggcctcggcgcccatggccgccgccatgggagaggaagaagactcttggaggcggagacgtgcagcgcagggacgggacgagacgaggcgagatgaccggggattggttggacacggagcaatataaaggagacgaacccgtctcgtctcgtctcggctcgaggagatgtgatttggattcgagcctgcttggcgccgaaggctcgcgccagccaaccgcgagtttatgcttactacttacaactcaccgtcagctgtcagggtcgttgccggtttgatctgcaactgcaaaccgccataaatccgtgtaaacaaatgaaaagcacggagtactttattagagttcgtgttaagataaatctccaagattaatctaatcgcacgagctgtacaggttctagaagcatattggtattggcattgggcagcaatcgatcgatcggttgctggactctgtttctgttcggctggagcccggctggccgtgacagcagagcgtatatacgtgcaggcctgcattactacatacaacgctaccctgcaactttaggttctgtctctctaatccttctcgctgtatcataattcggtgcaattttgaatacgtcccggccggctttgttgggtccttctcttcggatggaacggtttggtcaaaatagacaaaggctgcgttaatttgggtgataggaagtgagaatgcacatcgtttttcgcgcgcacgcttcctaaactactaaacgatgtgtcttttgtaaaaattttctatataaaagttgctttaaaaatcatattaatctatttttaaaatttaaaatagttaatacttaattaatcatgagttaatggctcacatcgttttgcgtatcttcctaatctactcaatccccttcttctcagacacaccctttaagtggtttggtttggtagcctcgagccgcgccgatgataaccgctagtcaaaggctcaaagacaaattgggagcagttgcccctgaaattgtcagttacttccaaattcaaatgatttagtactatgagttcttttcttcacataattttcaaaaactggcgccccagacaaggccaaacggattaagacaaaataatacagtcacgcagtttcagcataaaagccagagacatgactacatgagaatcagaattagaggtgtatgacagccatcgacccattcggcgcgcgtaccaaactctcatctggccgcactagaagcacacaacagctgcacgcacgtctcgctatcagtcgctggactggccatttcccctccgttgataagggatgcattgctcccgctagctgtctcggcctctagaattcctgcagacacgacgatactgcccatgcgatgcgatgcaatatgtacatctgttgccacggccgctactgccgatcgttattcgttgttagcgactactaatgcttgagcagctggagcaaatgactcggtacgtaagtgcaggtgatacagctgaacgtgacagtgactggtgcgagtgcgatcggtctcttagacagttgggttaggcagattggcgtaaggggttgttccatctgggtggtggtactatgttatggatgtcaaatctttctgcgtctagggttgatgatcaggcgactcgtgtctgtatctatggtgcgtcacaactcacaacgcacatctacagtagaaaccgctcaatgacagcgatcgagttcattctaaatggcactgcaatagcctggcttaaattctaagctcccttgaaacgtattgaaatattaattacataatatttttcactataattaagtttaatttgtaaaatttctattaaaaaaaggagcacctactgtattggatttcgtgcaccagttagtttgaagatatgattagttaattactaagtactagaggagtagaacacatgtttgtatttttgtggtgataccgaataaaccacagtgcacaaaatcaagtcatgaaacagagcatgacagctgaaagcatacaactgaagcatataggggtgaaaacggatcgaaaacggacggaaactagttttatcatattcgttttcatattttttttcggaatcgaaaactcggatacgaaaatgaaatcgaatattatcgaatacagatacggagcgaatacgagacggaactaatacggtagcgaatatttaccggtatataaaaaacccctcaaattgagttttttgataaaggaagagatatcgcttattattttagttcaacatctccaatatttatattgtcaattttgtagacggtccaaatcgattttcatggttgttcctctaagagatccatatgcaaatatgattattattttctattcccaagaccttttactagatgtataacttacttaccattgtgtaaattggagatgttatttattttacttcacatcttcgaaacttgtaatgtttgtattatactttaaatgctttcaaatacaaatgttataaactacaaagtggtagatcccgttgagctctacaatttttttatggaacacatctccatcaaatgtcgtttgaattgtagatctgagattttgtaaaaattaatatggtatattataatgaatatttaaacccttaaatgacctcaaataataaaatagtcaataataaagttgtagatctcatcgagctctacaatgttgttataaagtttgtcttcatctgattccgtatgaaaaagttatgcatatatacgtgttttttttctaaaatttgctcaatgtctgcggatatccgaaaaaaattccggatagtttccgaccgttttccgattccgacggatagtaaccttactgtattcattttcgtttccaagaaaaaaatatccgaattcgttttcgaatccgagaatttccgaataattccgaccgtaactatccaaatctaaaaaatggtccggacggacggaaactatccgaaccagtttcatccctagaagcacatgtgaaaggtggagccctaaaatcccttcatatatagtactcctttcgtgctgttgtactactgtattacttctaagctggcgtctcttgattgcatttccaaccgaactcctgttaaatccatttcatatgctggcggctggtgagagacgtcaagttttctgaaacatgtccggtgtatacatgtcaatgatcggtaaaaagacgcaacaagatagcacctcttgtgttttttcgtaatttattgaaccgtttaatcttgttattgcttatttcacatttcgaaatttccatgccgaggagaggagaagaggcgtggagcgtgaggagaccgttagccgatagctgcagcagccggaaagcaacagcaaggtcggaaccaaaaattttcagaccaatgcgcgagaccaatgaatgcaagttgccatttcatttttttttctctggaaaccaaatctcaagtttctgtcacaaaaggaaaaaacagtttgaacgctagactcgaatcttgggcgaagaagtcgtgaaaattcggaatctccgaccaaccgggtcaaaccagacgtgctcttaacgttcgtttcgtccctcctttgctgctactcctggctagaaacatgccagctgctggtattggaaaccttcaacgcagatgagcatcgaatcagttgagctagtaagcacaacagctgctgcttccttcaggcttcagtgcaataatctcgagtgggactacatgtctctgaatgaatgtcggtggccggtgaagggaattctaaccgctggctgaacgacggagtcgaggagattcgtggccgtgtcatcgatctcaccggcgaacgcattgcaaccaagcgaaaccaacgggcagaatgcagtgggcagctgtgcacacgcatcaatctgaacagcaaaagcatgcaatccggccaatctgtcgaatatatgccctgcctgccttacagatcgataacacgtacgcacgatggtttcgatgattcctctgcaggagatctaagatgatatgatactggtattacctactttgttcgtcccgtctctttctaagatattgttattctccccgcaaaaataataataataagatattgttattctctcgccttggaggacgatttggatgctaattcctcccccattttccgttctcgtttccttgatgggccagctgatatgggcttgttatgttcagttcaatagaattagttgtccagcccactagtacagataggcagtagaattttagcccatcgccccatccagcaagcatctgcggcctggtcctataccctttctttcacttttgtccacgatctaggaacaaagaaggtaggatatggaaccaaagaagaatatcctttttaaaaatgcagaatggctataattttccgcgaacccataaaacaattgcacatcaatatattagaagaagagagcggattttagttacacaacgtaaacggtgagaaggccgttatgcaatggttatatgccatcgaaagtttaccttttttattttatagcaccgaaatataccggttcattaatagtagcacctaaagttcaccctattctcatttttaacacttcatatcgtgtgtgtagttaggtcaataacgatcaaggcggacggaaaacgatcaagaattgacggaagtattaaaaataggaattgggtgaactttaagtgctattaaaatgaaccggtatctttcggtgctataaaatcaaaaacataaactttcaatgttatataaccaaattttcctattattatctttgtgtattgaatgaaaaaattatttagcagtttattggaccactgtttcccccccttttttttcaactcatgttttatgtgattaagcagtgggaaatagccattgcgcgtttccattttgacatctaccgttcaactttcaagaacaccacctttctgcatatgagccacgaattgaagcattagtaggttctggaaaaaaatatataaaaagatacgactactccttgagagccagtacaacagcatactacaagtcagctgtaaatacatatggagaaaaaaatagaagatagagaagaaaagcgggctacagatttatagccagctgcagcacggactccaatatatacattatgtgtgtgtgagaggtgggaccatatattaatgttgtagtatatatttataggtaactattgtattaatgaactattagattgtatatagatgtattagagctaatagtacattaaacttgctctgggtagtaacacaaaacacaaaagagcaacactgattaaacaaaacggagaaagtacgacgcaaacaccgattagtaataaatatatacaagagcatttgacttcactctcgcttcgatcaccatacccaatcccgttgcccataaccaccatcacaaaagtagagtaaacaacagaaactcccgaagcctcaccctcaccctcacccaacgacgcaaaccgtgaaatacgtgccgatctgacgcttcgaggagatattctccatgcatgccagacaccgacgaatgcagaactcagatgatggaagcgaacaaaatgatgaaggcgagaccacaaatcacgcgtagggcaccaactcagaggcggcacatgaagacgcagacacactcacacacatctttcctccaactcgctctttttgtaatcttcctggtgcaacttgaccatccagtcacaggaagaagtacttcctccggtacaaaatattataatttgaaacttatttgaactacctctatttatactatttgttattttacgatggatcaaattttatcttaggttgtgtttagttcagcacaaagtttagattttggttaaaattaaagataatatgactgaaaaattatatgtgtatgacatattgatgtgatgaaaaagtactgaagtttctaaactttgtatctaaacacagccttagattgtaatatttgtcgaccgagaaaatagtattactaccaagaatactgatcgtactgctgctccatccatcaatcccctggccaaagaatccaatatcccgaaagctgaactaaagcgttgacgacaccacaccgtcgtcgttgtccccctcccctctgcatcgtcgtggttggcccgcaggccgcagcacatgcacccacgctgcgcacgctggctggagacgcgttttcgcctaggtttcaaccccacgaatggatggacgagccccactgccgcttggtgaggcagccgctgcgtccttcgtgcatgtgaaacggaggtttgggcgtgagctcccccggcttgaccggcggcggcggcggcggttgctgagaccgacactgttgggttgggttggttggtttgttggtgcggaacaggtgggatcgctgtggttttttcacgtagtgccgagcccgaaccccgtcgtgccggcaacatactactactatgtgcagcccctgcttttgacccaagtgacccaactacggtttaattaccaggagacaccgatataaaagatgcaggttatgtgcccccatattcctttttttccgaacacaggtgtattgagaccatatggaccgagattacagtgttgcgacgcacatggagagacattcctaaatggaaacagttttgagtgacacataaatattaggatatcccaggatcttgtagtaccacagaatcaacagggtttgagaaagggaaataaacattgcaaaaaaagaaacgtttcagagatctctcgtccccaacagcgaaaaacattgatctctcactttcacgctctcattttttttcctgagctaagcacacaggtaatcattgggggaggaccccgcagtggagaagtgtgaacagggttgcgtgataacttttgtgggaagattctctctgcgaccccagaaaaagagaagggaataaaaatacatggtgcttttttacgtgtaaaatatttatcctcctcgatgcacccagcagatcaggaaggcgagtcaaaggggcccctcaacaaaccttattttggaataaacaccacgctcctgccacgcttatactaatactcttcacggtcagtgcttagtccactaccctttacgatctttgacaaatgttcctacttaattttcagtttttcacatgtattagtgcaaaacgaaaattataggggcaattacaaatttaccgttgctttgaattgttattacaagactaccactaaagaattattaaaataccactaaaattgtcattcgagagacatccttataaaattgaaaaaactggtggcagatttgcaaataccctaaaattatactgctgattgaatgcatgcatgcacaactcaatatgacggacacgtcatgaacagtgaattcagtgtctatacatgccatagtacacagtttggccgctagctggatggtctagagaaaggcagagtaataataaactttactgaaatgcttgtcgatcactgcatatcgccactgaagtgtgctctttttgcacccatgaatgttagtataacatcatctcacgtgaattgacttggagcgaaaacattcagcatggcactgggnnnnnnnnnnnnnnnnnnnnnnnnnnnnacgcattatcacctcaaactagatgagatccaaacaagatcttgactgagaaaagccaggggctttgcagtaggacagggcagtggcccagcagttcttccaactcccaactcagatcgatcactttctggacaaaaagagagagagatagcatgcaggcctcagagtagaaaagctaggttttgatggaccaaagatcactttcagatcgataatcatgcatgttttctcggtgggggcaaaagactgtgggggcttgaaaatgggagttgtaacagccaatcagactccaccacttgcatacacacatgcatgcatggttggatatatttatactcctttggacaagggataggcagttcagggtcaggtttacgaccgagtcaaattggtggatcgatccagtcggaaaagcgaaaggcatgcacggtgaaaccgagacattttgacggtttggcatttgggtccttttgacgacgtacggagtatatcacaagtggtcgctggaaaaatggcgatgtgcatgtgccacagcgttgttgtcgttgaatactgtagtttttctcgcacggcacatgtggcagaggctggaaattaagtatattgtaagcctctcctagaatatggaatggactcgaggtgataatatataatttagcaacatattgagatgttttgtttgcatatgtagagagaggctacaagtttagcctctagcacagagatatacaaatgcctggcttgaagcaataaccctgcaccgtttcgcctctggatatgtccttatccattcgggcaaactaagtagtagtagtataatgtatattaatgtataaaagagtaatgtatttatacaggcagagagataagcataaaaatactgtttacagttgaaacaacgtacgtatgcatggcatcatgctcatggcagggcaggaggtcagtggtccaagagttggccagtttgacccggttaggtctgtctaaccacatcaagtcaagcccatatgcaataaactattcccctcttgttgattgtttcatgccgtgcaagcatcaagtaatataaagttcctatctatactagactagtgctacttggtaaagctaagcttccagagagcccaattgtatgcatgcctcccacaaccgaaacaatcgagaagagaagaagaatcaccgtaccgggtcaattaactaatcaacggggaacacacattggcgtaggattgaagctaggtgattatgccgcgcgtgacgaacagtagcgaaattttatccaagttgctagttgatctaaacatgatacacatacgcaccactttgacactttctcgtcgtcgcatttaattagcgccgaataagtacaaaggttggagttgattgcggaggcttaatccgctcaccccgagtgatcgaatcggcacgcaccggctggctatcttagctacgtactccactagctggtgaatggtgatacgtactactacgttggccaaacctatatatagctatcttagctagccgcttgcggtcgtcactacaccaccgtggctcgtcattcgttcgtggccccggtggtaaacatgtgttgcgtgcgcgtacatctctcttcacatgtgatgggggaatgaaaagaaaaggcatggaaatggtaggggcagtttgaacccaaattaaacggccggtctctgtggctggctagtcattccgatggagcctaacgtgagtaggcacaaacttaagtacaccaactgtcgcctagaatccgtttttacacgcatgcgtttggctatctgctccgtatctacgatgatgcggccactaagagcacccgcaatggtaaagtaaggtgttatctataaaacatgtactcccttcatcccaaaaaaaaaaagacagaccctggttccagtgtccaacgtttgaccgtccgtcttatttaaaaaaattatgaaaaaaaattaaaaaaataagtcacgcataaagtattaatcatgttttatcatctaacaacaataaaaatactaattataaaaaaaattcatataagacgggcggtcaaatgttggcacggaaatctagggtttgtcttttttttggaacggagagagtacatctcagcaatagactagattaatagtaaactacctcaatagtatgtctacatgggtatctatagctctctaatccattgcctcatttttctctatagactatcttcaagttagtagatagctttgctctctctcttcatttaatctcttccaagtagaaaaatatgctgacatggattttttagagagtctatagataaccattgcggatgccttcatagcctagtccttgtactagtagctacaactactcgtgtgatttcatcggctaggcgtggtaactctagtactactactctaggggtacggttcggcagatgtcacgttcatcgatggatatcggtgcgccgctagctggctagccgtgcaagactgttccggtgtggcggatttaccggtgcgcgcgcccgacgggccaggacgactcaatagatcgaatcgaccgatcgatccccccttatctactgcttgcatcaccgtgccatgccacacacccgtgcgcacgccgtacacatcacggccagcgccgatcgagaactcgctggcatgaggcgagcgctagctgcgcgcgcgcgcgatcgcggtcggcgtacgtccgtccgggcggggggagagagggagacagccggatcgcgacgtggatcgggctcgcgcgagaggggaggacgtgcatgcggtgtagcgggcgccgggcgggcggctcgatctgctgtgtcgcgcgcgggtgtgacgccgatcgatccggccgtcggtgtcgcggccgtggaacgcagccgcgcgatcgagctctcgtaccgtaacgtacgcgcaccggccgcgtcacggtcaaccttatcatgctggagcctgacaaagcgtacgtacgcttagataactgcgggaaagggaatggttgtatgtatcgatcgtgtggggtcgcggggtcgtggctctggcaaatacatacgtactactcgtgtagctataacacctgtgaacctgtcttccccggtggcgtacgtgctacacgtctccgtggctacttggttctctcctggatattttaagtctaccacgctctgctaataaatacatccgtcatacatgtagtacgtacggtttgttataagtagcttgtgactaagacttggaaaagtccctataagctaattaaagaacatactgtgtcatcaaaagatcgaccttagctaaagccgctagctaatactcctacttgtaactggagaaacctcatgtattgatgcgagattttagtatgatatcaaaaggtaaaaataatgtctaagatagctacaaaacgtacataaacttacataatttgatatggcttataataatgtactagcaaaatgcccatgcttcgctacggtgtattaaaattaaaaatatttgtttttaaccaaatttatttcaaagtgatttggtaattttgcttgctagaaatagtctcaaatgatagaaagaaatatagtaactcataataaattattatacaatagtgcgttgcaacgggaaaaactaatgttattaacttagtaaagtaatagaaaaatgagcatccacgttttctcttatgatctagaaattctcatattaattgattaaaatataaaaataagcagaactcattgtagataaggactctttcatttttctaaaaaaaatcacgttgtccaatcggattatctgcataaaacaaatcttttgccaaaaaacctaaactggatagattataaagtataaattataaaataaataatattggatgagaagtctagaatattctccaaaagagcctggagtacatataggaatacaattgagaaaaagaattaaaattcaaaataaaaaaatattgaaagaagagtttagagtccatatagaaaactaattagaacaataaaaaaaataggaatattggaagaagaatatagtccatatagaattaaaaaaattaatattatttaactttagtataaatttaaaatctatatcatgacaaataaataattatatttttagtaaaaaataaatccatatcatgagaaaaatctagacaaattttttgagaaaacattgattttagtcgcgacccatttggaggcccaatagtccggcggcccgatgcgggagaagccagagccatccgatcaaatggacggtccggagccctaaacacgagcagctgcggcggcgcccttcttccctccccgcgagcggtggcggcgacggagccgccggcttcctcctccccgtctcgcctccctcgccggcgaccactccctccgccttgtctcgcctccctcgccccctcctcctctccctctcgcctctctcccgcagtggatatagcagtggtggtggtggcggtaggggcggctccatctttccctctagcctccctttcaaggcagattcgccagcggtggtggcagcggcggccgcggccacgggcagatctagtggcggcggctccctccgccctctctcgccttcctcccgcggctgatccggcggcgtccgctggtggatctgtcagcagtggcggtgaccacatccaccaccacggcccctcctcctcgcgagagctcgtcggggcctgtcctctcctactcccctggccggtgccaccactctcgtccgacggcaagctcgatggcggcggtgcggatctgggtgagagttcatcgggggctctcctctccttctccctggccaacaccccagttgaagatgacaacaattttcccctccaccggatcgagtgtatatgtgattttctccttctccgactcgatttctctttttttttctccttggattcaatcggtcttataccataaagttgtctcttaagacccgattttttcacatgattgggtttaggaggaaatttgggttagatttgatacgaactctggatgatatttgtcgtgattgggtttttaatcgatctttgattttgtgatttgcccgtatcgatctctgatttttcttttttttttttgctttgactggcatacgcgatgaacgcagtgcgcatgcggggacagaaggtgctgcttagtcggattacggacaaaaatttattgggtgacgattggattttttagggacttttagatcttggatctaatgtgttcatgcttccgattcggttggcttcttgagtggaaacgaacattgagatggacaaaggatttgcaggggtgaagggcaacagaggggaggcttgcctggtaacggacaaaagcgggctgagatggacgaaggcgtaatgtgatgacaggaaaaatccaaatatttgtattaagttatagaaatagtatataggatgatagattatccaaatgtaaaagtaagatgatgatgtggttttatgatagaagaaaatgagaggtattttgatccatagattaatcatacaagggctaaaaaaatttgaagtgatatggcttaatgagagaagataatttggatcacaaattaatcacctaagggctaaaaacaattgtgatatggcttaatgaggtaagaaaaaaataacattagctaagtgaggatggactatataggtatataggatattataaaaacgatggagatacatattaaaatattctgtgaattttgtgtgataatatgacttaatatgcttgtattttaaagctctaaaattcaagaaattatagataatatagcatgtttaagatgtaaaatttattagtggacgatgatgtggtagttttgcatgttaaactttagaatttagtggattataactttataataaaataggattgatactaatctatctatctatctatctactattatattattattaaaatagtcttcaaagaatgcatcatattcgccctgaaagctacaaattctcacattaataaaaaataaaaaaaaatttaagtaggtatacaatctagaaataactaaaattcaaaatttaaaataagaaatatttaaaaagagctcatataaaacacactacaatattaattatattttaaatgaaaaataaaataaattacgaaattacaaaaggaaaaaaaagtcaaagtaagagtaatgaattcagaattaaaaataagaaatattacaatatcagccgatatagaagacaatgcgagattaactaaaatttttttaaaaaataaaataaacacaaaatagagagagacagagagagagtaaaagatagagttaagtgggaacaaaaatttaaaaataacataaattcggaagaaaacataagaaatactgaacaaaggtcaatctagaatacaatacaagattaattaaaagagtaaatttcacaaaacctgaggttttggggtatccgttacataaaaccctagttattgtgatttgtttcataaaacctcacattttgagtcaaaatgtttcgagaacatattcatgtaaaatactcatattttattattacaaaatattattttttacatcaattcacattagttggctaaaaggacatattcttctcgtctactttttttttctcaattttgcgctgaaaaagcttaacaaaatacctgctgattataatataataataggttaaatatagacataaatgaacaaaacatgattatcaacgcttgttaaaagcaactaacattatatatgtactaaaaagtatctcatacattctttttacaattattatagataaatatattagtcaaataaacgatgtaagtttgtacctggggttttatcaaacattttactctaaaacctggggtttcattatgttacagaagccccaaaacacggggttttgtgaaatttactcttaattaaaataaaaaaatctaaattataaaaataaaaataaaagttcaagtcgaataaaatatagaaataaccaaaatttgaaataaaaataaggaatattgaaagaggagctcatttcgaacacaagacaggattgattaaaattcggaatagaaaaatattattatgtcagactcagcgaggcccaccgtatatcaagtcttatgcataattaagcctcatgcatagaatgtgttccggctaagaaagaagaaacataatcctacttggtcactataatgactactcaaatcatattcatatatgtctctctagtcctacttagacaaggagacacccgagagtataaatacaagaccctctacaaggagggggacgtgtgaagacacgccgatacatatatagacaggacaagcccagacaaggcatatatgatccataggcgccacagaggccggtgaagtgggatctagggcaaattccaatctcgctgagctcctgttcgaggaagctgacaacagctatccatcgaccacctactcgagcttcatgtcatcaggctgacagagattagattaggttaccctcaatattgtactggtgagatattgatatacaaaggtaacaccgacttctgccaacagtatcagtatgctatatctgttagttatgggggtgaatcagtataaaaatccatgtatcaagtctcttttaccgcaatcttgtatataccctggcaccaacgtttcccatactctataaataccgtagacgtatatagaccctcgacacaagtatttttgagggagcaaacaataatcaagatagtgacctttttaattagtttatagagtaaaaattcgatcggtccttgaattggaccaaatgtcacttagatatgtaatcttgtaaattgctcatctagtttcctaatctaggtttaatatattacagttggtataaatcgcttttaactaggcacgactacatatgcggttgtccacggtggctgaaactttacatttatgctctcctgtagaaaccatcacaacgaatttgcttatagtccctcccccatatagtagttgtcattggggatataagtgggacgagcaagcatgtttttttctcgcttatccccattctagttaatttttctttcatactttgtccggagtactaccatattagaaattaactattgagcaggcttttatgtgggtagcgggattgtccacttgcatcttactgataatttatactttgtgagatacacttaattagttttggggatagatagtatatggatgtaaactaacaaaaacgagtggtcttacttcgactgcttagtcttttttttttggcgcactcatccattaaagaaggatgaaagagatggctatgtgacgtagttgcaactctagaatgctccgatgtg

SEQ ID NO: 9926 - DNA, 74931 bp, Oryza sativa
cgccaccgccaccaccaccttcgcactgaggccgccgccctcagccgctgccccagcctgccgctgaccgtgagagagagaggaagagtgaggagagtgagagagagtgtgtgtatgacaggtgggccccacatttttttaaatatagaatgctgactggactgccacgtgtacgccacgtagaccaaaaccactgtagattgggtccaggggggtaattcgtccggtttgtatagttgagggtgaagaatgtccggttttatggttttggggggtaattcagacgaccgcgatagttcggggggtaattcgtactttttccgaaaagttatgcctgggacttcaaattttactgcccagccatccgtcttaaaataaaatataaaatttagtactaaataagatacgttttaatatatagtattgggatatatcttatttaatgctaggttattatattttgagacggagagataatatgatttaattttaaaagtaataggaatcatttcatcaattttgtggctcatatttgatcttattttctaggagtagaagttggctaaggacctgcagttcgaactagtgtttttgttaactaaaatgatagttcatgaaacaagccaagtcattaatgcagaattgattaagcattaattattataaacttaaaaaacatatctatctaaatttttgaagaaactttatataaaatgattttaaaagtgtatcatttaacaatttagaaaatatgtcaaataagttataaaagccaaatgccctgtacaattcagcctaaggtttataatacatcgatcgaaaaatccccctccccacttaatatattagttgcttgcaatttttgatgtgaaaagttaatacaaactgctgatgtctaaaccaattattcaggccctgctgtgtattggagtactgcatatttctactagaacaataccggggttggaccgtttgagtactttttagactgatgcgtgcattacatcattttaagaattggatttcaaagaatgttgcttttatgttggaatccaaatcgcatacgtttcacgataagtacagagtatcattatacaatatttagtgattttaaaatggtatggttttatatctccactagagaatcgtcgcgccaattggcacgctctttttaggctgtgcttacgtgtatggacatatatattttaaaatatttcgcaggattaggccaacttcaataagttgttcatttaactcagaatatagcaattgagtatctactcacttatctcaaccgatcatacccctcttatttaatttctctacttacacgcctaatttattaacacctatacccaacttcgaccaattttatagacattataatgacaaagcatttctcactaaaatataactaacaaaaaaaataccaattaaataccctcgaaaacgttatttctagccattctcatgcatttttgtagtggggagaaatacttatgatgtccttatcaatttgtaaatccaattaaatatgtatatctttgtttgattggctagaaaaatgttttcctaaagggttacgtaacaaaccttttattatttcattgtttctttttacatgacacctcctgctactagattctagagagaatctagtatatgccactgatcttgtcccacgtctacgatttactatcgtttgtcacgttctacaatataccatcgacttttgtttaacttctacgatttaccattgccgtccggttagcctttattaggactgtacaattttgtccaaatgagcaaaataccctaggacaaaaacttcctaaatttggataaaaatttaaaaatatcatattataacatccaaaattttgccaaaacaaaatatgatagttcagaatgtttatccaatttttatctaccgcgacaacctatcagccaccgccgctgggataggaatccatttttcttgcgatttgtttctgggatttttcttggataatctagactcctctagcatcacacgttttgtaaaaaaaccctctaggaacttgcatttacatttaggtccgccagattttttttcaccgctgatatttcatcaaacgactgtgaaagggttgcaaatacgtggcgcgttcttgggccgagaattccgacggagcgcaatgagtggtgacacgtggctcaattagaggcccgagattagaccttgaaatcggtttataagattctttattaaagttctatgatcgggtcctagtttgttcatttatagaagatgtatgatcatcccattaatactatggcggactaaacatggtacgttttcacaatttatgcgcaatgagacgcgcactatttatttatttaaaaatgataggatacatttattgtattttttatatcttcgtcctttattaaatgttctatgaggcatagtttttcatttatagaagatatacgatcctctcattaatattatgttagatacacatggtttgtcgcaatttatgcacattgagccatgcattactttatattttgagattgtaggacgcaattattgtatttttcggatctccggccattcttcattaaatgttctataagacgaaattttacatttaatagagaagatgtatgattacacatggattatcataatttatgcacaatgagccttgtatttgttttttattttaaagtaccaggatatatttatttgtttgtctagatctctttctttactaaatgatctacgattgatatttttacataatatgcatattacattttatagaatatgtatggcactcacattaattccatgatagaatacacatggtttgtcgcaatttatgtgcaaagaaacatgtgtcagggttatggataccacatacctaatagtagtcgactaaatctcggcaggacccaccatataccatgtcctatacggaaacaacttgcggatataggaggagttccggataaggaaagacaaccagagttctaaatggaaacgacaaggactactcggattatatccatattggtttctctagttctacttggacaagtggacacctatggttataaatacaaggcccaccatagaagacacggaataatagatcaagtcacaagatcaacatacaagccaacatacgccaagacaagccgtcggatatcgacatcagagatatgcctagatcgaccctatccggtacctacagaggccggccgtagggatctagcgttgtctctgatctcgccggacacgaactcgaggaggaagactaccctgttgtcgactacgagtcagaccttcagaccgccatgtcgacaacagttagataggctaccccaaatattgtactggtgcgattatggtgaataagagcaataccggcttcggctaacaggatgtagggttattacctgacaattcaggggcccgaacctgtataaaaatcccctgtctccatctttttacctcagtctcgcatatatcctagtaccaacgatccccatactatacaaataccggaatcgcgacatcaaacgtcgacaacatgtattatttatttgttttaaatgccaagacatatttattgtatttttcgatctcttttaatttatttattttacatttatagaatatgtattatcctcacaatagtgctatggcatattacaattgatttatcgtgatttatgcacgttaatgctatcttcgcttctatggagtacttaccatcgctcatcactaatcagtagtactaagtacattcggactttttaattaaaataaaaaaaaagacctctgtggctggagtatttgtttttcttgtttagaagtaacaatttggaggttttatcattgcttatgcctccaaaattttattttcagccttcggagaaccaaatgtaatggtatatatgaaactttaccatttttccacctaagaaaatgacaacttaccattaccaaataggaaaaaacaatcaaagcgagagaactacctgaaaattttggcatttggtaggaaaaaaatgtttttttatttcttcctttgtttttgtaaagaaagaaatgaagtccatcatcttcgtcagaggtttgctccggtccatcacatttccgatgcacaataacagcagtcgccattccctatataaacctgtcccgagaaacagaatctctacttctctctcccctcccgtcttctttgctcaaatagccatcgcgagtctcgcgaacttccccagctgcctcaaagccggaggagctcgccgcccactccatgcctcgcgtgctccccgcggagccggcggcgaccaaggcggcgttggctcgcggtttctgacgagctcgcgggcgcggaggcggggcggtcggcgactcggcggcatcccctccctccctacgctgcaaccgcaacaagtaagcccgatcgatcgctgctcctgcctgtttcagtgtttctgctccggttaaaattcagaaagttcacgggaaatgcattgcgaattttaactgtacagatgtttcgtttagtcctatctagaaacttttttttttaacggttcgaccgcgacgacgtttttgtctcaaatgaaaacgaaacgacgtttttagtggagagactacagcaaaatttccaatgttcagaactaggaccaggaggatactctagtctatagctatagctgccataaacgcagatgattttgagaaacgtggcccatgcaccaccaccaccaccgcgccatagctaaacaacaagacaacgtaactcagctagctgcagtttcactttcacagtaggaggaggaaggaagcaaggaacgcgagaaagaggccacagcacatgcagcttcttaaatacacagtaccaactaaagtgtcgcaacagtgctcgtagtattattgcaacgcagctagtagccgagagcagcggtgtgtacctcgacgtgtgtgacatgacatcctaggaagagatctctagccgcgcgctgcccggcctgaacaatggcaggatcgtcggcagtgcagcggcgccgctgcaacgctactagctactcctcctcgctgacacgaagcatcagcttcgtttactacttgtcattaataaaaatctcgatagcagcaaggtttggttgagttgagctcatccggtgtcttctgacttccatggtcagcttgctcgcgtaatctcgtccgttttctaatgcctctagagtccaatggaaatatggaatcttgccctttgtttacgtcagtagttgctgtagctctatctggccccttcgtcaggacaaaaggccactgtctctaacatattaaaattcaaacggcttcgaaatgtttacaagtaggtatacttgcattggtttcaattttaaaaaggatcaaaaatatagttggcgtatgaatgcttcaccactcattttttttctgttactataaggagtggcattcctgtccgtgcacgggtcatgcagttccaaatactattaattagctcattaacgtgtattagaacgcaagaagccgagatcggcgcgcggcttttgctgttcttgttataacggttgcagtaaaattattggagcttttgatgataaacacggcttctttccacatagaaagctactgaatttcccactaaaacgaagcgttcatcaaacaatcacctgtgtggaccaaagcaataatagcatcgtctcttaactaatgccattaaaatttaggcccaattcgcttttgcttaaccaccgaatgtacattaaacatcaaatgaagcgtgcaacttggtcgccgcaacaaatacaatcatcgccatgccgtccaagctatgggtatctatagatacaattatttgggggacaagggctcggcatgtttttgcgctgctgtgtatttaattctagtccgatgtgcaacagagtgggattgatggcgacccaagatcagtttgtttacagccaatcttgtttaaccttaggtgtactttggtcacgcatagcttgtgccctgttctaaaggacacgtgtaatggtatcgatcactaccctggtttgaattatgccttctttgtaagcagtgatccttttggaaaatttgtaggaactagttcgatattggtaaataatactcgtaagtacaacaattttgcaattcaaataggacctaagagtaagactcgtaagttttatttttggtctggtccccttgttactatgaatcttctacggagtacacattttttgtgtggagcctacagacaattcccaacatgatcagatattcaggttccttcttctctgacatgttctatccataccactcaggcaccttcctctccactctccagctatcttcccctcaacaattaatattcagtccattgattagagaacacacatacacacacacaaaaaaaaaatcagatatcttcccccacgtagctaactcgattcattgtccaataatgaatcagccggcgaaaacccccaaaaaagaaagagagaataaaatgaaaggaacgcaaaagaaacctataggtaatcatctgaagtagctgtcgctagaaatctgtatcaaccacaccatggggggagcagggccctcttgcctttcgatcgacacgcatcggtctctgccaagtaaaaacgtcgccaaaggccagcagcgacggcagggtcgcgggaccgacgcgtcagatgcctcgtccggccgtgatggctgctacagtttccgctcgtacccgtcctacgtgtccgcacagtagctcaacccacaacgcaatgaaatgaagcagcattgtagtggtagtaatattttttactgtttagtggattatatgttgctgcgactgtgagcaatttacttcggtagtagtaactgtgatggttgcttgcttgttgtttggtcatggtgatggtggtgtgcttggtctacttggaggtttaggccactctttgatggcttcaaatctgccaaaccttctatttaaggtgtccgtgtgcatttacttgcatgtgtccatgtccagtcctttggttttgcaacatgtggtggccgcctgcgttgccagttcgccaattgggcccaaaaaaaaaaggaaaaaaacgtcacctttttttcacgtttcgcctcacggccctcaccgggaagcggtagtgatggcggtggcgccgcgcaggccatgaccatttccctgaccggattgtcgttaagggctcttctcttattgttgttattattatcgttcaaaaatggacaggctgcagcagcagcggcggcggcatgaggcgctgaccgggcggcgccgtggtggtggcggagggatgtcgcggcggcacggccggttccggttcgccaccggcggcggcgacggcgacggcgacgaggaatgcgctggcgtggcggtggtggaccaggcggactgcacggcgcagtcgtgccggtcgtgcgtggcggtgtcgctggcggactgcatcgcgctcgggtgctgcccgtgcgcggtggtgagcctgctcgggctggcgttcgtcaagctcccgctggcggtggcgcggcggtgcgcgcgccggctgcggcggcggcaggggaggctgcggcagaagaagcgggtgcgcgacctggacgccgcgaagaacgcggcgggcggggggcaccaggagccgctccccggcggcgcggcggccgcgtcgaaaggcgaggacggcgacgtcgtggtggtcgccgccgccgccgccgagttccccggcagcgacgacgcggagaacgtgtggctggagttgtaccaggtgggccgctggggcttcggccgcctgtccgtctcggcggcgaacccgcccgtcaggccgtcctacgtggtggccaccgtccgcaacgccgactgcgccgccgacggcgacgtctcttgaccgtcgagacaaccaatgccagccccgtgccgtcgaatcgacgccatttgctgctcccccagctcgatcaattctcccgtgcgatttgtcgccgcgctgggcgaacgcaagtacaacctgtgagctgtatgccatggtccaagtagaaattggtcggcgacgttcgagagagcggcatgagtgattgactcgaacttcgaaggacttgagttcatgatttctctctctcttctccttttttgaaggaaatcttcttcctttttgttgttcagggagctcgaagtgtactcacaagtgtagataatttgtgccgtcgagctccttcctccatccaagcataatgccgtcttcggtgatcgctctgtacataccaccatttctcagataaattttatctgcgtgataagagtgtggcattgcgctccaactttggctcagtactatgttaatggatgtcagttctgtatctgcattgccagcgcctgcgctcgccaccgacgcggccttcctgcgcctgcgaggctgcaactgcgcactgcaggcatttgcaaatggcaaaaactaagagcaagtttaatagtatagcccactactggctccaattcatctataactaatctaatagctcatttatacaatagttacatactacactattaatatctggtctcacctgtcatacacacgctgcgtcttagagtccgtgctacatgtggctacaaatctgtagcccgctgcccttctgtctcctcatttatctgcttaaaatatatttgcagctggcttatagcctgctattgtacctgctctaagaggagctctattttttttaatcaaaagggtgggtacccctccatttctagtatcagaaatgtgcaagtgtataccaagatcgttcatatctgaaaacaatcccagataacgaataggcaaaagaggagccctactgacggaatgtatacgcggtgtttcaaaatgcaagttaacaagttaataaacggatgaggtttaaagttattttgaattttaacgaatcttatctgaatttcaccgtgtaggtaattggcaaaaccgctagagagcgattttctgtgggcaaatgttttttttgtaaaaaaaaatccggattccatgtaggagaatataaaagatctgttgcttcaggtttcatcaaactttcaatagaagaaagtactccctccgtttcagggtcacagtcaaactgttttaagtttaatcaagtttatagaaaaacgtagtaacattttcaacataagataaatttattatgaaaacatattcaattattgatttgatgaaattataaatattacaatatttttctataaaatcagtcaaacttaaaactgtttgatattgatcaaagtcaaaacgtcaacttgaaacggagggagtacgaagtttacaactcgttcatcgtccctgaatgactctaaatgaaagcccacatgggcccatagtctgtacgggaaacaaagagaaactggaaccgaagaccatgatgggccggtccgtacgaggagcgccgaaatacctcgggccgccgcaaacatgcattgctgccacaaactgctatcatgtcccgaacagaggatttttacactttcgtttttcagatttggttttcacctcaaaacgaaattatactgatagtatagttttgcccagccctgcgttccgaaaagtgaaacacgttggcccagcaacaaagaagagtttgaggagcctttgcaccaaagagagattgggatgatgctcgtgctgcgtcatgtacactcatattgcctggttggtccaggtagggaagcctagataaaatcataaaaaggaaggatgacgacggcccgggccggccgggactgcagccagctagccagccaaccgtagctagctcggtcccattcccatctccctctccctctcgatcggcacggttcacctaaccgtcctgattcttcaagggaatttctcccggtcatcgattattgcgctcgagattccctagtgctactaaatccgtctcaaaataataaatacagttgtggtatttttgtcaaacatttaaccgtccatcttatttgaaaaatttatgaaaatatttaaaaaattagtcacaaataaagtattattcatgttttattatctaacaacaataaaaatattaattataatttttttttaaataagacgaataatcaaacgttgaatataaaaaatgtaaaactacatttatttttggatggagagagtaatagactcaaccacaccctctccctgatttggccaatagtgtaccggcgatttataccagtggccagccggtcgcgttcccagcggcttcgacgccaccaccagccaacatggaaaccacggcccgttcgtggtcgcggcggatgagacatctgctcggtttggtttttttcatcgacccacacggccgcaccgctagctaataactcgattctccccgttgctgttctgcatctgcagtgacacacaattaggtgaactaacaacgtcgcacttgaaaaaaaaaaaggtagggaaacaaaaccacttggcaaaatctagcgaaaaagaggagaggaggaaggaacaggatagcacaagtacgggcacatgtcataaaccgtacacgattcgttcaaaaaaaaagaagaaaaaaccgtacacaatccgaaatcgcatttctagttgggtttctagaagcgccacctcccacatccccagctctccgggcccgacacgtgtcccgcacaacctacgaaatcaggcgtactcgccactgacaggtggtcccagggccgtgatggacccaccagtcagtgacacgggaggcggcccttatctactacgcgcgcgcgcgagacccggccataataccgccttctgttgttaatcggttagcttcgcgcgccgccgccaccggctcaacccgagccacgcgaaaattcgaaggaatccgcgaataaatccgaggaggagaccccaacccgagtaggcgaggcgaggcgaggagcgggagacgtcgttggccatggaggacagagaccgcgaccaccgcggcggcgccgacgaggacgccccgggaccagccgccgccgccgtcgcagctgtggacggggaggacgaggtggaggatgatggtgggggtttctccttccccgtcccgccgttcgccgcggacgcgttcatcgtgcccgtgtacccggtgtttggtcggccgatgtccccgccgccgcgggaggcggtggtggaggaggaggaggaggatgagccggagacggcaaccctgcgggtgccgttgggccggctgctgctggaagagcgggagttccgggcgaggcagcgggagagctcgggaacgtcgccggtgcagccgcagcggcggcggccggacgacgagggcgagctggagggggtgccgccggagagctactgcctctgggctccgggcgggcagccgtcgacgacgccagcgtccccgcggcggtgccggaagagcggctccacggggtcggtgctccggtggcgccgcatcagcgagcgcctcgtccgccggagccacagcgacggcaaggagaagttcgtgttcctcaacgcccccggcggcggcgccccgtcgcctcacccgcccaaggacaacgacgatgcaaacggcggcggcagcgtcggcaagggcgacgccggccgccacggctggagctattacagcaagggcggcggcggcggcagcggcggccgtcggagatcgtatcttccctacaagcaagagctcgtcgggttgttcgccaacgtcagtgggttgcggcggagctatcacccgttttaaattcgatcctttcctcctctctctctccctcttcgtgttcgtcctctcctgtgcatatagctagatactctcagtataattcgtagtgatagaataaaatcggcgtgttgacaaattgtaaattgtaattagctcgtgtaaagtaaaatggtcctacggctacgtgagtaagcatctcccaaacatggagattgaaatcttatcttatctataaaaagaaaaaaagtattgatgaagcatatggttagcatttgtttgttctttgtttacatgtttagtagttacttcagaattgatgcaaacagagaggaagagttcaggatgggttttctgttttgtcggctgtggctgcttaatttttttttggttcatctctatctcagatagaccggatttctgtacgcttagtattaaaccgaccaacaccattaattattgattagaggattttgtttcgtggcggcttgaattagtactagatttttagttgtttgtcaacgtgtcatcatttgttctttgattaagaggttgtgtgcgaggcaggatcagcggcgacagttgattttcaatacaacgatttcgcgtacgtagtgaagtaacccggcatggggcaatttagtttgtcatcaatgcttcatgtgaatttagcgaaagctatctgcctacctgtcacgacgtgaacgtacgctattgatcgtttcaaagctctcacctaaattctctatccgtgcgtgtgagctttgtcactaaaagtcttaaaactatatttattcgtggggatattccacaattagcactgggtgaatggtttgtcgtgttggcgatagttaccactgctactaaactactacagtacctatttcttttcatggtaaagagactgtgccatttcgataagcaagaatctgcttaccaatacgagcatctccctgacgcacacctccttccttttctcccttttctttttcttttttttagccacttactatttctatttgcttcttgagtggcaacttttacccgtgcagattacacagcaaaaactagcaaaagccttgttacgtgttacgccccaatctcgatcgatctccaaactttcccccggttttttttttgtgtggaaccggtggtttggtgtccatctcccgtttcgttgtcgcacccacagcgcccatccaccgtggtgcgtggcaccatccgtcaagttggctgcgagggacgaagatttgcgagtttgcgacgacggggaaagggctccccgagcgcgacagctactcctccgctaaccaaacccaaccacgcacacacgggcacactactcgctctagttttagacacaactttaaaagttatgacgagaacaaaaagatctaatacatactacctatcgaaatctaaagtcaatggttatataaatttgtaccaactttgaatgaaggttacaaatggatttgaataaatgtatctttgcatcgtgagttactggattatatgtgatctctgttcagcgaatcgtgtaataagttgttgcagtatcgctgaagcaaagatcaggatttattttattattgaaaaagaatctccgagtacgcctagattttagtcttttttgtccaaccgcgatcagtagccacgttcatgtcatcgtgtgagttgcgtttcggggtaaatcgatcaggtcggcgaatgcagtgtcgtccacttattattatcctctcccttgtcgagccggtgagtgatgagtgagccattagcgtcttgtttgctgcctagcttagctagaacgcacgaaacgaaagagccacggccacggcacgcgtgggcagggggcctcgctagtgcggtgggctcacgccgtcacgcgcgccgttcaaaagcgagggggaacaaggcggcgacaagggggaacgcgccgacgtcgcgtccgacgccgacgccaagtgatggctctaaccttaccaagagtgctggtctttaattcttttagagaagtgtcggacaaaggccagaagttgtaagacaattcatcactgcttttcttctctctcccagttacacttcattcttacaaataccatattactgtaccatcatcaaagctcagttgataccatggattagtaatacccacccaacccatccaaacgatgagcagatattgccgtattgcctggacgattatggcatttgtttttttttacttgcatattttggcagcacgcagggagtacatggagagtttgaggctgaattacattgttcagggagcggaacgcaggtcaacaatctcgaacctcaaatttgggttgaatataaccttggagcaggtttcatagattgggccgccgtccgttgtctcccggtgggcgtggaacccactttcactgcactccctaagcacacccatccctcctgggtctgtcagcctgaatattccacagttcctaaaggatttgagagcatatgcatttcactgtaagtgataataaattggcagggggcaccaccaaaagcaaaaggaataataaattgaaactgtacaaccgtccatagaatacttgcctagtaggatcagtgggagcaatcacaatcgcaacggcctctggtaacataacctgaagaaatccagcactttatgtctaccagaattagaggaatggcaaagcaaaccaaaatttctttctgataaagtcgtcctgagctagtagattaataattgcagtagtggctagtaattcctagctagattagaatacagccaaaagcacaaaagatttggtcgtgctttcaccaactgaattaacttcgtttacatgtcttactgcaggcaaagttttaatgcaaataaggaacctaaggcctttttaaatgataataatgcatacctttgattattttattctataagcctaactacaactgctcaactaaggatagcaccatagatagtgtatgcagatgtcagggtggtgtgttaagtcttgttatgttttctcttgagctttggtgccattttattcatgtgattccatgactccatagccccctacgatagcttgctaaacaaacttcacaccaatagaaatcctttttgtcagatgaggcgcacaacactgatatgagagcacttaaagatcatgaacagtaatatattcagagtttgcagctttcgttctagaatcggactatgtacattaaaatcacaagatctataataggaaaaaattgatgcatatcagtgcatcaaagtattataccatcctttataaattgataagagctgaactttctattgatacaccatttattttgagacaaaacattattatctgtcatataattacctggtaggagtattgagtgtgcagatcaattgatgataagaaacacgtttgtgaagggtgtgtctggaaaagataatgaaaaaaatcaatctgtgagctgctaactaaaataaccattatatatgaacatatcaagaaggtcatgcatgggttccattttaagttggatttgataatatgaaagttccaaggatatcaagacaaaagggtaaataatggttgcgagtgttacatgtatccaccctgcagggtaaagtgattgctccgataaaatagcatgtatctcctcctcactgacagcctggcactgcatttgggaagataaaccaccgcttcagagcgtgacaaccagatatgcgtgcacaaaatatgtaaaaatggctatgatgtattaatatttaataatgtatctatgtttcaaaacagtttaatttctgacgtacagaatgagcagttgcttcttgctttggtatgatcaacatagtcacatagtaagtcccatctctctgcaaagaagcattgaagatcacaatgcaaatccaaaaataggtatgattatcatattggcaaaccattttgtgaagcgaacctacaaattcatctaaaagggacttacaaatgaagcacctaggattccacaagtctctacattgttgcctgtattctcctttgcaagttcgatgaattcatctgtcaatctaactgactgaagaacatgcataaaacagttatttcatcttaaactccagtttcttcgtagtgacatcacaaatcgagacaaagggatgataatggaagcagaacgtactatctgcatgtcatgcaaattgacagatgctgaagactgccccactgaagatcttgattgctcatcagcatattcaggatcctggctaaaagaaacattgccgaagctcgaaaggtcttctatccaagaaacaataggagatgggtaatggtgcttcacagagtaggaaccggtattgcgatctcttgctggtctacaattaacttgatagtggacaaccttttgttcattggtatcgattttatccacataatatggtttacttggcgttggatgcgtcccacatttatttgcattgatttcaactctgccatttagcactgaatatatcatgatggcataatattaaatacaaccacacaaggaagatgcacatgaggccagtattgtatacctcctgccacccatggctaggtcttggcaccagacttcgacctgcagatcagatcatctcaaacgaatataaacgcacaaaatcaaatacaagagggatttctttgaaaaggaagtcgaatcagccgatttatttccaaaaggcatgctatccattgggacataaactgaaagctgatgaagaacatcagtggcgggagtttcatgagctgctcaacaactccagaatggttcggtttcaaccacagcttaagcaaaccaacaaaaacgtggcatcttatcattaatcctataaacaaatgacacataataccactacaaactgataccactgcatcaccagccttgcaaggataccttattgcttcagaaagctaaaactatcccggactagattaatccacgtgactgctccttgccacctactaactaccaagacagcacgaaaccacccagcggcagcagcaacacagagcgagctataccgacgattcctctctcaacccgacatgaacctgccagcggaataccaccggaaaaaccgattccccaacgatcgataccttttgagagggagagaggctcaccttgagaaatccggaacagcagctggacaacctcactggagttcgctcgggccaaggattggagaagggacgcgggagagagagggaggggaaaggcgagcgcgcgcgcgctgttcttaccgcaagcgcaaaggacgcgaacccgaatccgcggcgccgtctatagaatttcacgcccccacacacgcacacgcgtcgtcacgctggccgggctcgtgcgtgacaagcgggtgggcgaagcgattgagagagaggagaattcaagatagggacgaaaagcaagtcgaggtgtcgaaggggggaagcacaagaaagcgggaagcgggcgtcacgctcgcggcggggcgcggccggcgtggggttgcgtgccggtgcgtgggagcgacgcgcgcggtggtgtggtggcgccgcgtggggcggcggaaaaatgcggtggattcgtctcgtctcgtctcggctcggggaatcaatcgagaggcgggtggatgcctgatgacgtgagagcacgggacggacggctgagagtgggaagtgaaaaaaaagaagggggcaaaagaaagcatgtcggctgtcctagccgtacaagaaattctttgtagataagctacggtgacgaggcagtttcttgttctatgggtgtgtttagttcggaaaacagaaacaacttggtgtgtttagttcacactaaaattaaaagtttagttaaaattaaaacgatatgacagaaaagtggaaagttatgtctaagaaaattttgatgtgatgaaaaagttagaagtttgaagaaatagtttagaacttacaagggtacggaagtttaagctcgaaccttttctacacctgttgcacttgtcatcccggattgagaaggcgatagtctgcgacttgcgaggcatatgtggctaaattctcccaacgtcacgcataggtcacttaaagatgggagctaaattatcatttgagaagtactagttcagctgatatgttagtttatacagatggggaatttcacacgccatatatctgagaaattcaatatcacccaccaatcatcttccagcagatcagcaagtaaccttgtgcaaatcccaggacatcttacaaaccagcgtatcacgtatgattggaacaaaactctctatgaagtttcataagcggaatcatccagttaacttcatatataagacatcaaaacgcatcaacttctttcatgtacctgcttatgtgtacattcttctaccgctccctgttgagataacacgattatagtgccgtttctccggtttgcagaatcatagctgacgtctaaccagtaattcctttaagattcattagtactgccagtcggttctccctacactgactagagaacagtgtacccacaaaataataatgataaggaaaaatgagcataaaggtgtagattagaggtagtagtcctacgctatacatgacaacatatttttgtataacatgatgtgaaggctacataatttgtgggctatggctaataatcaagagagacaataacagataaggaagaatgctcgtaagggacctaggaatccagatctagctaacatgacaaaggaagctgtcatatcaacctcaaagttggtggttgcatgatagtaacaaataaatgggaaatcgaacaacagaacaaagtatgctttcatcttagtagggacctgagggcagctgcagaatgcagagagcccaaggtaaaactgaccgcagcttaagtttttgtttaaggtaaatatatacgctcatagaaacataaatgggaatgaatatttaaaattaagtaacaaaaaatgataggaccccatgttatacttgttaatatttaaagcaaaatgggaaccacaaattcaaacttttacccaagacaaaaaaaaaagtttgcttaccatcaagatagtctctccaagagactttccaccatacttcgttgccctatgccactcaaagattctgattttataatcgcatttgatacaacaatgacattacttggagaaggtgcattaacctacaaggacattagcgatttatattttttccaaagaaacaaagataaagaggatacataaaagagtgatataatcaagacatatacccacactcggccattcaggccaacagcaatctcaaatgaaagtttttttccaagggcctctagaattggacatgttggagaacttaacaacctacaagcaacaatttacaaaatataagaaaataatgcaactgcattgaagaatgctagtatgtaatgtcctcacatccgcgacaggccagtagacgtgtcaaacatatagccatcttttagttgaccaaattcggctgctttcccagtagctgtaaaatacaagccacagcaatatattcatattgaagtaacagaactaatgcaataattagacaaattcaaacataacagtatagcctgaaatggtgtcattatgtaaggtcaaatattatcatatagaaaggagtgacagaataacaaaagacgtacttgagtacttctaatggattagtataaaatagaaaatcccaatgctgagttgtaagataatagttttaccatccatgcacgagagctctgggttcatgatgctatttgctttcaccactcgtgcatatattaatgtaccaatctgcaggagaatatcatggggtaaggcacagattgggcctgctgtacatgcctctttagtacaaagacaaaggaggatgaaaagcaacaaatcagtgagttgctgatcaaaatgaaagataggtgttttacaaacaacatatcactttgttgaagttatagatctaagcccatgttactgcatagaacatcagaaaatattggctatataactctaggcagtagcagtttaaaacaaggagaaacctgacatttgcattgtgcaagaacacaattattcaatgaaataaacaatattctcctatacatcataacagactgagttcaccattattttctgaaactaagatgatagctattcaaactaagataatttcaagtatatctactaacacaaaatcatggtatatagaccacctaaagtaagaaaaatgttctcaaagctggcaatcaataaaagcaggataccacagtgaacttcatgacaaaaacctatgaaagaattgagttggggaaacaaaatcaacaaccattgatgaatgatgatgacccattagtcactgccatacctcgaactttggaatatttctcctggtaccaccttcaaatgcaagaactggtaaaaaggccaaattaggaccttttatatccaccaagaagttctgtaatgacagaatccagctcagcaaagaggtaagaatatatcatatgaggtgcatcgtgatgcctcatttaatgacaaaactaaaagcaagattttagacagttagtggaagtccatatcagttcatgtagtatatttgaaatgtacagaacagtgattgtatcaaaacaattaggtccacatactaaaaaatgcaccatatagaagaattaatttacataaatatacataaatgtacttacatctggtttggtgtcaaccacaacaccaagaactgtatcttctacagaaggtatatactgcaaaagaaataagaataaaagccagtgaacaggctaagcgctgaaggacaaagagagtaaagaactatgtgaaatccccattctacctttgagaagatataaaggctaaaaacatggcaagcataacccattccacatgggaaacaaatcataacattaaactggaaataaactcaggatggcacacgcatatgccatctacctaaccaatttgcatactgtgtcaaaggtaatatagtgggaatagcaacataattatctttctgttcaatcatgaaacattaaggaaggggcaaacaaccttctgccgcactaagaaaagcaatacatgggcataaagcagcacgccatacagacacagtgagcgtatttgatcaattcacattctcattagtccttataacgatccatggacccctatatacctctcaagcagacaaagttgacacacatgaggtaaacatttttttttccattgtgttatatatgagatcaaacaggagcgctcaccctcttctgcgagctctcgacccagtatttgctgggcttcgaaagccgtagcctcccagcactggtagcctgtatggtgtcgcaatcctgcaaacaccggggagcactcataagcataacaataaacccttgattaaaccctaatccctaacaatctctcacaaagccccacttgccaccacgaaacgaagttacctgtcgcaggccggcgccgagcttgatggtctggttggtcatctcggcgaggtcgaggacgacgtccccggggacctgggaggcgacggtgatgcgagtgagcgagcccaactccgcagggatagcgagtcggaggtcggggtaaggtaagagggcttgggacgcgtaccacgtggttgtcgacgagggcggagggcggcggcttcctcgattccattgcacggcggcggcggcggcgcgcgggtgggcgggtgcggtggagactggagcggaagagcggaacggacgaacggtgaacgcggcggcggcgcttcggtgcgggcgtctgcttgcctgagagtgcttgctgtggaggagatgggcctagggtaagttggaacacatgctatgggcttggcaggtgatgagtttggcaggagatgggcctagtgatgagtttgggctgggctaatgttgttcacttgcagcccactatttggaccactgagaggacagaataatctattatattattaaaaaaataaaaaaagagcctccacgttctcatggcctagaaattctcacattaatcgaagaaaaagaaaaagcaaagtccatatagaaatacaatttagaaatagttgaaattcggaattaaaaaataaaaaatattagaagaggagactagagtccatatagaaatacaatttagaaatagctgaaatttggaattaaaaaaaggaatattagaagaggaggctagagtccatatagaaatacaattaggaaataactgaaattcagaattaaaaataaggaatattagaagtagagtatagagtccatagaaatacaattaggaaataactgaaatttggaattaaaaataatgaatattaaaagtagagtatagagtccatatagaaatacaattaggaaataatagaaatttgaaattaaaaataaggaatattagaagtagagtatagagtctatgtagaaatacaattaagaaaaaaaatagaaattcagaattaaaaaaataagaaatattagaaatagagtacagagtcatataggaatttaaaactaactaaaatttggaataaacataataaaattaaaagtagagtttagactccgtataaaaatacaatttacaaataactaaaattcaaaattaagaaaaacatgggaagaagagtttaaggtcaatatgagaatataaatatatggatacattttagaactaactaaaattcgaaattaaaaattaaagaatattgaaagataagtttagagtccacgtagaaatacaattagaaataataaaaattcagaaataaaaataaataatattggaagaagagcatagagtctatatagaaatacaaaaaattcgaaattaaaaaaaaagaaatattaaaagacgagtctagagtccatatatgtcggtgacatgggaccgggagtatcatgactcgaggcttgaggcagacacaatcgcccacgtggcctggcaccctcggggacgtcgggcccgagggtgatgtgtgcgcccacctcttggtcttcccgagggggggggggggtcggaccactccagcctcgcccccgaggggcgaggcgccccgacccctcgcgttttctactccacgtgtatgggttaggtgagcacagcagggctcacctaaccgcatttattgcgcctcggctaagcgtgtcacgccgcacgaagtgcagtgcagtgcactcgattatccggtctgtgaccagtcacagaccggtcaaatcgcgggttaggtggcgacaggcggtcagacgcatgcttcgccccatcctgtctagacgagagcttctaggcactcgtccccggctggagctagcgtgttacatcccagagatgacacgttagccccgatcgatatatgccaggcttcatcctaaccattacaagcaagatgttgtttgaagaagggcaaacatgcacgttgctgagccgacgtgtggtggacaagaatgaccgatttgtgaccggtctgacactgctcatgtcgtcagcacacagccaccttcccacgacgtgcccgcctcaggcagaagtggaggtaggtatgtgccgtcccgtcaggaggatgttcggaggacgaccgtgcaaatctccgtccatttatgaaaagagaaaaagtccagtttggaaagggaggggtgcatgtggtatccccttgaagtataaaaggaggaccttgcccatagagaaagaggttgattctttccagattcagagcctagaacgagggagaggtcggctcacactttgtagctccttcatacacagatccaccaaaacacaggagtagggtattacgcttctcagcggcccgaacctgtatacatcgcccgtgtctcgcgtttcttcctagctggcgatctttccacataccgagagagcttgagatttcaccctaagcccccggccgaaccggcaaaggggggcctgtgcggtctcccggtgaggagccacgagctccgtcatctggcgcgccaggtagggggctcagcgtgtgttttctgagctctcgtactcctccgtgggcgccaagcttttcttgttcagcctaatggccgagcaagcaaaggtgcacgacctctctccgagtgtgagcggcgacgacggggagccgaatccacgccgtcgagctcgtactccaccgccccctcctcgccaaagtcctaagcagggggaggcgctcgaaagggtcgaaagatccgcggcttcaccgatcgcgggcgatggaggagaacggcgagatggggagcgtcgcctcctcgtctacggcgacggcagcacgccccagggcgcgctccaagctgcgggcgcgctcttacgtcacccgcctgtcgtccctgacccggaatctccagcccaacgatggctggacgacgtggccaaattggtcatgacggcgcggcagcgcctagatgctggtgggcggtcctccgccaccaagacctctggtgctgctaccactggctccgcgtcgtcaagacgaagggcacgacgagcagcagccgctgttcgccgttcggtagccactccctcatcgactccttcgacccgagaagatctgcgtagggagcagggcgcccgcgccagcctcgagcgccggcgtaatgaccgaagtactccccgcgcaacggagggcgcctcttcgtccagagtatcacctcgacatggacgtgaggaccagccctccgtgcccccggctggtggtatcggctgtagagcctttgtggcgagtcttcggaatgtccgttggcccctaaggttccgtcccaccatcaccgagaagtatgatgggagtgtcaaccccaccgagtttctccaggtctacacgaccgggattgaggccgccgggggtgacgacagggtcatggcgaatttctttcccatggccctgaaggggcaagcacggggttggctaatgaacttgccacccgcgtctgtccactcctgggaggatttgtgccagcagttcaccatgaacttccaaggcacgtatccgcgccccggtgaggaagcggacttgcacgctgtacagcgaagggacgatgagtcgcttcgatcgtacattcagcggttttgtcaagtccgcaataccataccatgcatccctgcacacgcagtaatctacgcgttcagggggggtgtgcggcacaaccgcatgctcgaaaagatcgcctccaaagagccccagactaccgcagagctttttcagctcgcggaccgagtggctcgcaaggaggaggcctggacttggaacccctccggttccggagtggcagcttcggccgcccccggatccgccgctcagtcagggcggcgtgataggagaaggaagaagaggtcagtccgttccgacgacgagggtcatgtcctcgccgtcgagggcgcttcacgggccacccgaaaggggaggcctgcgagcgacaaaaagaaggaggccagcgttcccagcagggagcgccctaccggcaagtggtgcaccgtccacaacacctccctccatgaccttgcggactgtcgcgcagtcaaaagcttggctgagcggacaaggaagtgggaggaggagaggaggcaggagcgccgggaaggcaagtccccggcggttccttccggccgtcggcgaagtgaggccaagcagaaggcccccgccgaggacatcgatgatggcgataatgacctaggtttccaagagcctggggctaccatagccactgtcgatggaggagcgtgtgcgcacgtttctcgccggagcctcaaggccatgaagcgagagcttctggccgttgcccctactcatgaggcgacgcgccgggcgcggtggttggaagttgccctcacttttgaccagtccgaccacccgccgtgcgttgcccggggagggcagattgcgatggtggtttctcccaccgtttgcaacgtgaagttggggcgtgtcctcattgatggaggagcagccctcaacatcctttcccccgcagcctttgatgccatcaaggccccggggatgatgctccggccgtcccagccaatcatcggcgtgacgccggggcacacttggccgctaggtcatatcgacctcccggtcacctttggtggacccgccaatttccgcacggagcgggtgaacttcgatgtggcggacctcagtctgccctacaacgcggtcctggggaggcccgcgttggtgaagttcatggcggctgtccactacgcctacctccagatgaagatgccgggccccgacggccccatctctgtccatggcgacctcaaagtcgcgctcgcttgtatggagcagcgtgcggaccgcctcgccgtcgtgtccaagcccgagggcggcgacgagaggcttgacacatccgcccccgccgccccgaagcagcggatagtcacgtctgatgaggtcccggtcaaggaggtcacactgggcgacggcccgtccaagaccacacggatcggtggtcttttggacggcaaataggaagacgcgctcgtctccttcctgcgggcaaacgctgacgtcttcgcatggagaccggcggatatgcccggggtccccagggaggtgattgagcaccgtctcgccgtgcggccgggtgcaaggccggtccggcagaaagtgcggcggcaggccccggaacgtcaagccttcatccgcgaggaggtggcgcgacttctggaggccggattcatccgcgaggtcatccacccggagtggctggcgaacccggtggtcgttcccaaggcgaacggcaagcttcggatgtgcatcgactacaccgaccttaacaaggcatgtcctaaggatccttaccccttgcctcgcatagatcagattgtcgactccacagcggggtgcgaccttttgtgttttctagatgcatactctggttaccatcagattcgcatggctagggaggatgaggaaaaaactgcgttcattactcccataggaacttattgttatacgacaatgccctttgggttaaagaatgcaggtcctacttttcaacgtactactcgaatttctttgggtagccaattaggacgtaatgttgaggcttatgtcgatgacttggttgtaaaaacgcgcaaccaggaaacgttgctttcagatttagcggaaacttttgagagcctccgctccgcccgcataaaattgaaccccgataagtgtgtgtttggtgtacctgcgggcaagcttctcgggttcttggtctctgcccgaggcatcgaggccaaccccgagaagatacgagctatagagcggatgcgcccccccagtaaacttagggatgtgcaatgtgtcaccggttgcatggccgccctaagtcggttcatatcgaagctgggagagaaggcgctacccttatttaagctcctcaagcgctccgggccgtttacttggacggaggaagctgaacgcgccctcactcaattgaaagcatatctcagctctcctccggttctagtcgccccggagccaaacgagcccctactactctacttagcggcgaccccccaagtagttagtgcagcgttagttgtggagcgcgatgagggcaatcctcattccgcgcacccccgccctgtgctgacttggcccgggagcgagcagggaggagaggcccccgagccgaacggaggcctaaggcccctgacgaccggagtcggccctctccccgctcgtcagatggtgctgggcgcccccgaccctcaggaaggccccgaggccactgcgggaaggctgcacctatcgccctctgaccccgaggctaaccctgtaccgattcgacccgggagggagcagggagaagaggcccccgagccgaacggtggcctaaggcccctgacgaccagagttggccctttgcccgtttgtccgacgacgccaggagcccccgacccccagaacggccccgaggccactgtgggaaggccgcccctgtcgtcctccgaccccgaggtcatcggcacagaagacgagtgcgccccgaggggccacttggacgaggagcgccccggggatatggcccctagcgaaggggatcggccccaccgaagggtgcagcggcctgtctactttgttagcgaggccctccgggacgccaagacccgataccctcaggcccagaagatgctttacgctattctgatggcctcgaggaaactgcgccattatttccaggcgcatcgggtcaccgtggttacgtcttaccccctcggtcaaatcttgcataatcgggagggtacaggacgggtggtaaaatgggcaatcgagctttctgagtttgatttacactttgaaccacgtcacgcaatcaagagccaggccctcgccgattttgtggcagagtggaccccggctccagagaccatttcagtctctgaagccagctcagacccctcgctgttgcctcacgccgcccactgggtgatgcagttcgacggctcattgtctcttcagggcgccggcgcggggatcacgttgacctctccgaacggagacgtcctcaaatacttggtccgcctcgactttcgagcgaccaataatatggcagagtacgagggactccttgccggactcagagtggcagctggactggggatccgccgtctcttggtgttaggcgattcccagctagtcgttaaccaagtctgtaaggagtaccggtgctctgacccgcaaatggacgcttacgtacgccaagtgcggcgtatggagcgccattttgacgggatagagcttcggcatgtgcccagacgggataacatgattgccgacgaactctcacggctcgcgtcctcgcgagcccaaaccccaccgggcgcctttgaagaaaggcttacccagccgtcggcgcgacccgaccccttaggggagacggatgcgcctgaccggcccccgaggcccgtcggagtccaggcctcgggacccgaagggagcgctccaagctcccttagattgattgcttggatctctgagatccaagcatacctcacagataagactctacctgaggaccgtgaagggagtgaacgcgtccaacgcatttccaaacgctacgtgctggtagaagggaccctctatcggcgcgcggctaacggaatcctcctgaagtgcattcctcaggaacaaggcgttgagcttcttgccgatatccatgaaggcgagtgcggagcccattccgcctcgcgcaccttggttggcaaggcctttcgtcaagggttctattggccgacagctctcaatgatgcagttgatctggtccggcgatgcagagcgtgtcagtttcacgccaaacaaatccatcagccggcccaggccctgcagatcataccactttcgtggccatttgctgtctgggggctcgatatcctgggaccgtttaagcgggccccgggcgggtttgagtatctgtatgtcgcgatcgacaagttcactaagtggcccgaggcttatccggtcgtcaagatcgataagcactctgcacttaaatttattaagggcatcacggcccgttttggagtgcctaaccgtattattacggataatggcacccaattcactagtgaactcttcggcgactactgcgaagacatgggcatcaagctctgcttcgcctcacctgcccaccccagaagcaatggccaagtggagcgcgccaatgcagaaatcctcaaaggccttaaaactaagaccttcaatatcctcaagaagcatggcgattcgtggatcgaggagttgccagcggtgctctgggcaaaccgaaccacaccaagccgagcaaccggggaaacgcctttcttcctcgtctacggcgcagaagcggttctcccatctgagctcaccctgaggtctcctcgggccaccatgtactgcgaaactgatcaagatcagcttcgcagagatgacctcgactacttggaagagcgaaggaggcgcgcggccctccgagccgcgcgctaccagcagagcctgcggcgctaccatcagcgccacgtccgggcccgatcactctgcgtcgacgacctcgtcttacgccgcgtccaaacgcgtgctggattgagcaaactctcaccaatgtgggagggtccgtatcgagtgatcggtgtcccccggccgggctccatacggctggccacgggcgacggcactgagttgcctaacccttggaacatcgagcaccttcgtcgcttctacccctgagggggggggtcgggtgtcaggtttcgggctcgggtcaaccccgcacccccccctcgggtgtgcagggttggccgggggctgccacacatgcacattctcatttctctcatttcagtatttcaataaaagcagtttcaatttcctaagggctgtatctgtgccgttttttttcctttttgaagaattttgacttgaaataaggtcactcgtgctcaaccttgccctcgggggctcggttcggtcagctaaaatcgccaaacggggcccagaaccgagccgtgccccggggcgtggtgaactccgggggggaatcggcaaaaacccacaatcgggtcacccataaccctcggtcaccacgttcccggcctggccagtctcgacatgcggatctccccaggcagtagtcccgacccgcgcttttcgaggactgggacttgggcacgggcccttaaatcaagctaagacacaaaaagaggatcacggcacagatcatcctcatctcattcgcatagcaaaataaaattaacacaaagaattttttcatcatttttgattgcagattgtaagttgatttatacaaaaaagaggcatgaaggccttagaagaaagaaaaagaaaaaactggagtctggagggggcctgggggctcagtccgatgcgcccgggtcgccggcctcgtcgtcacgatcgtctgcaccgctggcatcgccctcctcgtcggagttgggggcgaacgcgagccgaggggccgacccctcgaaactgtggacgatgtggtcggcggcatcccggacccgcgcgcgcgcgtcgtcctcggtcccggaagggaactcttccagcgccatccatggagagaagttggggtccctggcctggtaactcgctagtacgagttcaaccgctccttgggcgaggtccctcgaggatgacttgatggtcttctcgagctcctcggggagttgttggagagcccaggccatcttcgtgaggtgcggagcgaggccctccaggttggcggggcgtgtcattgactggcctttccagaggcccgcctgccgaccggcgcgatccagacgggagactgcatcccagagcatgccgggccctatctcgcccgccaagcggagggcctcggcttccccggcggatgagtctagcgcgcgctgcatgtccgcgacggtgtgttcggcatctgcgaggcgggcggctaagtcgctttcgcccgcagccgccccgccgatgcacgccctcgcatccagctctttttcccgcgcctcgagatcggcagcccgctgctccagtgcggctctctcggcgcggacggattccaaattgcgacgggcctgctccgtcagcgctgcctcacggagggacagggagtccgccaaccgttgcgcttcggcctcggcctcttcgagagctcgctcccgctcggcaagcgcgtcttcgcggaggcggagtgcggactcctcttcggcgcaggcagactcgtgcgccgccagcgttgcctcccgggaggtgacggcggcctcgcggtccgccaggactttctccgcgacgcaggcgcgctcctccagcgccatggcgcgcgcctcgagggcctcttcacgccgccggagcgccgcttcggtctccgtcgctcgctgctctcgggcagcggcggcatcaagaaccccctgggcggcgtcgagctttttcttcagctccgcctcccagttcccgtgctgaaggcggagggagtcctgcgcctcgatcatcgcagtggtggcgatgagggcagccccccgctcctcctccacctctcgagcgatctccgccagtgccgtcttgcgggcctcaagatctgagacgtgccggcggtgtgccttgcggcccgcttctaccatggcctccaccgagcgccgcccctcctcgacacgcgcccatgcggcgtcgagctccgcacgctccgcctgcagggcctccacctgggcgttgaacccatccaataccgcggtatttgcggcggctaaggcctgcagaaggggctctgcgctcagcggggcggcggaaggcgtggggaagagctgccttgaagaagacgccgcgcggctcggcccgccaatggacgcgccggcctcatcgcgggccacccccggacccgtttggtcctgggcgtcgcccgaaggggtgggcccaagcgaggcgtccgcggcctcgtcgtgaactgcctcggaagccgccatcgcctcagcccggcgaacccgggcggcctcctcccgagcggcttcttcggcctggcgaacccgggcggcctcctcccgagcggcttcctcggcttggcgggcccgggcggcctcctcccaagcggtatcatcagcctggcgagcccgggcggcttcccgggcggcctcttcagcttcccgtaggcggtctgcggcctctcgccggtcagattcccgcctccgtgcctctgcggccgccggatcttcggcctcggactggccggacttgagatggtgggaggaacgcgatgggatatcactgaagcagaaaggaaaaccagaaggcaaacaagatgggtaagagaaaacttgcttttgggatagaagaaaagacggtcgcaatgagcgtgggacgaacctgcgagggggtcggttaaatgaccaccttggaggggaaattaggtttccccgggatggttctgtctcccccatcttgcgcagccgcttcttcttgcgctccccctcgggctgcgatgttggcacggccccctccgggcgcctgctgccggcacgcaccgccccgccccctcggggaggagatgagggaggtgttcctcccagtttcctcttcccccgggcgtcggtagggcggttgccccccgagcccccgacgcggggcccagaagcacgaccccctccgggggtagattgatccccccggcggctcccacctgcgccgtcatggcccttaggagcctgctcctctgaggccccgaccgccgtcataatggtcaagatggaggcgcgatctgggtcgctgcagagggggaggataccgtgggggatgagggacgcctccacggagttgagatttagcacccgttggaccagtatcttgaagtcctcgggggcccaatcccatctgactccctggtgggtccgcatgtagtcttcggacccggtgtactcccaggcggcccgagcgcgccgctggagcggcgcaatccgacgacggaggtagtcgccgtacaccatggccccggtgagcccctgggatcgcaggcccgcgaggcggtcgaggacggcgtcatagccatcccccagatctaccggcgcccgccagctgggggcctgcgccgggggctggctcggaagtcggagatgcgcttcgtcggcgaggggggtgtagaaccagtcgctcttccagtcatcccactttttacggaggacgcaggggatgtagcagttcaacaccggcccccgcggcaggaaatagcagccaccaaccaccgacggcggcgacaccgactgcacggtgaagaaccaccggaacagccgaagagatgggcgcaccccaatgaacatctcgcacaggtgtgcgaagatgcccaatgtcatcactgcgttggggataaggtgcgccatctggagatcgtagaactccaggacgtccatgaagaaagaagaaaatggcggaaccagccctgccattgcgaaggggagaaagaagacggaccgccccgggtagtctagcgccgggcgtccctcacccagcattactatctcacggccggtggcagattccggcatgaagcggcgcggcaacccagcctgcttctcgctcacaatgcgagaaggcggcagcacgctaccatcaagcagtgcggagccccgtgccatggcaccggacgaagagaagatgaagagcgagcgcgtgtggcgaaagaagggcgcagggaagaaggagttaggacgcaagcggcgaaggcaaaggaaatgatggcgaaaggaaggagacaaatcccatcctcagtgcctttatacccttgccaacgctgtgcccggctcctcgtttctcgcgcccattatttcgccccctcgtttctcgcgcccacgcttccactaatcccattcgcccgcttgcggtgcgtgagatggatatgcggttgcggcagtcgagatagatcgtatcgtgcgcgcgttaattacgctcgccgaccgaagcaacattaccgtatcaccaggcgaggcaaatcggctcgcccagattcgtgcgccgctcaggtgatgtggcagtcttgaagagaccgcccattattgacagccaaattaccattaccggtgtgcatggtttgagaccgttgggttttttgcccaaccatggagaccggtcccacctgtcaccaggctttatgtcgcgaccgggaaaattgccttctcccgaacgctagtgtattaatccccgtcccaggaaaagccggggtacaccatacaaacatgatataaaagacacatctttattacatcgataatatttacattattacaagggcacttcaggcctgacaaacaaaaataaacagcagcggactagcgggcctacggctccatcttcacaggcgctcaactggggtataagccaggactccacctaagacatcttctccaaagcttctcttactgaagaggggaaggattgagcaagaatgagtacaaccacagtactcagcaagccacaccggcagatgcatgattaatgcaagggggggggggtacaaggggataataataggggttaggttttgcagtaaacagcatttaaaagtcacttagttgcccaaagccattttgtaaagacgatcctagagctacacagtattattaaacaaggtcgtgaaccctcacgaacctgccttaacccaaggcctacgatgatttggaccgaactggcaacccgacctgggttccagctcgtcccaagccaacccaggccaaccattccatattttagttgttgagcaaaattttaagaattaaaacactgacttgggtacattgctaggcttgcccatatccgagggctcggctattcgaatagatttactctgatcagaggtgtacatctttacccacaagacacatctttactccgcattccatggccttggaacccgtcgtaaagatgtgacataacccttcacccatcctagccgtgaacaaaagtaccgacccaatcccacctacggccgggatacccgggacaggcaggcagaactgagcccctagcagcagggcaccaaccctctgccgtatgacatctcgactaccgggccgcagctcgtgtagccttcatttgccctggagaatgtccatcgacacccgacttcatccatctccaatccgtgtacttttgttcaggactagactgagcaccgagttaagccttacccattagacatgtggttagtacggtagtgctttgcaacagaggcccgagcttaatccttatagtggccggggtgctacttcccataactggcatgcacccaaaccccaccgaaaacaggttttaggggttttgaaagaggaagagaggtgtgtgtccaattccaacataagccgaccattccatagtgtccaaatgatatgagaatttcccaagtctaaagttataaaaccacctaatgttgcctaattaatcagcgaagcatctacctaaatttaaactagggataccacgagtagagtacccactagttggggttttatttattctagggtgaacaaggtaataataataacaataacaataataatatggtcataacaaaggtaaataggcatggctaaataaaacagtgacaacgcgggaatttaaataaagcgataatgcaataatttaaatcaacataattttacaaactgggattcaatatgttcaaggatgatgtgacttgccttgctcagggagaacggccttccgaaccttcggcaacgaccgcaaaccacgcttcgggaacctccggaacgacgaaagctacgcgaagcacacaagcaaagctacaagcctataaagaagcaataacaacacataaaaagaaagcacatggttctttaggttataacaaacattaagagacttgaacgggtcgattcggagctcgtatgaccaggatatgatcatccgaagtttaatgctgttatatggagatttgcgaattattataattaagctttgcaattataaaacatgtgtaagcgctagcctggaaaagacaggaaggctgcgccgttgacatgcggaccccacatgtcaacctaaaggaccgcggtagaccggatacacagagacggtccacgggtcgacggaagcggaccccgtgtgtcaaccgaggcgagtggccaacaaacggactccactagacaccacacggcctgcacacgtggaaaccacgcggctaccgagcgggcacactaacacggacactacacggtcaccacccgcacacgtgaacgactaccgacaccggtacacgggtaccggggtcgacgaccgcacaacgagcacgggcgacaccgaaagggcgaggacggggcagcgaggggaggaaaccttaccaccacgcgacgaggcgtgggaacgacaacgacgaacgggcgcggcggagacagacgggcacaacggagacgaacggcgaggggacggcttcggcggcgatccttgggcgaaggcgagacgcggccggcacgaggcttgacgacgcggagccgaggacgaacacgaggacggggctgcagcgactcgcttgacgaacgcggacgacggacgagaacggcttgacggagggacgaacgccacgacgatcgggaacgacgagaggacgagggcgacgacgaccggggccggcgaggaggcgacgaggacagccggcagcggctgcacggggacgaggatgacgtggaacacgccgctatgatgacgatgacggaggcggcgccgcgagacgacgagccggcgagagggaacggtgaagacgacgacggacaccggcggtgttcggtcggaggggaggcgaggccgaggacgacgtcgcggctgcgatgccgaagatgatgggggtgtggccgaccggtgcacgggcgaggagggacgggcggccgaacaactccggcgaggcggatggagaggttcgcggcgatggcgttccggcgaaaccgaggagtggacgaggtggagggctacgtcaccatgccgagggaggggacggcagcgccggctgatgcacgggcatggcgaaaggggcagccggaggagatgccgccgaggaggaaggagaggccggcgcgggcgacggcgttccggcgaaattcgggcgaggaggaggtgatgccggggaagaaggcgatgccgcggtgtcgaaggaggagacggcggcgtcgatcggcgcaccggcgatgaacagcagccggctggagggagtacagtggcaccaatgccactggttgccggcgggggcaccgttccggcgagtttccggcgaggagacggtgaggccggtgaaggggacggtgttgcagagccgagggaggcgacggcacggccggacgatgctccggcgaggagaggaaggcggctggaggtggccggcgcgaaggaaagaggagggcgacggcgggaacggggctagagaccacggggaggctcgggatggggttaaaacggtagaacggagtgcggggatcccattttatatgagagaagagggagccggccacgggggaggtcggaacggcggtggaaaatccggccggcggcaatggaaggcggccggattggcgcggccgttcccggcgattgggggcggcatttaagggggaaattagggggaaatgaagaggagtcaatggggattaatttcccctatttaatttgggaatcccatgcttgaatcgagcggatttagaggaggaagcgagctagggttcacgggagagggagagaggacgaccgggcgggaggaaggggacgacgcccggcctgacgcgtgggccccacgcggtcgggcgcgcgtcgtcaccgcgcgcacgcgcgcggcacgtgcgggaggggagcggctcgggggctggggcggcttgggccggcggccggcccaggaagagaggagggagaggcggcctgggccgggcaggccgggaggggaggggaagagagaggcagcccgggagggagagggaagagggaggtgggccgaggggaagggggcccaagaggaggagggagagaaaagagggaggagaggaggacttcggactgggcttggcccaaaggaggaagaggagggatttttaggttttctttttattgaactttgataattgtttttgttgtttaataattatttccggtgctctgaaaattcaagtaaaatttgagggctctttttagaccaaggagaatttaacaaaaattctccgggccacattggaatttttcttgtacgtatttttagtgtttgccaatttctttccgaattttaattaattctattattccttttagaaaataaattttaaattttgggatgaatttatcaggacgtgacaaatccaccccccttacaagaatctcgtccccgagattcgaggaggctagcaagaagataggttgggcggtcttctcttcttgtccgacttcttccgtcgcatcttttataacaaacttgcctagcaaaacttctccactctggactgcttggctcaatctcctgttgcagatggaatcttctcttcacctgacttttccctggttgcacctctagctgacttcgactggattatggcacttgaagatgggacttcagttccagaacttctcataattcatatctttggcgtcaacctcatacaagttacccacttcacgttatgcgtcgatgtcagcttgtcattactaggatgccctgctcgttatcatgagaatatcatgcttgtcatttacttctaacttaccactattcacttcatgttgtcctcggttagcattcaacgtattcctttacacctttgaccttgatgtgttctttcccgatttctcttatcaatcacctttcgacctacttctttgcctggtaataaacatctttttcgatatcttctatcagtcatcttttgaccttggtcgctaagtattcttcactccgagagttgtggatgcttctggtggcgatgaggtcctttggtctgctacctttcagtgaaaccttgaagtgtttcgccaaaagctatactgactgtcattgcctttgatccggaaaagacacatctgaaactcttagtccaaacaaatgtctctttggttaatcacttgattttcttttccatcctcaggttggttattagctcgaggttagaatatagttcctctggcacgagaccctaggtcccctttgtcagtaaacaattatacacatgatcacatatccgcatcttccaaaagaatcctcttagaacttgtttttattacaaatctctcccatattacatgaatacaaggcactgtcttaaacaaaaagggaaggtgcttaacatcggtacattgtttccactatgggttagaattaacatgaggcctcacaggtacggcgtttgctccagtgaccacaaggcgagtgacctgtcttcttcttgcataatggccggagtgatggcgcaggttacgcttcggctgtggacaatctctagagaaatgacctggttctttgcagttgtaacaaatcaacgtcttctttgctgagctgtccatctggggatgattattgtgacttggagttggaattggtggttggaaatccttgctaacattggcatcagtggtaccatagttgctatcaccattggagtctttctcagtgtcaaaattgctaaggttgtcattctgggttccaacattgatactatcgttgacatcttggtgaatgctactgacattgcacgctttattcgagtggtcactaatggggcaagaaccatggttgttggtggtatcatcattattagtattgctagtgttgttgtctgcattgcattcatcttcttggggcaggaactcttgatgcacaacaggagatccggtgatctgaagtggctcagtgcgctgtctttggttaccacctggaaatactgggatgttgacaatccttctcttgcagttcgtcatccgattatgctcactttcgagttgcatggctttgtccacaagtttctcaaaatcttcataatcctctagaagtagttgcactgcaaactcatcttttaacccctggagaaacttctcttgtttgtcttcatccgtttccacatcttctggtgcatagtgagccaaacgatagaactcatgcaggtactctgtgacggtcaaatctccttgcttcaggtagcgaaactctcgttttcttagtgtgatcattcctgtgggaacatgtgatctcttgaatacagatgaaaactcgttccaggtgatggtatgtccttctggccgtgatgcttcgtagctatcccaccactctgaagccggtccaaccaactgatgagttgcgaagccaacccgctcctggtcggtgcactgaatcaaccctagcttcctctcgactgtgcgccaccaatcactggcttccataggatcgacggccatggcaaaggttggaggccccgttttgagaaattctgataacttgcactgttgctggactgtaggtacttgaacgttggttgcccctgctgggttgttccgattctgtaatagttgaaaggctgttgccaacatgttggtttggttaaccacaatttggattagctctggtgaggtttcgttgatgcttttctcattcccattggcttgggttcttgagtcatcggatccatcattcccatagcctttgttaccaatgttatccatctgtcacaaggtaggggttgagagaggaagcatacaaggaaagaagagaccagaactagggacaagaccttaaaggaactaactctttttgttgatgtgttgtttgttttgcttattctgcaagttgattaaacaaacaacctagcatggtcacatcacaacccaccgatgcaaaccatgcgctacacacacaagcaaggaaacacactacaaacgaaacactagagggtggcttaggttctgcgacgggttctccaagatcttcactcctgcttcccagctggcttcactgcttcctccacttcactagcagatcctgcagtcttctggagcttcggcaaacaactgacgatgtcctctactgacctgaccatctagtactagttgaaaatccgaagaaggaagaacggagtaaaccttttgcaaatagcattaggggaaggagaaaaaggaactttcgcaaataatttttatttataaaatatgtccttgggttttatccacttggcttatcctacagtcgagatggctctgataccagcttgtcgcgaccgggaaaattgccttctcccgaacgctagtgtattaatccccgtcccaggaaaagccggggtacaccatacaaacatgatataaaagacacatctttattacatcgataatatttacattattacaagggcacttcaggcctgacaaacaaaaataaacagcagcggactagcgggcctacggctccatcttcacaggcgctcaactggggtataagccaggactccacctaagacatcttctccaaagcttctcttactgaagaggggaaggattgagcaagaatgagtacaaccacagtactcagcaagccacaccggcagatgcatgattaatgcaagggggggggggtacaaggggataataataggggttaggttttgcagtaaacagcatttaaaagtcacttagttgcccaaagccattttgtaaagacgatcctagagctacacagtattattaaacaaggtcgtgaaccctcacgaacctgccttaacccaaggcctacgatgatttggaccgaactggcaacccgacctgggttccagctcgtcccaagccaacccaggccaaccattccatattttagttgttgagcaaaattttaagaattaaaacactgacttgggtacattgctaggcttgcccatatccgagggctcggctattcgaatagatttactctgatcagaggtgtacatctttacccacaagacacatctttactccgcattccatggccttggaacccgtcgtaaagatgtgacataacccttcacccatcctagccgtgaacaaaagtaccgacccaatcccacctacggccgggatacccgggacaggcaggcagaactgagcccctagcagcagggcaccaaccctctgccgtatgacatctcgactaccgggccgcagctcgtgtagccttcatttgccctggagaatgtccatcgacacccgacttcatccatctccaatccgtgtacttttgttcaggactagactgagcaccgagttaagccttacccattagacatgtggttagtacggtagtgctttgcaacagaggcccgagcttaatccttatagtggccggggtgctacttcccataactggcatgcacccaaaccccaccgaaaacaggttttaggggttttgaaagaggaagagaggtgtgtgtccaattccaacataagccgaccattccatagtgtccaaatgatatgagaatttcccaagtctaaagttataaaaccacctaatgttgcctaattaatcagcgaagcatctacctaaatttaaactagggataccacgagtagagtacccactagttggggttttatttattctagggtgaacaaggtaataataataacaataacaataataatatggtcataacaaaggtaaataggcatggctaaataaaacagtgacaacgcgggaatttaaataaagcgataatgcaataatttaaatcaacataattttacaaactgggattcaatatgttcaaggatgatgtgacttgccttgctcagggagaacggccttccgaaccttcggcaacgaccgcaaaccacgcttcgggaacctccggaacgacgaaagctacgcgaagcacacaagcaaagctacaagcctataaagaagcaataacaacacataaaaagaaagcacagggttctttaggttataacaaacattaagagacttgaacgggtcgattcggagctcgtatgaccaggatatgatcatccgaagtttaatgctgttatatggagatttgcgaattattataattaagctttgcaattataaaacatgtgtaagcgctagcctggaaaagacaggaaggctgcgccgttgacatgcggaccccacatgtcaacctaaaggaccgcggtagaccggatacacagagacggtccacgggtcgacggaagcggaccccgtgtgtcaaccgaggcgagtggccaacaaacggactccactagacaccacacggcctgcacacgtggaaaccacgcggctaccgagcgggcacactaacacggacactacacggtcaccacccgcacacgtgaacgactaccgacaccggtacacgggtaccggggtcgacgaccgcacaacgagcacgggcgacaccgaaagggcgaggacggggcagcgaggggaggaaaccttaccaccacgcgacgaggcgtgggaacgacaacgacgaacgggcgcggcggagacagacgggcacaacggagacgaacggcgaggggacggcttcggcggcgatccttgggcgaaggcgagacgcggccggcacgaggcttgacgacgcggagccgaggacgaacacgaggacggggctgcagcgactcgcttgacgaacgcggacgacggacgagaacggcttgacggagggacgaacgccacgacgatcgggaacgacgagaggacgagggcgacgacgaccggggccggcgaggaggcgacgaggacagccggcagcggctgcacggggacgaggatgacgtggaacacgccgctatgatgacgatgacggaggcggcgccgcgagacgacgagccggcgagagggaacggtgaagacgacgacggacaccggcggtgttcggtcggaggggaggcgaggccgaggacgacgtcgcggctgcgatgccgaagatgatgggggtgtggccgaccggtgcacgggcgaggagggacgggcggccgaacaactccggcgaggcggatggagaggttcgcggcgatggcgttccggcgaaaccgaggagtggacgaggtggagggctacgtcaccatgccgagggaggggacggcagcgccggctgatgcacgggcatggcgaaaggggcagccggaggagatgccgccgaggaggaaggagaggccggcgcgggcgacggcgttccggcgaaattcgggcgaggaggaggtgatgccggggaagaaggcgatgccgcggtgtcgaaggaggagacggcggcgtcgatcggcgcaccggcgatgaacagcagccggctggagggagtacagtggcaccaatgccactggttgccggcgggggcaccgttccggcgagtttccggcgaggagacggtgaggccggtgaaggggacggtgttgcagagccgagggaggcgacggcacggccggacgatgctccggcgaggagaggaaggcggctggaggtggccggcgcgaaggaaagaggagggcgacggcgggaacggggctagagaccacggggaggctcgggatggggttaaaacggtagaacggagtgcggggatcccattttatatgagagaagagggagccggccacgggggaggtcggaacggcggcggaaaagccggccggcggcaatggaaggcggccggacttggcgcggccgttcccggcgattgggggcggcatttaagggggaaattagggggaaatgaagaggagtcaatggggattaatttcccctatttaatttgggaatcccatgcttgaatcgagcggatttagaggaggaagcgagctagggttcacgggagagggagagaggacggccgggcgggaggaaggggacgacgcccggcctgacgcgtgggccccacgcggtcgggcgcgcgtcgtcaccgcgcgcacgcgcgcggcacgtgcgggaggggagcggctcgggggctggggcggcttgggccggcggccggcccaggaagagaggagggagaggcggcctgggccgggcaggccgggaggggaggggaagagagaggcagcccgggagggagagggaagagggaggtgggccgaggggaagggggcccaagaggaggagggagagaaaagagggaggagaggaggacttcggactgggcttggcccaaaggaggaagaggagggatttttaggttttctttttattgaactttgataattgtttttgttgtttaataattatttctggtgctctgaaaattcaagtaaaatttgagggctctttttagaccaaggagaatttaacaaaaattctccgggccacattggaatttttcttgtacgtatttttagtgtttgccaatttctttccgaattttaattaattctattattccttttagaaaataaattttaaattttgggatgaatttatcaggacgtgacactttaggagtggcgtcacgcccggccgcttcccataagaagggcgatcgccctggcataacgccgggggctactgtcggtgacatgggaccgggagtatcatgactcgaggcttgaggcagacacaatcgcccacgtggcctggcaccctcgggggacgtcgggcccgagggtgatgtgtgcgcccacctcttggtcttcccgaggggggggtcggaccactccagccttgcccccgaggggcgaggcgccccgacccctcgcgttttctactccacgtgtatgggttaggtgagcacagcagggctcacctaaccgcatttattgcgcctcggctaagcgtgtcacgccgcacgaagtgcagtgcagtgcactcgattatccggtctgtgaccagtcacagaccggtcaaatcgcgggttaggtggcgacaggcggtcagacgcatgcttcgccccatcctgtctagacgagagcttctaggcactcgtccccggctggagctagcgtgttacatcccagagatgacacgttagccccgatcgatatatgccaggcttcatcctaaccattacaagcaagatgttgtttgaagaagggcaaacatgcacgttgctgagccgacgtgtggtggacaagaatgaccgatttgtgaccggtctgacactgctcatgtcgtcagcacacagccaccttcccacgacgtgcccgcctcaggcagaagtggaggtaggtatgtgccgtcccgtcaggaggatgttcggaggacgaccgtgcaaatctccgtccatttatgaaaagagaaaaagtccagtttggaaagggaggggtgcatgtggtatccccttgaagtataaaaggaggaccttgcccatagagaaagaggttgattctttccagattcagagcctagaacgagggagaggtcggctcacactttgtagctccttcatacacagatccaccaaaacacaggagtagggtattacgcttctcagcggcccgaacctgtatacatcgcccgtgtctcgcgtttcttcctagctggcgatctttccacataccgagagagcttgagatttcaccctaagcccccggccgaaccggcaaaggggggcctgtgcggtctcccggtgaggagccacgagctccgtcaatataggaacatatataatttacaaataactaaaatttaatattaaaaataattaataactaacacatatataaaatataatatgaaaattcagaaataaaaataaataatattggaagaagagtatagagtctatatagaaatacaatttacagaaaattcggaattaagaaaaaaaatattaaaagacgagtctagagtccatatagaaatatatataatttacaaataactaaaatttgatattaaaaataattaataactaacacacatataaaatataatatgaatattacacattagtagtttgtaaggttattgcaaaatttaaaattatgttgtcattttaatatatttgaataatataatgagaaaacatatatgctattatatgagagaaaatataatgatgcctaccatgctagttagtagtaaatacggacacccgtaacaagtttagaacttataccaagtagattaattcttctacaaggaatctaggagagaataattagcagtaaatatggacacctgtaacaagtttagaacttacacccaagtagattaattctactacaaggaatctaggagagaataattagtagtaaatacggacacccgtaacaagtttagaacttatacccaagtagattaattctactacaagaaatctaactagttgaactatcttcactttggcaaagattatcaagtttgcaaatggctttgtagtgttagtgctaacttgcgtccttgcgattttgtatcgcgagtcatggctgactaacaagaggatgactctttgttatgttcatcagtctattcagaagttcatagctgagcctcaatagaatggaatttgctgcctatacctgacaaaatctatttagctgatagactcctgaccatctaatagaacagataatgcatccgtagagtacatgaccataaaaacagtcaatcaataccagtaaaagtcgcatccttgaatgatttgctctacagaatttttattacagaaccgattggtccccaaggcccaactgccattacacgctcttaaaaagatcaccgtgtattcccatttcggagtccaatatcgttgccacaattctacaaacaagaagcaacaatcaaggttggcttgaccaagatacatctagcagactagcacatagtacttacaacaagtaatgtacaatgggtttaaaaaaccgagctgaagacatgatacgctgagattatggagctaaaaccaagagcaacgaaagctaagaatgccatggaggctgaagcattgataagtttggcaaattgatccactccaaaccgagacacccaaacatcattgcgagaaagtgctgctgaagatgctgacaacaggaggtaagccaatatctgcaatgaacatatataaatagtcatgcaacgaaatcctatcccatgcatacagttctcagccaagatgccaatatgtgcagaacctcagagataaatgttaggacaatgccaaacaggaagttagagaacaagtgcagcataactccagctgatgagatatagcttatatcaaaggaaggacagaagaatgaagtgtacaacttgatctacaaactctatgcgcctggcacgatagaaccagcaacatctgatctacaaactctacgcgcctggcacgatagaaccagcaacatctgaactaaggataaagtgcacaacataatctacaaattttacgcgcctgcaccagaagcatctgaattccacatttttttaggcaaattatatgattgacttgacaggtacatgaaaattttcttacattgcaaacagcactgtgataatgaactgtaaaattgagtcctcgattcaagattgaatatgtcgtagagaaaaatgatcaactataacataaagttcatgaacaaccaaagtccatcccctgcatgcagcttacagcttactttaccccaattcatacaacttaagaattaagataatctaatcctgcaaaaagttgaccactgtctcggaatccaagcttacaacaatttgtaaccatagaccaatcagcaacagattaaagctcacacataatatgaaaccgaaaggacagaaaatacattcagagctgaagttcttgcctgatccattgcgagattgaagtacttccctgatgggtctcgaattatacgtctccccgtgacaaagtagtgcacttccacgaccaactggaaccccgagtaagtaaaagccaacacactcgcagaaagtgtatacctgcattgcagaagcacacaacttccatcaataacagaagctggccgccagagggggatttggcaagcatcatggtacggcgttgagagcgcaacctgtactcgttgtagcggcggaaggagtcaccggaccagcccggcgtggtatcggcggccatgacggagagcgagaccaagcagaagacggcggccaaaaccctgaaccctagctcggccctcctgagctccgaccgccgcaccttctctgggacgccgccaagaagccatctcttagaccccacgcctcctcctccaccaccgccgccgccgccgactgatgcgacggcggcggtggtggtggttgctgctggtgcggccttctcgggcaccggcttcgtctccgtccccgcgtggtcctcgccggagaggagcttggcaatggtcagggcagactccttctgcggcgatccggttggggactccgccgcttccgcggccttcggcggcgtcggcggcatcgccttctccgtctccgtctccgccagcgcaagggcaagcgtcatgttctccggttctccatccgcttccgacgcctcccgctccagcatggattccggggaccccggtgctgggggagaaggcggcagtgatggtggtggagaaggcggtgctggttgatcgggagcgggagcgggagggggcgccgcccgcggctgtggagttcggttgtcgtgggggaggggaggagacggatcggcggtgggaggagggggcggtgccggggcctgcgaaggaatggggcgagagggatcgccggagtgatttggtgacggagtagtaggggcggcggcggaggcaggaaggggaggaggaggaggggttggattttggggtgagatgggagggggatcggttgccgggtgcggggtgggagggggagggtgggattgggcatcatcgccatcggtggccggctccggcggcggcgagtggattggggaggccattgctagtttgctcgatggttgttgaggtcgctgcttcggttggtgttcagttcagtgtagtagcccacactggtcggcagtagtgagaagaatcggggaaagggaagtggggaggtggtcaggtggactaggtttctcaagggaaatggacgtacgagtacgagagcagatttaaggccccctttgatctgtagaaaaagtgtaggaaatttgaagtatttcaatcctatggaaaaaatttctatgaaagcctttgaaacaaaggattgaatcatatactatcctttaaaattcctatggaatggctaatcctatagagattttggaggaaagttagcaagaggtccaacctcttggaaaaattcctttgagtctatctctctcatccgattcctgcgttttttctgtggtctaatcaaacggtcattcctgtgtttttcctgtattttccaatcctttgttttacacctgcattcctgtcagaatcctacgtttttcctattcctccgtttttccattcctgcgattcaaaggggccctaatagtatagccaattcatgtgacgcgcttacggatccggaccgatccggggctagggaaatcccacgtcatacgtccgatttacgtgtaaaactaatctaaactgattttttttcttaaattactaattcaaatcatgatccgattacaccattaaattcgttgtaattaaatcttcaaaacaagatcacacatggatatataccgacgaaaaaaatagcttattattgaattatttttaaatattacacgatgttccaccaggtatatcggaattgtttcactaagtagagcgaaaatgtttcactcatttaaatcaggtgttgtttcatcttatataaaaaataatgttttagcaaatagcgaaataatgtttcagttcactgcaacattagatctatacatagtgaaacatcgtgagtacactaggtgaaacatttttctgcggaaaaaaaaataaaccaaattcccttaataggggggttccaaaatatatgggtttttttgttgcaatgaaatgttcgttcactacaacattagacctatacatagtgaaacattgtgagtacactaggtgaaacatttttttttggaaaaaaatgaaccaaattcccttaataatgagtttccaaaatatgtgggttttttgttgaaaaaaatattttaattcactgcaacattgaatctataaatagtgaaatattgtaagtatactaggtgaaacatttttgtagaaaaaaggggagtgggtgggtccaacagtatggacgtgggggagggacgcgcgggggagcgtccgatccggctcccccgcgtcgggcgctcggtaacgagcattatcgcaactactagctccaatttatctatagctcattcatacaatagttacatactatactattataatatatggtcccacctgtcatacacacactgcgtcttgaaatccgtgctatagctagctataaatctgtagcccgctgctcttctctctccttatttatcttcttaaaatatgtttacagctggcttatagcttgtacctgctctgaacaactccttgatgtaaattgtattggacgtatccttgagcgtgatttactagtaataaaggatcagtaaattgaatcgtgaactagagatgagaaaagtgcaagttagtatttgcagccagagtatttcggtagaaacttgacgggtgtttggaaagcgcatgtaaggtttgtcgtctcaaaatcccaatcattacattagccttgcatgaagcattgtccaggtttactaaataagaactaatattcatgttacattggattgcgtattttatagctctattttttaatcacgcactctagtcaagtttttatagtactactatcagattgttcagagtgcaagctcttgacactaaagtgtgctcacctggttggctggttgttgtaccttagcggaatatactctttttctttttcttctaagagggattctaactcaccagagtcaccaagtgtgcaggattaccacaatgtacaccttttcccattggtctgtaagatgaactgtacaaattttagaagggtttatgcaacatgtgaactgcaacagtgaaatattccattataaaagctagagatgtctatgacactctggctcatgttaaggatgggttagtcaaaggtgttgaagtcttgaagaagcatgggcatgcaacgtatacttcctttcaactatgcactgatatagggatatattcatattcttcatgtacagcagatatgaaacctgtatggttgtatgacaagtagtaaattatttgcaacttggtggatttgtacacttgaaaacagtagaggcaggttgtttgtattcaggtatgctggctggatcaacaggtcgaacctcaccgggctgaaagaataggctgctatgcctgcagaaatgataaatgatagagatataaggatatgtttccccccaatcactaatagtgcagagtatacatgagcagcagtgagaaaagtttccactaacaaactccctaacattgttgcactgtgtttaccagaagtcctgcagataaaaacttgcaaaatggagtggaataaaatgaattgctggtttttacctccggaggtctagccctatcaacccagcttgtagaattgacaggttgtcagaatctggtgaaacaatgacaacggtatcccccgagtactgagtctctagtattgacatgagctgcgttacccgaacaaatacatctgcaacactctcatttggtgtaccatcactaataggaggtggcttgatgtctggcgaaatactgtctgatgcatacacctaaatccatagcaagaaagggaaattcaatgagaacaggatggaatttaccaagcaaaaaaatggctgatccataaaccgaagaagcttcagaaaaagaaacatagctcagtcaatatagtgcaaaatctgcaatatcagtactggcgtggaagtgtatattagttcattccctgatttctaaccaagaaagtatatatctatacttatcaaaggtaccaatctcactgcctatttcccagtaacctaaaaccaaacagaataaacttgtatgtttgattcatgaatcatgataaagtgagtacacgaggatatccattcctcaaattagttctaagaatgaacggaacttatatcctatatattacattgttcattgtttgttgagatatttaactagcaggtcgagaatactcctgtctgcgaaaacacttaaacactagtcaaattaacatattctattaatctaatactagtagcagtgctatcaggagccaaagatttttaagcccttcatggcagttggcaaccagtatttcactaattgcatcaattctcaatctagcacccaatgtcacctaaaaccaacatcttcacacaacagtcttgtatcactctgctgtgcgattatattgttaaaatgaccaacggttcttttactagttccggttattgcaacttcgcgttccacgagaaagtggcaaagatgcatcattcgggtgaagaatacctcaggcaatgtttctaggctcttcccttcaaacgcgcccaggccacgcgcatctaagaagctgtactcgggtacaatgtggctacaaatcaagcaaccaacacattaatacatgatcacgaattcacaattcaccggccatactatactactactatactagtgtactcgtgtgaagccgtgggctaagagagtgcgattgaagaaacagagataggcggaggcaggcacctgcggttgatctcgttggcggcggcgatgatctcggcggcctggtaggcgcgctgggtgatggagggccatatccagcagtcgtcctcgcaggcgccgaggcgctgcagctcgagcgcggcgcgggcggcctgccgcaggccggcgggggagaggccgctgtccacggaggtcttggagaccgggttggtgcggacgacgccctgcccctcgtacaccgactcccccgcgcgcaccaggaagtagcggttcgccagccgcggcggcggcatgcggaacagcccgcgcgccgaggccgccgccggggcgagcaacgggagcgggagcgggagcgacgcggatagaagcaggagctcgcgtctgcggggacagggcgagagggcggcgcgcggcggtggcggtggcgatggcgccaccggcgaggacgccgcggtagcgggagaggcggcttgcacttgcatttcccttctcctgtacggatccggaggaggaggagctcttgcggtcttgccacctggacggtagtctgaaaatatccacctagtcgggccgggccagctgttgctgcagcccggcccaatagcttctgcttgagttctccactgcgtaacttttgacctttgactttcgaaggattgccttttggactcaccaccaggttcaaccaaacaaattactccctcggtccctccgtttttaatttatttaccacttttaaccatgcatataaacctatataatcaactttttttaagtaaaatgaccaaaataccaacagttttgtgcgacatctagaatttagaagttccatccaaaacccatcaagaacaaaatagcaatcaccaccctgatcagcgcgtcgggataagaatttataaactttattaaaactggtcgaaactcgaaaataatgaaaatgaaaaacggaagtagtgtaatttgaaattttaaattaaaccaaattttaatttactccggtagagtaacatcagatgtaactacggatttgtctatgctcatccttgtccattgttaggtttgcgaatcaaatttgctaccaccatacaagtatacatcacccgatacatcttgagacgaatttcaaacaattagcgtattatttttttaataaatatagtatataacttttggcctttgcaccaactaaaagtgcacagaactcatatttagagacaccgatacatgttttgtgaaaattaacattgactcgtatggttataatatggaaacataactaataaactctgtattaattcaaatatgcttatcaaatccagttattattgaagggagaagtgtgagaggggccatgatagatgaagattaagattatgtaaagcacataaaacaagaaagacattagcatatagctaattaagttttaattattataaacttattttagagcaactttcaaatagaatttttttttcacaaacgtaccatttagcagtttgaaaaacatgctaatggaagccgagatagaatctactccatctgtcccagtatactcgacgttctagcatagttgagccaaatcaagcctaggtgaaaattaccatatagccctaagggtatgctcaggccctgtttagttccaaagtttttttttcaaacttccaactttccatcacatcaaatatttcatacacacacaacttttctatcatatcgtaccaatttcaaccaaactttcaaacttcagtatgaactaaacacaacctcaatgtataatgtctacttgggtaataaggtaggacccaatattagtatatggtaagagaatgcattagcctggattccactgtcccactcgaatatatggcatgtgagagagaagaggagagagaagataaagtattattactttatttttatgggtagacattatgcatatggctagctcatcttaaagactaatatatggactactatcacaatgtataaagggccactttagaggcttaagacccccttctattgctacattatggctgccctaactggagtactagttactttaaatagccatgatgagtagtcattttagataaaaatacaccggccgttcctgccacggtggaatcatggacgagctgatgttcctgattacccggttagtaaaatttgaatcgtactctgctgcgcctgtctcatgtttatgctccttactaaaacgtcaagcattgtgggtcaatggaccacaagaagtaaaacgtcaaatatattgggaaggaggaagtacatcttattgagtagggtgtaagtgtaactgcgtcctctctaagtccaaaaggacaatttctaaggatgaatgcactcatctaaatttgaagtggtttttaactttgtatagtacggatggtgcaagtggataaatataaacaggtgctaattaaaattaagaattttgaaagcaattagagtaatactagtactacctgccaaaaggcgccccaacattgtggctttgcaatcaggcgtgacacggcacgtgccaatggtcaaacaggacgtgaacacatcattttgttgagcccagggcccagcaagccaagagcgtactgtacgttagataagatgggtcaaactctcgtctgacaacgtgattcgctcgctctgttctctgatctcccgcaagctacagtgccaacccaaaaagcaaaactaccccctaccgaagtctaccaaaaagtagtacggttctctgatatctttcattatttttgaaatttgaattactactcctcctacagctaaatttttttttctcacattggagtagtagtacagtactagtatttggtttaggttctttttgtttcgtaaatttctctatacattggaaaatatttggatgggcgccctccggtttgaattgcgaaggaatttgcgagcttcatgtccaggcgtccagctgtccaagcctttatgtacgggggccacctgcccgttgcgcctcatcctcctcaatcaccgttcgactcgctgcttcccctcttcttctcccccaaaccaaaaccctcttgacccttgtcgtctccgcaccgcagccgccgcaggcgaggcgatccacatggcggcggccgacaccgacacgtacgtcaccgaggtggccttcggcgacgccgtgatcaccaccaccgtgacgtcctccggcgccgccgtggaggggtggctccgggaggtccgcgccgcgtacggccccgggctcatcgtggggctcgacgtcgagtggcgccccagctacggccctgcgcagaaccccgtcgcgctgctgcagctctgcgtcgaccgcaggtgcctcatcttccagctcctctacgccgactacgtcccaggctccctccgccgcttcctcgccggcgccgcggactgcttcgtcggtgtcggcgtggacaaggacgccgagcggctgagcgacgaccacggcctcaccgtggcgaacaccgccgaccttcgccccctcgcggcgcagaggctgggccgcccggagctcagccaggccggcctgcaggccgtggtgcgcgccgtcatgggcgccgacctcgtcaagccgcagagggtgaccatgagccgctgggacgcctcctgcctctccaacgagcaaatccggtacgcctgcatcgacgcctacgtctccttcgaggtcggcaggaggctgctccgcgcctgatactgatagatcgtcgatcgaggcggtcgccgtggcacgtaccgcaatcgctcgcatcctctctgcctaattctacctagattagattccagttgctgctgcatttcgctcctgctctctcgtaatgtgttaggctacctagattcagttgttgctgcatttttctcttgctctctcgtgatgttaggcaagggtttatcagatttgaggtgttatgggttttatgtttagtactgaaggaattgaagaatcggatgaaaaaacgttgtgccgatcttctgatctagactatggttaatgaaaatttccagtgccgatcctttatgcgtttttagtgctgtttttttatatctgtgctagatgatactgcttgcagatcgtgtcatcaactggaaatggctcctttgctcaaattgttctacaatggtgtgctagattatccattcattgaattgcctagcaatttggaacatcggttaaaattaggcataatatctttgttttgcttgggttgggtctcttactgtgatagccacttgcatcacattgtgtgcaatgcagttgatgaacatagggtgtgtttagttcacgccaaaattggaagattgattgaaattggaacgatgtgacggaaaagttggaagtttgtgtgtatgtaagttttgatgtgatggaaaagttgaaagtttgaagaaaaagttaggaactaaaccaggccatactacctgcatcctagctagtggtttgttcttctatcagcattttttccttatgaataaaatggtatgccaagccactgaccattaagcattgcatatgaagccccaggcatacttgtagcgcaaatatccagttatccactatataaggcaaatgatgatttataccaaagcattatgcagggctgctaagctgcaagctactcctatttcagacagatctggcaaatgaggtttctgtttgtcggtgacatgggaccgggggtatcatgactagaggcttgaggcagacacaatcgcccacgtggcctggcaccctcgggggacgtcgggcccgagggtgatgtgttcgccctcctcttagtccccccgagggggtcgggccgcacccgcctcggccccgagggccgaggcgccccgacccctcgtgggtttttgctccgcgtgtatgggttaggtgagcacagtagggctcacctaaccacatttattgcggtttggctgagcgtgtcacgccgcatgtaacgcagtgcagtgcactcatttatccggtctgtgaccagtcacagaccggtcaggtcgtgggttaggtggcgacaggcgatctgacgcacgcctcgccccatcccgtcaggacgagggcttctaggcgctcgtccccagctggagctagcgtgttacctcccagagatggcacgttagtcctagtcagatatatgctaggcttcatcctaaccattacaggcaagatgttgtgtgaagaagggcgaacatgcagattgttaaactgacacgtggtggacaagaatgaccgatttgtgaccggtctgacaatggtcatgtcatcagcagacagccatcttcccacgtcgcgcctgcctccggcggaagtggaggtaggtatgggccgtcccgtcagaagatcattcggacaatggcgatgcaaatctccgtccattaataaagaaaagtcaaattggagggagagatggggcatgtggtatccccttgagatataaaaggaggaccttgcccactttgagaggggacgggacttttccagattgggaacccagaacgagggagaggctggctcatactttgtagttccttcatacacgaatccaccaaaacacaggagtagggtattacgcttctcagcggcccgaacctgtatacatcgccggcgtcttgtatggttcctgtctcgcgaaccttccacagattgggagcttagagtctcacccagggtccccggccgaaccggcaaaggggggccagcgcggtctcccggtgaggagccccacgctccgtcatctggcgcgccaggtagggggctctgcgagtgatcttctgagctcttgcactctttcgtgtgcgccaagcttttcctattcagcctcatggctgagcaagcaaaggcgcacgacctctctccgagtgtgagtggcgacgacggggagccgaacccacgccgtcgagctcgtactccaccgccccctccacgccaaagtcctaagcggggggaggcgctcgagagggccgaaggatccgcgacttcgacatccacaggaggtggaaaagagcggcgagatggggagcgtcgtctcctcgtctatggtgacggcagcacgccccagggcgcgctccaagctgcgggcgcgctcctatgtcacccgcccgtcgcccatgacccggagtctccagcccaacgttggctggacgatgtggccaaattggtcatgactgcacggcagcatctagatgctggtgggcggtcctccgccaccaaggcctctggtgctgctaccaccggctccgcgtcgtcaagacgaagggcgcggcgagcggcagccgctgttcgccattcggccaccactccttcgtcgactccttcgacccgggaagatctgcgtggggggccggacgcccgcaccagcatcgagcggcggcgtaatgaccgacgtgctacccacgcaacggagggcgcttcctcgtccagagtgtcacctcaacacggaagcgggaatcagccctccgtgcccccggttggtggtgtcggctgtagagcctttgtggcgagtcttcggaatgtccgttggcccccaaggttccggcccaccatcgccgaaaaatatgatggcagcgtcaaccccgccgagtttctccaggtctacacgaccgggattgaggccgccgggggagacgacagggtcatggcgaatttctttcccatggccctgaaggggcaggcgcggggttggctaatgaacttgccacccgcgtcagtccactcctgggaggatttgtgccaacagttcaccatgaacttccaaggcacgtatccgcgcccaggtgaggaagcggacttgcacgcagtacagcgaagggacgatgagtcacttcgctcgtacattcagcggttctgtcaagtccgcaacaccataccatgcatccctgcacacgcggtgatttacgcgttcagggggggtgtgcggcacaaccgcatgctcgaaaagatcgcctccaaggagccccagactaccgcggagctttttcagctcgcggaccgagtggctcgcaaggaggaggcctggacttggaacccctccggttccggtgtggcagcttcggccgcccccggatccgccgcttagacagggcggcgtgacaggaggaggaagaagaggtcagtccattccgacgacgagggtcatgtcctcgccgagtcgccgtcgagggcgcttcgcgggccacccaaaaggggaggcctgcgagcgacaaaaagaaaaaggccggcgctcccagcagggagcgcccaaccggcaagtggtgcaccgtccacaacacttcccttcacgacctcgcggactgccgtgcagtcaaaagtttggctgagcggacgaggaagtgggaggaggagaggaggcaggagcgccgagagggcaagtccccggcggttccttccggcaatcggcgaagtgaggccaagcagaaggcccctgccgaggacatcgatgacggcgatgatgacctaggtttccaagagcctggggccaccattgccactgtcgatgggggagcgtgtgctcacgtttctcgccggagcctcaaggccatgaagcgagagcttctggccgcggcccctactcatgaggcgacgcgccgggcgcggtggtcggaggttgccctcaccttcgaccagaccgaccacccaccgtgcgttgcccggggaggacagatcgcaatggtggtttcccccactgtttgcaacgcgaagttggggcgtgtcctcattgatggaggagcagccctcaacatcctttcccccgcagcctttgacgccatcaaggccccggggatgatgctccggccgtcccagccgatcatcggtgtgacgccggggcacacttggccgctaggtcatatcgacctcccggtcacctttggtggacccgccaacttccgcacggagcgggtgaacttcgatgtggcggacctcagtctgccctacaacgcggtcctggggaggcccgcgttggtaaagttcatggcggcggtccactacgcctacctccagatgaagatgccgggccccgacggccccatctctgtccatggcgacctcaaagtcgcgctcgcttgtatggagcagcgtgcggaccgcctcgccgtcgtgtccaagcccgagggcggcgacgagaggcttgacacatccgcccccgccgccccgaagcagcggatagtcacgtctgatgaggtcccggtcaaggaggtcacactgggcgacggcccgtccaagaccacacggatcggtggtcttttggacggcaaataggaagacgcgctcgtctccttcctgcgggcaaacgctgacgtcttcgcatggagaccggcggatatgcccggggtccccagggaggtgattgagcaccgtctcgccgtgcggccgggtgcaaggccggtccggcagaaagtgcggcggcaggccccggaacgtcaagccttcatccgcgaggaggtggcgcgacttctggaggccggattcatccgcgaggtcatccacccggagtggctggcgaacccggtggtcgttcccaaggcgaacggcaagcttcggatgtgcatcgactacaccgaccttaataaggcatgtcctaaggatccttaccccttgcctcgcatagatcagattgtcgactccacagcggggtgcgaccttttgtgttttctagatgcatactctggttaccatcagattcgcatggctagggaggatgaggaaaaaactgcgttcattacccccataggaacttattgttatacaacaatgcccttcgggttaaaaaatgcaggtcctacttttcaacgtactactcgaatttctttgggtagccaaataggacgtaatgttgaggcttatgtcgatgacttggttgtaaagacgcgtaaccaagaaaccttactctcggatctagcggaaacttttgaaagtctccgctccgcccgcataaaactgaaccccgataagtgcgtgttcggtgtacctgcgggcaagcttctcgggtttttggtctctgccagaggcatcgaagccaaccccgagaagatacgagctatagagcggatgcgcccccccagcaagcttagggatgtgcaatgcgtcaccggttgcatggccgccctaagtcggttcatatcgaggctgggggagaaggcgctacccttatttaagctcctcaaacgctccgggccgtttacttggacggaggaagctgagcgtgccctcactcagttgaaggcgtatctcagctctcccccggttctggtcgccccggagccaaatgaacccttactactctacttagcggcgaccccgcaagtggttagtgcggcgttggtcgtggagcgcgatgaggacaatcctcattccgcgcacccccaccctgtgcagacttggcccgggagagagcagggaggagaggcccccgagccgaacggtggcccaaggcccccgacgaccggagttggccctctgcccgcttgtcagacggtgctaggagcccccgacccccaggaaggccctgaggccactgtgggaaggccgtacctatcgccctttgaccccgaggctaaccctgtgctgactcgacccgggaaagagcagggagaagaggcccccgagccgaacggaggtctaaggcccctgacgaccggagttggccctttgcccgcttgtccgacgatgccaggagcccccgacccccaggacggccccgaagccactgtgggaaggccgcccctgttatcctccgaccccgaggtcatcagcacagaagacaagtgcgccccgcgaggctgcttggacgaagagtgccccagggatgcggcccctagcgaagagaatcggccccaccgaaaggtgcagcggcccgtctactttgttagtgaggccctccgggacgccaaaacccgataccctcaggcccagaagatggtttacgctattctgatggcctcgaggaaactgcgccattatttccaggcgcatcgggtcactgtggttacgtcttaccccctcggtcaaatcttgcataatcgagagggtacaggacgggtggtgaaatgggcaatcgaactttctgaattcgatttgcactttgaaccacgccacgctatcaagagccagaccctcgccgattttgtggcagagtggaccccggctcccgagcccgtctcgatccctgaggccagcacggacccctcgcagctgcctcacaccgcccactgggtaatgcagttcgacggctccctgtctcttcagggcgccggtgcgggggtcacgttgacctctccgagtggagacgtcctcagatacttggtccgcctcgactttcgaacgaccaataatatggcagagtacgagggactccttgccggactcagagtggcagctggactggggatccgccgcctcctggtgttaggcgactcccagctggtcgttaaccaagtctgtaaggagtaccggtgctctgacccgtaaatggacgcctacgtgcgccaagtacggcgtatggagcgccattttgacgggattgagcttcggcatgtgcccagacgggataacatgatggccgacgaactctcacggctcgcgtcctcgcgagcccagaccccaccgggcgcctttgaagaaaggcttgcccagccgtcggcgcgacccgaccccttaggggagacggatgcgcctgaccggcccccaaggcccgtcggagtccaggcctcgggacccgaagggagcgctccaagctcccttagattgattgcttggatctctgagatccaagcatacctcacagataagactctacccgaggaccgtgaagggagtgaacgcgtccaacgcatttccaaacgctacgtgctggtagaagggaccctctatcggcgcgcggctaacggaatcctcctgaagtgcattcctcaggaacaaggcgttgagcttcttgccgatatccatgaaggcgagtgcggagcccattccgcctcgcgcaccttggttggcaaggcctttcgtcaagggttctattggccgacagctctcaatgatgcagttgatctggtccggcgatgcagagcgtgtcagtttcacgccaaacaaatccatcagccggcccaggccctgcagatcataccactttcgtggccatttgctgtctgggggctcgatatcctgggaccgtttaagcgggccccgggcgggtttgagtatctgtatgtcgcgatcgacaagttcactaagtggcccgaggcttatccggtcgtcaagatcgataagcactctgcacttaaatttattaagggcatcacggcccgttttggagtgcctaaccgtattattacggataatggcacccaattcactagtgaactcttcggcgactactgcgaagacatgggcatcaagctctgcttcgcctcacctgcccaccccagaagcaatggccaagtggagcgcgccaatgcagaaatcctcaaaggccttaaaactaagaccttcaatatcctcaagaagcatggcgattcgtggatcgaggagttgccagcggtgctctgggcaaaccgaaccacaccaagccgagcaaccggggaaacgcctttcttcctcgtctacggcgcagaagcggttctcccatctgagctcaccctgaggtctcctcgggccaccatgtactgcgaaactgatcaagatcagcttcgcagagatgacctcgactacttggaagagcgaaggaggcgcgcggccctccgagccgcgcgctaccagcagagcctgcggcgctaccatcagcgtcacgtccgggcccgatcactctgcgtcgatgacctcgtcttacgccgcgtccaaacgcgtgctggattgagcaaactttcaccaatgtgggagggtccgtatcgagtgatcggtgtcccccggccgggctccatacggctggccacgggcgacggcactgagttgcctaacccttggaacatcgagcaccttcgtcgcttctacccctgaggggggggtcgggtgtcaggtttcgggctcgggtcaaccccgcacccccccctcgggtgtgcagggttggccgggggctgccacacatgcacattctcatttctctcatttcagtatttcaataaaagcagtttcaatttcctaagggctgtatctgtgccgttttttttcctttttgaagaattttgacttgaaataaggtcactcgtgctcaaccttgccctcgggggctcggttcggtcagctaaaatcgccaaacggggcccagaaccgagccgtgccccggggcgtggtgaactccgggggggaatcggcaaaaacccacaatcgggtcacccataaccctcggtcaccacgttcccggcctggccagtctcgacatgcggatctccccaggcagtagtcccgacccgcgcttttcgaggactgggacttgggcacgggcccttaaatcaagctaagacacaaaaagaggatcacggcacagatcatcctcatctcattcgcatagcaaaataaaattaacacaaagaattttttcatcatttttgattgcagattgtaagttgatttatacaaaaaagaggcatgaaggccttagaagaaagaaaaagaaaaaactggagtctggagggggcctgggggctcagtccgatgcgcccgggtcgccggcctcgtcgtcacgatcgtctgcaccgctggcatcgccctcctcgtcggagttgggggcgaacgcgagccgaggggccgacccctcgaaactgtggacgatgtggtcggcggcatcccggacccgcgcgcgcgcgtcgtcctcggtcccggaagggaactcttccagcgccatccatggagagaagttggggtccctggcctggtaactcgctagtacgagttcaaccgctccttgggcgaggtccctcgaggatgacttgatggtcttctcgagctcctcggggagttgttggagagcccaggccatcttcgtgaggtgcggagcgaggccctccaggttggcggggcgtgtcattgactggcctttccagaggcccgcctgccgaccggcgcgatccagacgggagactgcatcccagagcatgccgggccctatctcgcccgccaagcggagggcctcggcttccccggcggatgagtctagcgcgcgctgcatgtccgcgacggtgtgttcggcatctgcgaggcgggcggctaagtcgctttcgcccgcagccgccccgccgatgcacgccctcgcatccagctctttttcccgcgcctcgagatcggcagcccgctgctccagtgcggctctctcggcgcggacggattccaaattgcgacgggcctgctccgtcagcgctgcctcacggagggacagggagtccgccaaccgttgcgcttcggcctcggcctcttcgagagctcgctcccgctcggcaagcgcgtcttcgcggaggcggagtgcggactcctcttcggcgcaggcagactcgtgcgccgccagcgttgcctcccgggaggtgacggcggcctcgcggtccgccaggactttctccgcgacgcaggcgcgctcctccagcgccatggcgcgcgcctcgagggcctcttcacgccgccggagcgccgcttcggtctccgtcgctcgctgctctcgggcagcggcggcatcaagaaccccctgggcggcgtcgagctttttcttcagctccgcctcccagttcccgtgctgaaggcggagggagtcctgcgcctcgatcatcgcagtggtggcgatgagggcagccccccgctcctcctccacctctcgagcgatctccgccagtgccgtcttgcgggcctcaagatctgagacgtgccggcggtgtgccttgcggcccgcttctaccatggcctccaccgagcgccgcccctcctcgacacgcgcccatgcggcgtcgagctccgcacgctccgcctgcagggcctccacctgggcgttgaacccatccaataccgcggtatttgcggcggctaaggcctgcagaaggggctctgcgctcagcggggcggcggaaggcgtggggaagagctgccttaagaagacgccgcgcggctcggcccgccaatggacgcgccggcctcatcgcgggccacccccggacccgtttggtcctgggcgtcgcccgaaggggtgggcccaagcgaggcgtccgcggcctcgtcgtgaactgcctcggaagccgccatcgcctcagcccggcgaacccgggcggcctcctcccgagcggcttcttcggcctggcgaacccgggcggcctcctcccgagcggcttcctcggcttggcgggcccgggcggcctcctcccaagcggtatcatcagcctggcgagcccgggcggcttcccgggcggcctcttcagcttcccgtaggcggtctgcggcctctcgccggtcagattcccgcctccgtgcctctgcggccgccggatcttcggcctcggactggccggacttgagatggtgggaggaacgcgatgggatatcactgaagcagaaaggaaaaccagaaggcaaacaagatgggtaagagaaaacttgcttttgggatagaagaaaagacggtcgcaatgagcgtgggacgaacctgcgagggggtcggttaaatgaccaccttggaggggaaattaggtttccccgggatggttctgtctcccccatcttgcgcagccgcttcttcttgcgctccccctcgggctgcgatgttggcacggccccctccgggcgcctgctgccggcacgcaccgccccgccccctcggggagaagatgagggaggtgttcctcccagtttcctcttcccccgggcgtcggtagggcggttgccccccgggcccctgtcgcggggcccagaagcacgaccccctcccggggtagattgttcccccttgcggctcccgcctgcgccgtcgtggccctttggagcctgctcctctgaggccccgaccgctatcataatggtcaggatggaggcgcggtctggatcgctgcagagggggaggattccttggggaatgagggacgcctccacggagttgagattcagcacccgttggaccaatatcttgaaatcctcaggagcccagtcccatctcactccctggtgggtcctcatgaggtcttcggaccccgtgtactcccaggcgccccgagcgcgccgctggagcggcgcaatccgacgacggaggtagtcgccgtacaccatggcccctgtgagcccctgggatcgcaggcccgcgaggcggtcgaggacggcgtcatagccatcccccagatctaccggcgcccgccagctgggggcctgcgccgggggctggctcgaaagtcgaagatgcgcttcgtcggcgaggggggtgtagaaccagtcgctcttccagtcatcccactttttacggaggacgcaggggatgtagcagttcaacaccggcccccgcggcaggaaatagcagccaccaaccaccgacggcggcgacaccgactgcacggtgaagaaccaccggaacagccgaagagatgggcgcaccccaatgaacatctcgcacaggtgtgcgaagatgcccaatgtcatcactgcgttggggataaggtgcgccatctggagatcgtagaactccaggacgtccatgaagaaagaagaaaatggcggaaccagccctgccattgcgaaggggagaaagaagacggaccgccccgggtagtctagcgccgggcgtccctcacccagcattactatctcacggccggtggcagattccggcatgaagcggcgcggcaacccagcctgcttctcgctcacaatgcgagaaggcggcagcacgctaccatcaagcagtgcggagccccgtgccatggcaccggacgaagagaagatgaagagcgagcgcgtgtggcgaaagaagggcgcagggaagaaggagttaggacgcaagcggcgaaggcaaaggaaatgatggcgaaaggaaggagacaaatcccatcctcagtgcctttatacccttgccaacgctgtgcccggctcctcgtttctcgcgcccattatttcgccccctcgtttctcgcgcccacgcttccactaatcccattcgcccgcttgcggtgcgtgagatggatatgcggttgcggcagtcgagatagatcgtatcgtgcgcgcgttaattacgctcgccgaccgaagcaacattaccgtatcaccaggcgaggcaaatcggctcgcccagattcgtgcgccgctcaggtgatgtggcagtcttgaagagaccgcccattattgacagccaaattaccattaccggtgtgcatggtttgagaccgttgggttttttgcccaaccatggagaccggtcccacctgtcaccaggctttatgtcgcgaccgggaaaattgccttctcccgaacgctagtgtattaatccccgtcccaggaaaagccggggtacaccatacaaacatgatataaaagacacatctttattacatcgataatatttacattattacaagggcacttcaggcctgacaaacaaaaataaacagcagcggactagcgggcctacggctccatcttcacaggcgctcaactggggtataagccaggactccacctaagacatcttctccaaagcttctcttactgaagaggggaaggattgagcaagaatgagtacaaccacagtactcagcaagccacaccggcagatgcatgattaatgcagggggggggggtacaaggggataataataggggttaggttttgcagtaaacagcatttaaaagtcacttagttgcccaaagccattttgtaaagacgatcctagagctacacagtattattaaacaaggtcgtgaaccctcacgaacctgccttaacccaaggcctacgatgatttggaccgaactggcaacccgacctgggttccagctcgtcccaagccaacccaggccaaccattccatattttagttgttgagcaaaattttaagaattaaaacactgacttgggtacattgctaggcttgcccatatccgagggctcggctattcgaatagatttactctgatcagaggtgtacatctttacccacaagacacatctttactccgcattccatggccttggaacccgtcgtaaagatgtgacataacccttcacccatcctagccgtgaacaaaagtaccgacccaatcccacctacggccgggatacccgggacaggcaggcagaactgagcccctagcagcagggcaccaaccctctgccgtatgacatctcgactaccgggccgcagctcgtgtagccttcatttgccctggagaatgtccatcgacacccgacttcatccatctccaatccgtgtacttttgttcaggactagactgagcaccgagttaagccttacccattagacatgtggttagtacggtagtgctttgcaacagaggcccgagcttaatccttatagtggccggggtgctacttcccataactggcatgcacccaaaccccaccgaaaacaggttttaggggttttgaaagaggaagagaggtgtgtgtccaattccaacataagccgaccattccatagtgtccaaatgatatgagaatttcccaagtctaaagttataaaaccacctaatgttgcctaattaatcagcgaagcatctacctaaatttaaactagggataccacgagtagagtacccactagttggggttttatttattctagggtgaacaaggtaataataataacaataacaataataatatggtcataacaaaggtaaataggcatggctaaataaaacagtgacaacgcgggaatttaaataaagcgataatgcaataatttaaatcaacataattttacaaactgggattcaatatgttcaaggatgatgtgacttgccttgctcagggagaacggccttccgaaccttcggcaacgaccgcaaaccacgcttcgggaacctccggaacgacgaaagctacgcgaagcacacaagcaaagctacaagcctataaagaagcaataacaacacataaaaagaaagcacatggttctttaggttataacaaacattaagagacttgaacgggtcgattcggagctcgtatgaccaggatatgatcatccgaagtttaatgctgttatatggagatttgcgaattattataattaagctttgcaattataaaacatgtgtaagcgctagcctggaaaagacaggaaggctgcgccgttgacatgcggaccccacatgtcaacctaaaggaccgcggtagaccggatacacagagacggtccacgggtcgacggaagcggaccccgtgtgtcaaccgaggcgagtggccaacaaacggactccactagacaccacacggcctgcacacgtggaaaccacgcggctaccgagcgggcacactaacacggacactacacggtcaccacccgcacacgtgaacgactaccgacaccggtacacgggtaccggggtcgacgaccgcacaacgagcacgggcgacaccgaaagggcgaggacggggcagcgaggggaggaaaccttaccaccacgcgacgaggcgtgggaacgacaacgacgaacgggcgcggcggagacagacgggcacaacggagacgaacggcgaggggacggcttcggcggcgatccttgggcgaaggcgagacgcggccggcacgaggcttgacgacgcggagccgaggacgaacacgaggacggggctgcagcgactcgcttgacgaacgcggacgacggacgagaacggcttgacggagggacgaacgccacgacgatcgggaacgacgagaggacgagggcgacgacgaccggggccggcgaggaggcgacgaggacagccggcagcggctgcacggggacgaggatgacgtggaacacgccgctatgatgacgatgacggaggcggcgccgcgagacgacgagccggcgagagggaacggtgaagacgacgacggacaccggcggtgttcggtcggaggggaggcgaggccgaggacgacgtcgcggctgcgatgccgaagatgatgggggtgtggccgaccggtgcacgggcgaggagggacgggcggccgaacaactccggcgaggcggatggagaggttcgcggcgatggcgttccggcgaaaccgaggagtggacgaggtggagggctacgtcaccatgccgagggaggggacggcagcgccggctgatgcacgggcatggcgaaaggggcagccggaggagatgccgccgaggaggaaggagaggccggcgcgggcgacggcgttccggcgaaattcgggcgaggaggaggtgatgccggggaagaaggcgatgccgcggtgtcgaaggaggagacggcggcgtcgatcggcgcaccggcgatgaacagcagccggctggagggagtacagtggcaccaatgccactggttgccggcgggggcaccgttccggcgagtttccggcgaggagacggtgaggccggtgaaggggacggtgttgcagagccgagggaggcgacggcacggccggacgatgctccggcgaggagaggaaggcggctggaggtggccggcgcgaaggaaagaggagggcgacggcgggaacggggctagagaccacggggaggctcgggatggggttaaaacggtagaacggagtgcggggatcccattttatatgagagaagagggagccggccacgggggaggtcggaacggcggtggaaaatccggccggcggcaatggaaggcggccggacttggcgcggccgttcccggcgattgggggcggcatttaagggggaaattagggggaaatgaagaggagtcaatggggattaatttcccctatttaatttgggaatcccatgcttgaatcgagcggatttagaggaggaagcgagctagggttcacgggagagggagagaggacgaccgggcgggaggaaggggacgacgcccggcctgacgcgtgggccccacgcggtcgggcgcgcgtcgtcaccgcgcgcacgcgcgcggcacgtgcgggaggggagcggctcgggggctggggcggcttgggccggcggccggcccaggaagagaggagggagaggcggcctgggccgggcaggccgggaggggaggggaagagagaggcagcccgggagggagagggaagagggaggtgggccgaggggaagggggcccaagaggaggagggagagaaaagagggaggagaggaggacttcggactgggcttggcccaaaggaggaagaggagggatttttaggttttctttttattgaactttgataattgtttttgttgtttaataattatttctggtgctctgaaaattcaagtaaaatttgagggctctttttagaccaaggagaatttaacaaaaattctccgggccacattggaatttttcttgtacgtatttttagtgtttgccaatttctttccgaattttaattaattctattattccttttagaaaataaattttaaattttgggatgaatttatcaggacgtgacactttaggagtggcgtcacgcccggccgcttcccataagaagggcgatcgccctggcataacgccgggggctactgtcggtgacatgggaccgggagtatcatgactcgaggcttgaggcagacacaatcgcccacgtggcctggcaccctcgggggacgtcgggcccgagggtgatgtgtgcgcccacctcttggtcttcccgaggggggggtcggaccactccagcctcgcccccgaggggcgaggcgccccgacccctcgcgttttctactccacgtgtatgggttaggtgagcacagcagggctcacctaaccgcatttattgcgcctcggctaagcgtgtcacgccgcacgaagtgcagtgcagtgcactcgattatccggtctgtgaccagtcaca

SEQ ID NO: 9927 - DNA, 39486 bp, Oryza sativa
  unsure (1)..(39486): unsure at all n locations
gccggccgttttatggtgatggcggcgacggtggaggagaaggaggagcgttggcccttggcctcctcctgacgccgccgctggcccccgtcgcacgctgccgaacgccgccgccgccggccgttcttgctgtccccgcgcgccaccggccgaagggggaagaaggggagagaaagagagagaagggagtgagggaggagggactgacatgtgggccctacatgtcagtgggcccacatttatttttgggggaatgactaatgggtcccacgcatattttttatttctaccgccacgtaggtgccacgtcaacgtcacgtgtaacgaagacttgttcaatattgccatgtaggcgccacgtggcgccacgtcagcaaaaccgcctcccaaaaccgccagggagtcgaattgcatcagttttaggagtttgggggtcgagatatccggttttgtagtttagggtcatcgattagatttcgatcaaatttgagggtcatgaagtgaacttattccgaataacacctcggagaattctagccatatgggcctgagattatggacagaaacactatggctagtctcagcccaaagaatagtttgcttatatgttgggcccataatgaccggttaacatgtccgtttctcgatctcagtttcgactgcaaacctcagtaatgtggtagttgcagtattggcttcaattcaaaaattcaaacaagcccatagtacctagataacagcaacactgatggcgctaaaggaacatgttaatatcgtagtgcatcaccagtaatttgactaatttccattcatggggagctgaatttgaagcattatttgtttctttgcacatcaggtactacagcatcggtatcacagcatcatatgtaagttttcattcctagctgttacagatgccagaaagacactgaacagctgaatgtggtagacgccagacataccacgtcttacgtttaagttaaacactgcagagctcaaccccacaagtgtaggcattggctctagttatttaccaaggcaacagtttggctcgaggacaggattggcaacgctccaaatagacagggtgcagctactcgttactgttcttccttgttcttgtcttcgatgggatcaccattctggatcaaatcctcaggaggcaaattcatacactctacaggacaataaacaatgccatcatacaacataagaaaatgaaatgcacgtacacggagttgagatgcattcatgtacagacaagaagtaccatcattgtcagcagatgcatagggagtccgccgagcacgtgcatgttgttgagtaggctgaaagtggattgggacacagtaaaacaccgaaggaaagaaatgaatatagtagcatgacatagaatgcaatatgacttctcatatacttgttcagagtgataaaagaaatgttgtcagtcttgatagcaaaacatgtaggggagagcatatcagaagcaacatgctaaaagcaaatgatctgggtattcactttcagccaggagcgggaaccaaacttttttcaagactagggctgaattagtgtaatttgccttttttttcttctaatttttaaattttgaagtgttatctcaatgggtgtttaggttaaggactcaggagtagggcactagccccacctgccctactcctaattccgcccctaaattcagccataatcttccagcgaaacaaaaacatggcaaaaaaaaaaaaattgtgcatcttgtgtgctgaaatgtcagtacctgaagttttggtcgaagtgcttcaagaggccctttaggtttgtggcttccaccttgctgcggcaagcaaaaggaaaaacatggtaagaattgaattcttcttcgaaaattattgaatattaatgcagcactcaattcaacttcataatgactttagtattaccttgcctagagcccaatcagcagaatcaaagtaagcccgatcatgatcctgatagattattccagtttaagtattacataagctcagtaagaaatgcaacttaaccatacatctgtttcacctttatacaataatcatcattttaacagagaaaaacaaatatactaaaataaagaaggcattgaccttagttatatgtggcgtcctcttgggcagtattccaccatattttttcttgatggctgcttcctgaacatattcgcatataaatattagtaatctaattaatagatattcatactatttatggaataaatgccacatgaataagtacacacagtaacatgaaaaatggtgtagcaaaagatccttttcactttgcctgactccatttttcaccctgaacttgtaatcgggtattttccaccctaaatttctcaaactgttcactctattcccttgaatcatttccacccagttttggtacacagtggacagcccatgttggatttaaccttgctgatgtgtctgttgattgtggacaacaccagaaggcttgcacctctatataaggtgttgcatcatttccaaccgatttttggtctcacaacatggcttataatggttagaggccttccagcgtcatccaaaagccaacagccacatcagcaaaggtcaaagccaacgtggccttgactactatgtactgaagcaaggaggaaacgtcacaagggggtaaagtgaacaatttgagaagttcaggatgaaaataaacggtttacgaatttacggtgaaaaatagaatctggataaagttcaagggtcaagaatggacttatatgaagatagtacctcttcttgtggtgagggcattccacttgcttcgctctgctcttgagttttttcttcctttttgtcagaaacatctccttcgagcctcacttgaccagttgcctcatcagatggcattccagacatagtgaacttaagctgcagagaagacttcaatttcagtgtccacgctcatggtgcaaagaatcatttaatagcacacagtatgcgctaaccatctaacatacacaaaaaaggaagataatgtatttgatggcccatgagggtggtaaaagtttctcagaaaaagaaacagaataaaaggcagatgtttattgttcccttcctttatgcaatagaagaaagcagaagtacataaaataaataaggagactaataccagcttcttatttctaggggaggagggatatgtccaacacaagaacttctcaactgtaccaaaatttatgccgactcactgtttgtcactgtaagcttgttaagcattcaatcagaggaaaagaggaaacaggggatgcatacattgcatgtttattttcagctcaagaagagttcatattattctgattagtctatgataaaaacaataccgttcccattattaataccgaatttccaaacaagtacacgcctttataaagcacaatgatcttgcaaaataccatgtatgagcacaattgaatgaggatggaggacagacatgcttggcacagattgcagttcaaccttcaaatatttccaacaactagattcgatactagtctatttgggcctttttcttgacaaaaggcacaagcatttaaaaatatatatataatctaggctgtacaaatctaaataacagtctagagaatatatatgttttcatacagctgctatcctatgtctgcaggaatttcaactgcacatgacaaatgatgcaagcaatgcatatttagtcaaaagtggcttgaaaagatgcactcacctagacctcaattcagaacatgacatgagcaaagaagcactaaccacatcagtattcagtcaatttctctaccaaaaaggcatcaacctttgttttaaatttgtttgttgtcaagtgcaatacaacttgaatgggtcagcagatgaatttattgtcaagtgcaatacatcaagaactggtcagcaaacggactcatatataggtcatcagccattcagcccagttttgttctagaattactgacagcgtgcaaaactgatggtgtcatgactgcaatcatggaaatgtcagctagtcaggtaaggaaaaaaacagctgaccttcctaacttcatttctgattttaattacgtcagtgttagcagtccaagatccatctaatagttcaaattaatcattccatgccttgcttcaccattatcactgcattgatagtgaacaattgatatggttccactttttttttcttaaaaaaaataaagaaaagaaatgttgtcccacttcagacatgccattggttgtaaagggaattgcaatccgaagtgttctcccagatcagatcaggagaggacctaacaaggggcatgggattcagttgaacacccgcaaaattctagaattttttttttgatgaaatataagcacactaccaaaacagcaaatgaatcagcaggaaacagcaggaaactgcacagattggggattccattcattggttggttacatttcccagacaaaggatttgtgtaagaaaacaaaagtttaacagtatgataaaatctcggaacaagcaaagcagtgtaggctaaggataagggtacgtcaccggcgaggtagatcaacccagagccccggatggatccgcgggaacggggagcagcacgacgatggcggcggagctttcccccttgggtgggaaggagggaggggtttgccgcagagagagctcgatcgagggtagcgtgagatcgacgtggggaaggagaggaggaggaggtggaggaggaatcgaggggaaggcgatggggatgggcgaaaactttgctttggatcgggagggacacgtgtctgatgttaggcggcgtacgcggaatttcttcgttgggaatggggcagagtgaagagacctgttgccgtctctaccacggattaagacaccatgtatttgtcactcacgccgtgtgtgacaggtgtgctcatgattagcggacttttgatgcgtttggttcactcgcccagctagcctagctcggcagtgctaaaccatctctttgccagcttgctagtcttgtcgtggcttttttttttggatggttttacttcatgtggcaaggattaatggttatctgctacatatgagttcacctcttgttgctaagttttttctgtaaatcgatttttttcttttaggtccagactgattgttcactgtgtttatgggtttggtagagagggcaattttcgataaagcttgagcgagagttcgcaacaagaactggaagaaaaggccggcaagattgggtgagtcgttgaaaaatatcactgattttacgtcgctgatttcagagaagtgtgtgtcgccctcgttccaatattttcgcgtgagcaaagtttgccgtcgaaggagatcgctaaatgggctctccctgctagctagatttttcttgccccgctaagccagctcgccccaaaaagctaaattattttactggcacgtagctttgcttgggttagagttgttttgtggcctatctactcttgaactaagttggcgctatggaactaactgttttaagcagttttgataggccaaatatacgtgtagattttgactgaaattacatctaccaatgggtctagggaatttggccaatacattcgggctaatgggaaatatatgaaggaggtttttttaacagttgagcctgataatcgtcggggtccttttttttagtttctataaatcatgtcaactgatgtgacccttctgcttcatagcttacccatcgtatttcctctaatcgtcattgagatactaagaatcaaacctaattttcattgagaggttttatttatagtttttaaatgttccattaaccgccatcacgctgctcttttatagcatttgccaccactgtattctagatgaactgcttttagtactccttatttttattttagtttttatttctagattgtattggtactcgaactctcatttttggaatttatattattattattatttgttttaattaatctcgtgttgtgttatgtatgaacttttttttcaatatttattttttattctgaattttagttatttctaaattgtattcatacttgaactctcaatttttatttttctaatttctgaattgatgtttgataaatcgtgaggttatctagtgttacatattcaatatttcagaattttatccttgcacgttcaaggcctcattccaattccttctacaatcattcatattatcaaaatatattcaatgatcgatttttaattaaactaatttgatattttagatattgctaaatttctctatgaatttggtcaatgactaaaaaagtcaaacaaattatataatatgaaacggagaaaaagtactattttaggtcaataactgggctcattaacgaccaattaaccttcacaagcaaactggtgacaccacacacaatttgagcttcctctccaccattgacagctagtgtaaaatcaatggttcgtctgtagtagttaacaccatcaccagcttgtgcaacaattgtcactataccagcatctcatccaaagaaacagccatcacacggcgcaatagtgggatagaatgtccattgccatcggcagccaccacaccagctgctggaaaattgctatcatgaagcacaatgctatcttggatggtgcattcagcattggtgctggtgcaaagctgtgatccctccacagaaatgtcctccctgattcaggtgacctctgaggcgacgtgcacggtgcagagcctgatgctgctgctaggaagagcgagacttttgaagtttgaaccgcagtctgcatattgctcaatttttggtgcaggctgtacgccatccaacactagcagtcctttactaagttgtttgtccgcgtggcctcgacgatcatccttcatcttgaggtcaacctcaaactacacgctgtcatatagcaccagtcctcgatgagggccggtcaatgtcaaagattcatcctacaattgaaataaattgtactgatcgttcgatgatctgttgtacataatgcaattcatggaataggatgcttgctagtgtagggagggtgacctctgaggcgatgagttgagcatcttgtctggagcggcggaagagaggaacacatttcagatcaaggtggtccactggtctagaagctcatggggaagggaaacacacatcatcgtcgtcgtcgtcatcacacaaccaaaatcaaaatcggggtaggaggggacgattacgcggatggcgagcacgttgatcatatcgcacaggaagcggagggctcgggccggtggggtgtaggcggtgtcgtcggtgaagcgcatcggagcaaggccggactcctcgtcgaggtcgaagtcggacatgtctccctctcttgcttctcgtgctccagcctctccgccgccgccgccgcctcggccacggtcgctgcctcgtcgtagaaggaaggctccaggttcacgcggtcgctgtcgccgtcgtccgccattgccgccgctgccgccgagaggaaaggagagaaacaaccccttgccccacttgggccttggcccccattatacggcccattctgaatctgcacacttcttgatgggtcttttctccctctgtgacgcgccactataggccgaaatacacgccattttacccaggaatttggagcagttttggaccaaaaattgcacctgttctatcttgggccgtaattacgcgccacaagaggccggatttttcgcttaactttgggctgaaaacctgaaacaacacggaagaaataggcataagttcactttgtctccctcgaatatagctccaatctaattcgtattctttaaccacaatactgatatcatgactctctcaactattgaaaccggtgtaatttgacttcctcagcagttttagagaacggtttcgctgacgtggtgttttgacctagtccaaccagctcacttagcatgtgggacccacatgtccgtgtcacattttcttctcccctctttcttttctctttttctaccctttctaacccggcagtgcgaggcggccagcgagtcgacaacagtgtggagaggacgatgggaggagggatggatggaggtgggggagccgctcaacaccgtcatgatggagcctactcccatggaagtcgcatggtggagggcggcgccggtgccgccccactaggcaagctcgaggctgcgctcctagaaaagccgctcaatgacgctgccccgctacctgctattgatcgacttcaacgaggtgtttgacaagctcgaggcgaagcttgcccccctaactccgtcaccgcctaggacggactcgaccctagcgataaatggtcggatccattggggagggagccaccacggatctggagtacgaggttgcacctcctcgcagcacctgtgctagctccatgcctcctcgattgatgggcaccgatgaagtgggcggcttgggtgttggaggttggccgtcgggcaaagaaggaagacaaaagcacgctgctagctccctgcaccctacatcccgtgtttcgatggtgacctccatcatcgtcgacggcgtcgcagctgcctttggatgacagaagcagtaacagcgttcagggtctcctatctgccgaacgaggccacgccgctgctccgcctcgagcctcaaggccctaccactgctacatgtcaggatcatcccgttgctgctctgcctctatcttgggccacgctgggtgcgagcttctgtgtcatctgcgcacctctgtctgggctgactggcctctcgacatcgtcgctgttgtggtagtagaaaaggagagagggaaagtgagagaaatgtgacactgacatgtgggtcccgcacgctgagtcagccagttggaccgggtcaaagcaccacatcaatagaaccgctttccaaaaccgttagggggggggtaaattacaccggtttcaatacttggattttcaagatatccgatattgtagttacttgcaatgcaacatgatacggactttgggatttcttctcgcgtttttgcttggactctcactagtgccgagggacttggtttacaccggttttaaaagatggaaggatatgtatgttatatacttatatcaggcttcgtggttaagggacgtgattataactcgactcttagatcagggaccaggcctggttaagtgaacttttgccttttgcttggaccttttgttttttttttccttctgcttgaacctctccctttttccgggttatataaatcaggtaagatcaattttgttctcccaatggacagaaaagaaacatgtggccaacaggccaagtaaacccgaggggagctaggaatgtccaagcaaaacaaaagggcacgtgaagtgaagagattggttggcattgtgacaacagctcacctcgacgagcgtttaagcttagtatattctgcaagcccccccacctaaccctgaaagtcctcaagaccacaactaaacaacatcaagcaaatcaaaccggacaacccacaggataactagtcagtttttccaatgaatccatcctcctctgcaaaagctgttttttttagaagttgcaaaagctgttaggacgcacattttccttccttgagacgagtaaactatagtgtagtacagtacattattgctgccccgtcgatctcaaatcatcagcaagcatgaaggcacatacaccctcctagctactagtctttcttttttgtgctagtaaagaaataaaaactagatctatttcaggttataaaactttttagtattacacatattcatatgaatgttaatgaatttagacgtatatgcatatatgtctagattcatgaatatatatatatatatatatatatatatatatatatatatatatatatatatatatatatatatatatatatatatatatgagcaatgctagaaaatcttataacttaccatggaggaagtaacagatatacagctgggcatcgtcacaccagacgactttcaggttccagcttgcgagaacatatattaaaaaaacgcccaaaattcccaaactataaaagaatcgacgccaaacaaccaggccgacacagcaacaacctacaaggggcatgattagcctgctccccccgtacatcaatcccgaccgtacagtgaacgcattgcccaatacagatcgaggctgaggccgaatcaaggccgttgattttatagtttcagtatagctggacgtcggtcaggtgaagaaaagaaacagctgctgctggattcctgggattcataggtgcgcgccatgtcgcgctctgtcggtcactcggtgtctcgcggtcgccgcgacgaaaatttgcaggccaaacgcgggccgcggccggcaggcggcagcaggtggcctactcccgcaatccgcggccgcgcgcgcgcccacacgcataccaaacggccagttggttactggtcgatcagcttgtcgtgcatgatgatagttttcatattttagacgtttatttattgatctccaattaacaagacttgtcggtacacggttatttgttatattgatattatatataaaataataataataaataaattggagtattcagtttgaagtctcaatttttcacaacgtgtagaatagatgggttcttttttttttcggggaaaggagaatatattaatcacagtcctcgcagacaaaatgcaagataaaggtacaattttctccaagccaaagactagatagggactcagctctagctttgtttgctaaaaagtgactaataacattctgactacgctgaactttgcttatggcgatttgctgatccccagccgttagtagtttagcctcctaaactatattagcgagaactgagcgatctttgtctgagtgatgtaagagctggatcacaaagctgcaatcagtttccacttggattggaagaagagaccagtggagcgctaggtgaagaccttccacacacgcgcgcagttcggcttccaaggggccactgcaactgtcaagagatctgcaggaactgaagatcacactacccaggcaatttctgagaatcattccgatacctcccttctcagagttgatgtcaaaggagccatcaacatttagtttcatccacccattcctcggcctctcccaacgaaggttttccgctccaggagcacgttggattgctgtagatttcgggaaatcagctctcaccacatattttcctttctccaagttcacctggggattttgtcggatcatgaacagtgagtcaacataactcactataaatcttaatagatgggttcttaacgtggtccacaatgttaaattagaatttattatcatgataatatgttctgtctatgggaggcgcaatttttataagcttacttattataatcacattatgtggttctttaaatttatcagttgattttctttgttagggtagtttgggtttgtccattcacctactattttttcagctaaataacttattatctatgttatgtcatatgacagaggctggagacataacacatttctattatctaaaaaggtatgttctttgtaatcaatggtcagatttttctttctaattaacgtgtgagattatacaaagtgcctaataagtataggtcggcatagatagtttttcaagggctattaattagatccatgccattacaaatgtaccatttcagaaaaatacaactactattcgtatccatgtcatccaaatgcgtacaaaattgaacaccatcacacttttcattttcttccccaatttctttttatactctctctcccttcccttcctgctggccagccacaacaacaacgttgatgtcattgtcgccccacatctctagcccccctctcccctgtggagcaaatgacaacagtgcccgacaacgacggtggcggcgggtcacgtgtcttgcaatgccaaatctccaacatcgggcttggggctcctcatcctcccgctggcagccacaaagacgatgatgtgacgaggacgggcggagcttgtggcgacagggagggcatcaacctagatttggcaagaaccataatgtcaggagtaggtggggccatagggaggagcttggtgcgggtggcggcatagcaatgagctcgagcgggggtggccttggcttccctccttccttctcaggccagtgggtaaatgggaaccagcgcttcatcattgcgctggttgttgcctttccattcgcctctctcgtcgacctatgcttttggctcaacgaggtggagagagataaggaaaaagaagagtgaaggatggagttagaagatgcatggaactaacatgtgggtctcatgtctagagatattttggtctatataataaaaaaatgtgatggcgatcaggtgatggtatggttctaattttgtgcgtatttggatggcatgaatatgaataaatgagtggtagtggtattttttttctaaaatggcatatttgtaatagcatgtatacaattaacttttttaaatagtactctcatcatttcatattataagtcgttttaataaatatttttttctagtcacattttttttatgattgatagactttatagacatatttaaaaacatttacaatatcaaattaatttttatcaaacctaacattgaataatttataataaaatgtctgtttcgtgttagaaatgttactatgatttttttttataaatccgatcaaacttaaactgatatttattctgatattttgtttcaaagaagttagtattatcacatatatctagtggtagctaacaaggcgacagataatcagatatggccattgcattctggggcctctgcctgaactgtgattatcccttggccataatggcatttaggggcgcctaatgaagtgtgtcccctgcttcgtatgattaaagacgatcatgatgggagcagcaagccagcaactaaccaagtaaccaactctaggcgtgcgcatgtagctagcctggaataaagttagcgcaattatgcaatgctatgttgccaacacctaacatttgttgagtgcaaataaaatagtgatactaacttatcaggtcattcacagatcgaagtagtacataaaattgtcgtttttatatattttcataggcgttcaatcctctccaaagacttgactgtgactgactgagatcgaatggcctaattacccgtagttgcaggcaacagacgagattaattaaggttagcgtagccggattagatgggggcttgatcgatatcgcctcttggtgatgaaaagagtatttaactgcaccgaaagaacttatgtcctccttattccttaaccatgcactgtcatgagagcatactagctaagctagctagctaggaaataaagtgcatttttgcatatatgcatgccctactcaacaactcgattgttattgatgtaaagcttacctatgtatatcggtacgagtacgcgtcacatgaattaggctaaagcatcagcttttataatttgcttttctgtctcaatgtttgtcgtgctaaacatgttcaataccggactgaaaaaaaaacattttcgttttctgcagactgatcaaaatagtataggatttcatttttttatatctcaagcgcgtctctgtcaggactcaggaagttgaccagcaaagaattgtttttttgttgtattttaagatgttgctaaagcggcgagacaatcaaattgttctctccaacgacaagtacacccaagaaaatggtgtcttttttttctatatgggaaaatggcgtccttttggcaattaataggatccagggaaagacagcaaattgatttttgatggactctcaagcacatcggatagctacagtgacaacacagtgccaccagctcaatctcatccgtcggatcaaacaggaaaacagacattcaaagtagtcagctatcagccatggtaccaatgatgctaagcagtgaatagactttaattattatgatttatgaatccctttttccccaatgatcatatatatttgagattgcactgtacgctgccattataacatgaagagttttagaagatgaatttgcatacaatcgaaataggaacgataacagatccgccgccatactaccctctcactttaagttgatgatatatgggttccacaactaacaggttcacatgtgagtaactcacgttagagaatagtacgttagagaagactcatctagccgaaatagtatggcgtcaaccgtcaaatcatgtaatgtgtctctaaagaaaatttagatgattcaacactccgaaggtgtttacaaattacaatgtaattatagctttccaagcgtttcttctgctggctatctggttttgcaatggggaagattggttccatgcataacatgaagcttcaccgtcatgagcatgacgcattacataagcatctggtcaaattcaggggttttatcaacgagaagagctgcatggaacccgtgcgtcacgatagtatgattggcacctgctaaccaaagaggcaagtcaatgttttgctaaaataaaaactgataaaaaagcgtgttaccattcttatttcattatgtactcacgttatacatcatgtatgaccgtaaatcgcccctataatgtcacatagtattcatgtggtcataatctacctgtattgtattgcacactaaattgattgtatttttcacacattttggtaattcatagctgctattccacatccgcgctaacgtccattacatatgaaataacgtactagcaacaaattagagaagacgtcccaatgcttcgctaaaagggcgagatatcgtcgtattgccaggttaataaaaaaatcacgtcaatgcttttataaaaaaaataaatacatgcgttacaaccccttacttcatcacctactcatgtcaacacatagcgacaagctatgtcaagttgttatgtgattatcataagagcaacatacgtaaaccatcttcacaactacacacataacatgcatacgaccaaatctacccgcccgatgtacgaggcgcaggctgcattgaccacacgtcatagtaattatagcggctactccacgtcaatactaatgtccattacagacgtaataacacgctagcaacaaaccgacgaaggcgcaccccgatgctctgctaagaaaaaaaaagcaagatattgtcataatgccaatagattaaagcatttgcatttccaactaagcaaaagataattcctcagcacgtttgacttccctcccctcaccctccacatgctggtctcaaccatcaggccattctccccaagcattaattaattgattaattgactgattaattaattaattaaatctcctcctccctcctaatttctttattagagtatttccaaataacaacctccttgcaattttctttttgattaatggctcctctctctctccttttccacacccccacctccccctttaattccaaatgctgcaacctcttcttctcctatagtcctctcccctctcccctttgcttctcctttactctctctctctctctctctctctctctctctctctagcttcatcttgtctctcttcatgtgtgcatgtgtgctgtagtgctcgtctttccgtctcctccatctctctctctctctctctctctctctctctctctcttgcaaagaagcaaaggcagctcgcccttcttgcgcattccggtgcacgccactccactccacacacacacacacacacacacacgggcaagaactgccctttcttttgcagctctgacgacgggtttgggggtggttcttgatgggattcttggccaatggggatgagctgaaggcgctgcagaggtaatctcccggtctctttcctcttcgtgttttgttgggggaacgtcggcatctgtgatcttgggaggtgtttgactctgtgcctcttggaattgtgatgggctttgggatttccggtgtgggttgggggtggtgtcggtagaattctggtttgtttttgcaatttgcattgtgcggatttttttctttcttggacaccctgtatcttgcatttgaataattttatataggcgtggttgttgaataaacagttcagagttttgagtcccatcaggagtccatgcctcgctggtggtttgacccagaaatggacattttttttcctgtttgattagtttgcttgtgcgaattgtctgtacagtgatatgaaagataatattttttccccctgaacatggaagaattgggccatcatatgcgcgcagctttattacttttatagttctgttcatgtgctggttcaggtttcagagttaagtaatagagtaccttttgttttttaacagataaaagcaaaccaggataagtttgtaaattcagctggcaaatccgtgcaagattctgaatttgtgagagcatctctgatacaattcttgatcttagatagactgaaggatagatatgtcgtccgacagcaactccatcagttcagcactgtcacagacaacacccgtgcttcgcttgagagtttgggtcctgattgccatcggcattgggatactgatggcaattttgttcatcatagcattgtggctctctatgcggaggaaaaagaagacggcggttggattcgacgggagatcacatatggagatccctattgtgtcgaaagatatcaatgttgacagagttgatgcacagagcctgcatgacagtggaacacctatcatgccagtgcaggataaatatgaacagatgaagggtgtttcgcacttggcagagagtagatctgtcgatgtcgacgcgttcagccaatgcagctcagtgtacaacatagagaaggctgggagctcatattctgaagattacagcagctctgggcctggtaggaaaggcagttcatcgtatgggtatgcgtccgcttcaccgctggttgggttgcctgagctatcacatttgggatggggtcactggtttaccttgagggacctcgagtacgcaacgaaccggtttgcaaagagtaatgtccttggagagggtggctatggaattgtctacaagggtcgactgatgaatgggactgaagttgccgtgaagaagatccttaacaatgtgtaagtttatattgccttagtgagtttactgtatgttaacttggagctaagatttctttgctgggtttgcagggggcaagcagagaaggaatttagagtcgaagttgaagccatcggtcacgttcggcataagaatctggtgcgacttctggggtactgtgtggaagggatacacaggtgatcatttcttcctctctgttccctttgttctgcataattaactttgctgctcagcccagtttatacgaatccaccatgtgcaagttcattgtgatactaagcattatgttcttaaggttcaaaagggaaaatgaattatccatttcataagatggaaattctgttccttcccttgtgcataatcaatatgtgttttccttgttcccttgtttctcactgtacattgaccttttctgaatattcacctgcaggatgcttgtctatgaatatgtcaacaatggaaacctagaacaatggcttcatggggccatgagtgggggcatccttacttgggaaaaccgtatgaagattctccttggcactgcaaaagcgtaagatcacagtctggaccttacttgcagttatttcccatgaaatttacccttctcacataaatacaggttttaaagatcaatactactacatgctaatgtagatgagtttcatgattttcaggcttgcatatcttcatgaagctatagaccccaaagttgtacaccgagatattaagtcaagtaatatactaattgatgatgaatttaacagcaaggtttctgattttgggttggccaaactactgaattctgatagtagctacatcaatacaagagtgatgggaacatatgggtatagcttttttttgcaccatgtttgttctattttatttgtcttctgtaaatttggaaaaaagcacatcttaattttcttcttaatctgttgttaggtacgttgcacctgaatatgcgaatagcgggatgctaaatgaaaagagtgatatttacagttttggcgttgtgctcttggaatctgtgactgctagagacccagttgattacagtaaacctgcagatgaggtagaagcttttcctatttttcgacaatttgaatgaccagtctatcatctagtactcaagtcatttttttatgtcatttcagacaaatctggtagaatggcttaaaatgatgatcagcagcaagagggcggaggaagtagtggatccaaaccttgagattaagcccccaaaacgtgcccttaagcgggcaatcttggttggcctgaagtgtgttgatccagatgctgacaaaaggccaaaaatgagtcatgttgtccaaatgcttgaagcagttcagaatgcatatcgacaagtacgtttagtacattttttgtcaccgtttttcaaacttttgttttacacaactgagcatctttcttggagattttgtttctaacaagtaaatgctttctctcttttactattggcaggatcagaaaggcccagcagccagatgggaagcgtcgatgtcgagtcacagcaatctgcggaggagatctcaaacagtgccgattcctgaggctccaatgctgaacagatacagaaaataggacatgaaaacatttcattatcctgtctggtttggtcaaatattcaatatagttcaataccgtgattgcaacaggtttacatttagcaaagactggaagacataaaggcataggaatcgttcgtttccctttcttttcttcttcttcttcttttcgagaagtgcttctatgctcccctaaaatatccgccgtactatgttttctgtagatgagtcctccaactcgtttactctacgatatgtgtagttttgttttaggggagcacagaagcaccttcttcatctataccgtttaagttatcaggaggagctgacctcgaaggcatgaatgactagtaaccagattttgttacccttgtaaagaacccttgtcgatcctcagttttaccatgaagtacaaagttttgttggtgtaccatgtgcgcaaattttcttctccattactagtttggatcaaagcagtgcacagttgcaaatgcatggtgatcttctcacacttatcatttctgacagatgagcagagaactttttctgggaagatagttccatgtttcctccccatagctaaaattcagaggcagttgtttcgtccttgcaccttggtgatttgttttttcatgcatgcacatgattacagggtaccaatgattagtgcctgcttgttttgcaagtgttgccaccttcctcctttttcttttgaaggactgagttgagtgtgtgtgttaatcattggcgccttttgtccctcacctacttgcactccttccatttcatagctttccagacacaccattcgatgaggattcgactctgaaagtgcaatggctaatggtttgctttaggctagaaaagtgtactcatggctctggaaagagtttggtaacctacttaattagcggcaattttaattttaccgggtagtcgtagcaatcgattttttatccacggttcgtgtacatgcagacatgcagtgagtgcagggctactggtagtgccgatgcagatcatgcaatgacaagattgcgtcaacctaacgatgtcaagattgcgtcaacgcaaatcatttaaaccagtggcacgagcatgatatatttaaccatttacttcttttaaatgtagcaattaactatttataagactcacattgtcattgacacataaggaatctacatgtcattaacatatgagtgaaaaatagttaaacgccaaatctacttctgccatgtgccccgtggttcatctagggtgagtttgagcacagggggattgagaagatacgcaaaacgagataagtcattagcgcatgattaattgagtattaactattttaaattttaaaaatggattaatatgatttttaaagcaactttcctatagaaaatttttacaaaaaatacaccgtttagtagtttaagaagcgtgcgcatggaatacgatgtccttttctcccccaatcccccagaactcatcacaaagaacgcagccctagtttcaagacattttgactcatcctttctcaattcggacttccgagtacaatggcagaacacctcaggttggtatacagaaaaggaggccaactcgttactcatatttattagcatttcgatcacattttcctcagtgataatccttcccagtcacaagtatatccgtagcatatcaagttaaccattatactctaatctaaacctctatacagatcaccaaacatagttatatacttatatggcttatactttagtccttaccaagaactcttctatccggaaatccttttttttttctgtcaaatctctttgtactttattctttttccaatcccttttaggccttgttcagtgaatccctcccacaaggggattaatttcacagccttaagaaattagaacgtagtctacattagaggccgatgatgacttaggagacgagctgtgccggctgagaccttccctcaccttgccgtgctgttctgcttcatgctggaacgctgaaacaagatcctggagctcgagcttcctcaccttgaccttctcattggtcactggattttgtaacccaagatagagtattcctaccccaataaggacgaagcctacaaagaagagaagtcctgcaaacaagccaaaagcgtatggagtattctgcgctcccggtatgccatcaacattgattccaaaaaggccagtgattatggataaaaccatgccgccacccccaaaaatagccaaattgtgggtgatacgaaggcttctatcctggagaagagcaaaacctggctatcaattacaagtcaagtcaacagtaagaatgaaaaatagctcggtgcatacttgtaaccatgctcgaacagtgctttgcataacatcctgaatagtgaacaagcggccacggacagcttcctgctcctccaacatttctcttgtgtcctttctaatgctatctaagataactcttgtggtatttcccctcaaatgtctaaggagctcaattatgatctcttcccttgcatgcagagaccatttaactctgattacctgtagcacgggctcatgatcattatgtatcaaaaaaagagaatggcatgcacaattgccacgtggaacttgaatgtgctaacactattctgttcacaattgcacacttatctgaatagaagttcctacatgtaattcaattcctattttggatctaccctatctaaatttttgtgcattatacttcaacaagtagaaacgacacattggccaatctaataaattggtgttttatttttcaatgaggtaattatatatagaaggcaaattagggtggcatacttacctgtgttgctaaccttctgatttcttgattcaatatgatgctgactagatttagatcttcatgatttctcctgcgaaatggttgtttggaactttgaatatgtaaggtaatttaaaatgttatgaaatcacctcattttagggcacaggcccatcaattcaaataatatgctctgctagttgagatatgcctgttcagtttcctcacctattcacaaacttcagttcaatttcatctgcttcaccaaagacatatttccggaataacctgaaataaaataacacaactattagccatgagtagacaccattgtttgctacagcaagtacagttgcaggcataaaagaaagaatgactaaaatggattaaaatgttaggtttcctgataaaagaaatgctgtgggcaagttaatatggctagataaaaatctataataacatcttaatcaagaaaaaaaattgagtataaattgtgcccccatcgtagttcaagtcctcttcaacttgaattttggtacctttgttattatttgttggaaaaaggatactagtttccactagttatgctcaatcttatcattatcaagaacaaaaattgtcttcctaaagcaaataatatgcatcttcttttacaaactagacagtagacgttcagtaatgttgaggaggtaatggaatatagagaatgcatagttagaacaaattgctcttgaaagttgaaagtcctcatatcaaatcattttttttattatgcagataaacagaacaccaagggtccttttggcatgcctgagcataagttaatcaacagtataatatagtattaagataaaatccaatgagattcttatttgggggtgttgaattttgtcgtggttcttttggcaatataaggtataagcttatagccaacatagtattaaaatataggccaatggtgttcttattttgggggttgaatttcattgtgtttggtttcattttcaaagttaaatccaagaaagtaaatagcagtatgatgggtcaaacctgtataagtgcaatctattgatgtatatagaaactttttttatgataagtttgagtgaggtaaaaaaaagaagtgtcatgattacacagaacaaacgaagatttttttttcttattgatggatattttatctctatgaccaaacatcctaagaaaataaaccgaaaatgatggtagtggtagaagttggaacatagaatgaacctgtcatcccatcgggaaagacggccgatcaaatgtgcaattacttcatgagctgatctaggtgtttgacttccaccagcactaagcaactcctgcacagagttccacaagcatttaagatgaaaaattcacaagctaaatactattcagttcataccagcaaataagcctttgtttcaaaaggagtacctgcacttcagtcactcctaaaacatttatattggatgaagggcctttgacatgcattgcggtcacaagaaagttctgtgcttgccaagaccgaagcacaatgggtatgtcttcctcttcacggtttggatctccgactgattgaccaagaagttcaaatagcagtcccccagcaactctaactgggacctgaatagctaacagaagtttatagaataaatctgatgtgcacatctgatagagcatcatcacactttctaatagacattaaactattttatgcatctaaaatgcacatgagtagttctatgaagtagtcaggctgtttagctgttctggaagcagaccaaatcagcatagtttgagaaattactgatttgcacataataagaccatagaactcttagagagaaaaacagtgctgaatgatttgaccaaacagtaaatattgctgcctactattcaggttgacagggcacagttatcataaccatatatgcatcgactccatgatagactactttggcaatattatatgaatatagaaaaaaaacagttcaatagaagtatagaacccattaagtaaagaaaatccatgaaaatacctgtacataatgcaggtgactttgacagatctaagataagtccaaaagttttatgacaaatcaatgggtcaagccagtctcgatgttatggacatgggccaacattataggaaccaatccaatctctatctctattttactaacaaatctcatctctttcctaattagatatcctcctatctttatttgacttattcctaatttatcatgcctaaactaacgcatgagcctggtccagacccataatacttgacccacccagttaggccataatgttattgttatgttaatgctttcaaggaaaagagggtgggttagagggaatgatgataaattgatagtagtatttcatacaatagcctgaagcaatgaaatgattccacatagaaagaggtcttcagaatattgtggaaaggtcggtgtgtgctcttgaacaaaatcacaaatattcattctaaaactaaaggtcttcacagttaaccatgatcatagaaaaaaaaacctacaacagctcaggagttggtccttttttttcacgaaacatgaaaaggtatagaatagaaaaaacagtacaggctacagcaagtttagaagttcaggcagataatgtgtacaccgcgcagattgcagagcattcaattgtagaatgattaaaaaaggtcttgaataacggacagattgaaggaagaaaaataagtatataaaattatgaaatgtctcggaaaaatgagaataagaaagacaacctcatagagaaggtacttcatccgatcacttatcagccggctttcatctctcaatgcagttcttatagccggatgcatccagtgagcactattcagccatgcgtcaactgagggatggcctgcagtgacatggcaccaccatgtaggtcctaccggacgctgccagtatggagctgcaacatcagctacagtgtaatcatcctcactgtcggtcatctccgccggctcactatcccagctggcatctgactgaaccctctggaccagttcagcaatcctagaccatccgataggcacccatttgtgatccaggattgccctgacatgcaccggcctatctttgaacagagaaggatcattagcaaactctgtctggcggggattctccaccacatcgcactcttctggtttcatggttgcgacatgatgcccgttcctacttatgtgccgcttcatatgcatagggacctctttctcctgcatgctatcaatcgtcggccatgatttgtgctgaaccagcttcttgtgaccctttatgagctcaaaagcacagatgagcccgtcggtccagagctcgcttcctggcacatgctctttccccaaactcaccttggcaaccccgtcttgtgccctggacacaccactgacctgatgaggctgttggccctccacatcagccatgtccgctccaattctgtatgttggagagagatgcacattcatcaggaaattatgtcatgtaaatactgatttctagtacaattaaagtgtatagagcaatcagttgagaaattgggccaaaagatcaaacaactcccattgggatggtttaacaaatatacttgctgcatgagaaaatgatgcagtataataacactacttccccatcccaaaatatagcaacccaatactgaattagacacacccagtactacaaatatgaacaggcgaaccgcggatgtgtgtaattcagtatactaggctcctatattttgggacggagggattactaattactggagcattacaccacagttgtaccataggggaacacgagaatcatagcgacgaggcggaggatgtggattttcatccctcaaggggacatcccctcgttgtttgcatgtcatctagatagttatcaaaaaaattgaaaaaaaatgacaacatagattaatataaaatgtatcactccacaaacatgcaagaccaaattcaacttctacaagttgcaacaaaagaacaaattaaactgaaaatagttattgtacattcgcagctatatttgttatttttgttacaacttgtagaatttgaatttaaacttgcatgtttgtggagtgatatatttcatattaatctatgttgccaaatcttttcaaatttgtgatgactatttaggtgacatgacatgtatgaaacgaggggatgaaatcactttcccagtatacaagtacaaactagaaactactactgctacaagtccggatgcaagtatacaagtactacaacacaagcatttgggaattggaaaaggtagggcaaaagccacaccgtgtccggagcccagatcgcggcacgacacccgcaggcagcgccgccaccggccaccaagtcccgctcccgccaaaaacccgccgcgcgccactgagctttccccgcgggccccacgcgcagagccaacctagcactcccgcggggaagacgttttagcctggagccctggaggtggaggaggaagagagggagaaagagaagaagagtgggcgaggggagcgcgccggagactgtggaagtgtggaggaaggaggaatcgtgggggagcggagcgggcgcttcaagacgggaagggaaggggatgcaaaggcaaatgctcgctttgcttctcgcggtcggtcacctcgctttgcaaatgtctcagcctctctaccccatgcgccggcacacgtactcctcgctgagctttggatactagtactccagtagatacgctgtgcggtgtacatgaaacgtgtaccacgtcctcgtaaaccgccaggagtttgacatagggatatgtgtttttttttccatttttgaattagccctttttcacacaggccgtatttaattcgtgtaccaaatttttattctttttaaagtactccctccatactcataaaagaagtcgtttagaacagcgacacggtctccaaaacataatttgacttcttgtttctataaaaatatttattgaaaagtgatatatgtatatttttatgaaagtatttttcaagacaaatctattcatataatttttacattttcaaactcaacaactttagagttattcatgatttatattcccaaggtttgacttaaacattaccctaaacgacttcctttacgagtacggggggagtatacagacacacatttaaagtattaaacgtaaactaataacaaaataaattacagattccgcctgtaaactgcgagacgaatttattaaatataattaatccgtcgttaacaaatgtttactgtagcatcacattattaaatcatagcgtaattaggctcaaaagattcgtctcgcaatttacatgcaaactgtgcatttgattttttttccgtccacatttaatactccatgcatatgtccaaacatttgatgtgacgggatttttagaagtttgaaaggaactaaacactgcaacaatttccccaaaaagttttaaagctggataatatttttagcttcataaatttatgaatctagatatacgattgctttaataatattttaataaattattttgtttctattttagaaaaaaaatattaaatattaaattactataactttaacatacaaacttcaaatctactgatataaagttgtgccaaacagagttagcaagacgagaatcaaacaaaaccgaattgagtttatactttgaatggggaaaaatgcacctgcaaggtttttttgttgttacaaacattttacaacaagaagtttgtaagaaaagaaaatttaagcatgcatagcactgctgtattttatttttgctacgtgtaccattttccggtgggataatggcatgcgtatacgtgtatttcatgtctaatgaagaaaacaagtttggatgaataaacagtagctctgcgtctatggagaaaatactatttttgagaaaattgggattatactatcgcaaaagagtggtttcgctggaatactatccctcttgattcattaaaatgctattctaaactagaggtgttcaccaaaattctattttcgctcttttgggtaaatagaaatgcttttactccaagtttaacttttttccggaccaaaatacccctgatacgggcccacctatcatactctctccactctctcctcctcttcctctctctcgagggagcgccggccactgctctcctccggccaccggcgctccgcttccactgccatcggccaccggccgttgctctcccccttcccgctcgccgccctccgcccgccccgcccagccgcctccttcgctccgccgcggagcgccgccgccaccatagccgtgcgtgcggccgcgacgtccaactccccggcggccgcgtccccgaagaagagggcggcgagggtggggcaggcgtggcggcgcggggccagcgagggtggggcgggactaaccctgtcattggcgacgacgaatgcaccgtcgattgctcctcggtggcggcgatgcggcgcgaaaaggtagggatttggaccccccncccgtgcgcatggctacggtgccgccggcgccccgcggtggagcgggtggagggcggcgagcaaggaggaggagagggccgcgccggcagctgttgcagatgactggggcggcagcggcacgagcagaaagggggaggagcacgtgggggagcgtcgggggccggcgccggagccagagacgatgcggagggcagcggcacgagcagactaatgcggcgacgcaaacagaaaagggagagggaaggggaggagcaggtgagggaagggtattttggtcacaagaaaactaaaatagagcaaaatcatttctattaacaaaaagaccaaaaatagtattttggtgaacacccctcagtttaggatagcattttaatgaatcactttgaagggatagcattccagcgaaaccatccgtttgcgatagaaaaatcacatttttctcgcgtcgtatgcccctcttgcaattctgtgcggaggcagatatacacctcctttaagtaaagttgcagtatgaccttgctgcatactactacagaacaaaagctatttacatattggtgttgatgtattcagagcattgtcaaggcaaatcatgattagagacgcctaaatcagcgaatataggggggcgacttcgataaatcctccactgaaggcagcactgcagcagaagccattctacatgcttacggctgctctccagagtggttcaaacttgtaccgacgctcgaggtagagcttatcatttcagcactcagctctcagctcaaccgagagatcattgtacaaaaccccaagcatccattatggtccaagtctgtaactagttgttcatctgttcatctcacactgcaaagataagagctggaaaagttaacgcggacagtaatgctcatcagtaggtccaaacccatcaacaagcaggcaaaaagaggcgccttatgggatggggacatacaatctagaatctacacctggtggagaatcatataccggggccaccatttcatcgtaagtggagggcctactcagttgtgtagacagtagcccccagtattgtgaagttaaagtgtgcgtgcccaatgcccatgtcttactcccactagagaagacctctatgatttattgattaacattgtcaattttgtgaaactaataactggtattaaccaatcaaagtggcaaaggaaggtatttctctttggaccatgttcatcaatccatcagtaagtcaagcagctagattcttatctattgctgcaagcaccaagaagctaagtacagtcagccaaccaagatttgttcatcgttgcaacaagtacccaagcattattagttttccatccgtcttttctatttattatcacaaggaaaatgactcattgcagatcaagaattttcaacagtaagaacagaacatgcaagtgtaaaaatttcttacagctgactgaggagcttcagaataaaccacatcattcagcttaattctttgcttcggcaacgtgaaaggtactcggtggcttcattgaaatctgtcacaacaggaaattcagtgttaactgcattatatacatgagtggaacaaaagaaaatgggtgaatgtgagttgcaccaggaatgcggcggtagtctggttctatgccatttccatttatgtctttgtgatttggtgtcacatacttgcccactgtgacgacaatgccagaaccgtcatgaagttcaaatacggactggattaagccctgccgcatccaaggcatagtataagccagttggtcacagagagtgcttttccttggatatgctgtgtttttttttaacaaacctttccaaaagttttttcaccgaccagaacagctttgcagttgtcatgaagtgctgaagcaacctagaaaagcgttagtgcattggtgagctcatgctgatactattctaatactaccagtaaagttaaattggtacttactatttcactggcacttgctgtcctgttattcacaagtacctatgaagaagttgtgaatggatatgtgagatacaatgagcatgtggagatcttattatagcagacaaaagagagaagcatgattcagctaaaatttcagtaaagggtacgtatatgattaactggatctgtatcattccacttctaaatcagccgatcaaaaaagtgcaaataaaaaactatgggcatgaataaatcataaaacaccctacagcttgatgattctcactgtcaaagttagaataggaaagccagaattctgtatgtgcaacttaataggtgtctgtatatgtgtaatttgtcggtcttcgctttctgttgcatgtaacagtgtaaaattagttgaattggctagataggttcatgtacatcacaatagcatacataccataagaggagtagtaaccaaaggttccctttcagcaacaattgtattttgtacttgacgatcacgaccagcagtataaatcacctgaagaagttccataggggcataaatactacatctcagttcttctttaagaaaagtacacctccaaagttcagttcacgatataaaggataattaacaacagtttagtcaatcatatgcctggctgaaagccctcaaactttttaatatgcacaggacaagtatatgaatttcaacgaagattctatccaaatgcatatcaagaattgtaactacaagctcttaatttataattccaaacccatgtctaacataaaaaataactgttttcgagaaaacataaaaaaaactagcatggcttgatttttccaagttcaaacctaaactagaaccattttagccaggaagtaccttcattttgatgtagtatccatgaacagtaacttttagctgaggtgggcacaaaaaggttgatggattttaaaagaagttatgtagaaaaaaaaggttgggttaacttctatggacagatttttcaggtaacagatattgtgctagaagttgacaaaatatggaagcaagtaaaaaattaccgtgtctcctttattcaggaagagctttgcagtctctatcccagcctttaaagtaaacaaaagtaccatgagtaagaataaccccatccaaataaattatatcagtgtctttcattatccaaatgcataagcctcaactgtttcaagaagcttacaactcaagaacttcaaaggaaaagaatggcacccacaaacacaattttgtttagcagaccaaagactgacatggttatataattgaaatgaaaaaagcatacttggactagtccaccaagattgtccctcaaatccaaaacaaaataggaggcacctgagttctgtagacgctttagtgctgcacaagagaacatatgttagtggatataacatgccaccatccaatgtaattatattaagttatatctaccgataataattttaatggaatatcaacaaataatatcggaaaattttgtaacatcaaaatagtttcatacagaatcagcagaaataacatccttagatggccaatttgcagaagggaaaacgatattttaagttctgaaatagcatcgttagatggccaatttgcagaaggggaaacaatattttaagttgttctcctgatgctcacagtttgagccaggaaaatagttatatgtacatgcatagcagttttggcttaagaattagatactacatggccatttgcaataagttctatgcatagaacggttcagctatgaaagcaatgcagctaagtgcagctaaaaaatgaaagttgataaggttaacaaaccagcaacacaccactaaccaaatcttttttggccactgcattgaattctttaatgtgaatatatcctatagctgaatcctcattttctcttttctccaatcgatagaaaactggtgtgcgagcaaccagttgtctctgtaccttcaatggctcaacaggaccacagttcccatgcttaacctatacaatatacaagcaatattgagatagttataataaggagcgcaaagaagttctgggcaaaagacaagtatgatgtttataagattattcataaccttaattgtaacaaaagtatcttttggaccttgcaacatggatgacacatcaaatgcagatttacccataacatcaatgccattgactgacaaaagttcgtcaccctaataagagataaaaagacaggacaggaaagataagtatgtgcatattatccaaaaaccagctaaataagactacagtatttcatacaaaaaaaatgacaaacaacagttctctgtgataagaatactatcaacaggaattacataaaacataaaaataattaaatagtcaatcaaaccaatgttatgattgaaaagcatgcctactaattgaaaagtatatatgttgagttgttgatacctgtctaacaccagcagagtgggcaggcccatctaatatgagccctaataccatcaacttggaagagccattgccgtcaggaatttctctcaagtttaatcctattcccgtcatgtcatattttgacatcttggagaacttcaccagattgatttaacacatgcaaaatatcatcagaactgaagtacagttagaagatatagcatatcttcatgcaaaatcagcaataagtaaaatcagtgaaacaaaggaaatgcgtcaaaaaatggttttgtaatatcatcatttcatcattgtggagcgttgagttttctggtgtctaaactcttgacacaaattcgctattccctaagtgtaaaagtcacgcaaaacaatagttggcagtaaaggtccaagtcacagggatcccaaaaactttttgatggtcaatatatagtcatttgcacacgattctgacttgccaattaaaaaaataatggtgtcatgagcattggcccgagaggccgaggcccatggtcaacccagattctaaaaacaggttcatgccaactttagcactaaattcagaaacaacaatgtcagaatagctaattgctacaaaaaccatggatcactaggagaaacaaggaatggcatttagtggacccaccgactataagtaggctaaacatgttgggaaatgtaaattattcaggctcatactctctcctctctttctctctttaaaaaaaacaagttgtacagttctactcgtgtaataggatgatgttttctccaatatgctgagcttccatttgtcattctccaaaaaaagaacagtgccatttgtaaggtacttacttcggagggagtcaggaaccttgtgtatgggtcacccaggttagccagcattttctgaatgatatcatgggctctggaacgggatctgattgaggtttggacaatatcttgcttctttttctgcattgcattgaagcgaagcaattagccaattagcatattcaagatataacgtttccctgagataaatctatggaggataaaatatgttcagaagactggccattccgactagaaatccattaatgtacaaagagacttccatataggcaattgaaccacttcatagttcatattcaatcatttgttaagtgctcaccatccacatctccggcgaccagggacggcttccggcgtccgggaggaacccctcgttgaccacctcccacgcctcctccacgagctgctcgttcgtcaccacttcgctcctcctcacctcctccttggtctcggcggcggccccgtcgcggcagagctcggggccccgcggccgctccgcccccacggcgtcgccggtgaggagggagagggagatggacatggcggccgccgtggccgcggcagcggcgcggagggcgtcggggaaggggagcgcgcacggcggccctggcttggtcctgcgggtggcgagcgagcgctgcggcggccgcggcgacggcgcgtaggggagtagccgcatggcggcgtggcggcggggcggcgggcgtgggagccgcttcggattagtggtgggagttcggagtggatggggtagagggggatggcccggctgtgcaacacactgtcagagattttagctcgtggagatttcataggatttttcttacgggaaacaatcatttttctcacaaatttcatgaaatttctctatttcaaaggaggcctgttgatgaaaaaatcgaacacaccggcctgggagatctgcttagctccagtgcaggtccaaatatgatgagatgtgggtgtgccagtcagtttgatcctgcaattgacaagatatgcaaatagtagatcaaaacagccgatcggctgacaacctgatggagtagttccggccggtagccaataatagccgatgccgataccagccgatagcaatagggtttaagcaatcggctatatgtccaatgtagataatgatataaaggtaatcggttgatgatgatgtaacaaaataacaatataatccagtataaaccaatcggctagcaatgatatagtagaacaagtattgatccgaaggttaaagcacacatcggctggaggtccgatgtcataagatccacaagattagattaaacagtgaaacctttgttgccatcggctaaatccaacttatatgtatatgcaatccctacaagccgatgcaacgtccagataacttatcggctagcaccccgataaaatattagcatgaacctatcggcttaacaagacttatattatcaacaacaatctagtagatcgaacctaaccgatgcagcacgagattgtatatgataatctaatactcgatgagccgatagatctgtctaatgtgatggatataacaaatctatttagaacagcattatgattgtagagatatatcggctaagacaggagatcatacctaaccgagaccgtcccaactaaaccgatgcgtctctaaacacaatgcaattagagatagaattgagatatcaggtaggcaaatatatcaaccaaaccagagcgatccaagagatcgaatcaatgcagccttgaacaacaccaacgtagccgacagattcaccagggcccgacagaacgtaggacttaccccttcgccggagatcgaactgaacagatgcagccccgcgtcaggtgcccaaatcccgccggaagataagtaaaaacctcgggaaagagggtggcgatgcgccgagagtattattgatcgagagtgatagattacatagaccctgggtgtacatatttatacccatgggttgataaaagtccttgtcagacaagaaagaaactaacctaaagataaaagtaaaatataaagtccttatcggacactaaacacactttcctaaagataaaaggaaactaacaaactattcctaattaatagataaactgccatgccgcatcctctttaaactcggtcacttagggataagcttcctttagtatattgatttccttaaccgaatatagaaggaatccgactattggcgacttgataactcccatcggctgattccgagatgctacagccgataatgattctaagccgatgacgtctttgccgattaccaaatttcactgttaacaaggccttaaggactaaatgtattaacaaaaaataaatatgataataatgaaggtgtaaaacaatggattgtaaaaattaaaaaaatagattttcaatagatcaagggttaatttgatccatgccattgcaaatgtggatattaaaaaatgtcattacaatttgtatattcataactgtgccactccaattttacgaaattagaaccatgtcgttgctgtcaccttttccatccatcatcttcctttccgtcttcttccttccttttccatcttcttcctagagtcgtgctaggccagcccgcccgccgtcgctctctggcggcagcgtcgtctcccggagccaagtcggtgagctcggagagagggagccaagccggcgccaccatcccctccctcagcgctgccgccccctccttccatgcgttggagcccgcgccgtccctctctccgcacgtcggcgcggacgccgccgcagttgaagctatcgcgtcgtctcctccctcctcacatcggcaccaataccgtgcgcatgccggcggcgcctctgccgtcccctttctctgcgctgccgccccatccttcctctgagcaccgctcgccaacgtcgccgccccatacccctgcgtggccgcgccacggctccttccgcgtgccgagtcggcaccgccgcccggcttcctcggcgcccttgctccttccacgcgttgtcccctccctccacgcggaggaagtcgttggtctggccctccccaatctccaccgtgtcgacgtcggcgagcgccgcggggtcctcgagcacggcgtggaggcggcggagtcacgtggtgtcgttcttgccgaagagcgtggctggttggcgcaacacgtgcaggcaccggatgacctccttggagaagagcggcgtgtccttctcctcctcgtcgccgtggtgttcggcccacgactcatcgccgtcggaagcccttggcgtggagcgcgacgtggcgcggtggtgggaggaccagagctgcttttgttggaggtggtggtgctcagtttcccggatccgcctcgtggcggcgtggtgctcgatctcggctcagcgacatgcgatggccgcgaagaagatggagaaggaaggaagaagacggaaagaaagaggatggatggaaaaggtgacggcaatggcatggttctaatttcgtaaaattagagtggcacggttacgaatagacgaattgtaatgatatttttctgaatagccacatttgcaatggtatggatcaaattaatccatagatcaaagaaaaaaacacactttgatgagaaacaaaaacacaaatagaattaaggtttgataggatttaaagatgatcgatctttttccataaggaaccactaaaaaaatctagtatgcattcgaattcttaaaaaaaacacaatccctttttccatgagagttataaactgttatacttcgacttcaaactataattcatttgtactaggatgtgccccatcttagtactaggttgttttttttgacggagggattaccattttaaaccacaccattatttggtgaagttaacagatgtatggtagtatttagtttgttaccaaatatttgttgtgtttagagaattgatatcatcgtagttaaacctatcatgccaaaacttagtaacgttgccaacttgctaaaattttaaataatgccaaattttcgaaaggttaaacatggccatgaagtgaacaagactagagtttcgtacgagccctaagacacgcttttcggcgacctggtgcaaacacaaagttacaaatgcatgactccattcaacatattttaaaccgtattgcacatatatattttacaagacactaaaatacgtttctacctaaatctatgcatattaattttgttatagaataagcatttgggatgttgttgatggttaaacgtcaaatgctacctaagacatgttgtcaaataattattgctgtggagttatttatataggtaactcgtttggcacaatatatagaccatcaccccaaatgttcattttataattccaactagacgtgtaattccaaaaagaaaatggaaaacaatcacggtgtttaccctcacgtttccctctctgtggtatcaattcgtgttattttacatgccatcaagcacatcttttgaaactttatcattttttttatcccaaaggaatctaaggaactgacagctaaagtcatatgagattccgtgatactctattcgtttcaggttataaaatagtttgactttggttaaagtcaaattattttaactttgaccaagtttgtagagaaaagtagtaatattttcaacccaaaacaaatttattgtgaaaatatattgaattattgattcgatgaaactaatttaataaaaatattactatatttgtctataaacttagtcaaactatgtcttataatcggatagagtagcatactcgctttagtgttatgtggagctttttacgtttttttattacacgtactatcgctttggctatttacatgttaaagcaaatacattttaattagtacatgtaaaaacgagtacttcttcagttgtgatatatgatgctggtaacttttaggtacgcatttgagcattcgtattcattcaaaaatgttgtgtaggtttgcaaaatataagccaagacaataaaacaaattatataaaaataaataataattatatattttttaaataagatgaatggtcaacctataatccaatggcgtcatgtattttctttaaaaggagggaccactttctgaaaagaaaaaagatgcactacattttatgtccccggccgcaaaaaaagaaagcaagcactgtacatgtttggattgcatgtattgattgttagcgggagaaacataaatgtaaatatttaattaagcccacaaaacagcagggtgcaaacggcaaattcgaaatggaaaatattcctgtctatacaaaggaaagaaggaaaagaatgttacgacaaaaagaaaagaacaactgtttaaaaaaaaccctggacattaacgaatttctggtgttatttttttgcgtcaaaggaagaagaggaataaagtgatccaagaagaggagaggaatctaaccaaatcaggaaaaacccaactaacttaccactactggggcgtactactacagatctccgtttactgcccgcctaaattcttctcgcaaaagaggaggaatcccactgacccacacaaaaaaaaaaaaaaaccaaaaacgcatcgtcactttcatcaccaccggccccgtggccccacgcgtcaggtccgctcaggataactccgaggccacgccagtcgcagggttcgctgacacgtggggcccaccgaataattgcccccacatgctagcctcggggcggaagtcttccgtctctgtccgcgcgagccctcgcctccccgagcagacaatcccgtgcgcgcctatagttacaccggaagatcctacccacgagcgaaccacatactgcaggtgggcccagatggtggtgtccccaccatgtcagcgagagaggtttctgtgcgcgtttgagatcccacaccgccgcgacaagtgtacacggggatggatagagaggagagaagaagaagcttaaggctgagttcggatgggggagacggggaacctaactctaactcctgtgcacggaaaacggagtggt

SEQ ID NO: 9928 - DNA, 1572 bp, Oryza sativa
ttgaccataaattgaatgcgttaatttattgagcatacaaaaccaagccaagaaaccgttcaactggttgtcccgtcttattgacaaaccgcgagcaaagaaccagttggttcttgatttcttttttttagcaactttttctaaaaaactctttaaattaaccatgggaccctttttttctcttcatgtttcaaacctacaaacaacaatatcaaagagcaattgagcaaactagaaaagcagcacaggttcggtggttcctaaatcctaatctagtaatctagatagtcattcataaactatgaagctaaaataatcaatacacttcagttcaccgactcggcgactcaccgttgcagttgctcgaatgctcggttgctgtgatgttgctcgaggatgggaggccgaaggccgcgaggcgcgcaggcggccgccgggcgcggggcgctaccgcgccggccaggcgcgaggtgcggagccgcggaggcggcgaggtgcggaggcggcgagcggcgagccgagcagccggcgagccggctgtggcctgtgggcggccggcgaggcaacgccgcggccgcgaccgccgaccgggcgtctgggcgtccggcgacggcgaggcgcgcgccggcgcgcgcaggcggctagcgggctgggcagcgcgactggcgacggtgaggtgcgcgggcaggcggccgggctggcgcggcgacggcgcagtcggcgcgtgcgtcgactggcggcggcttgcgacgcgtgggcgtggcggctgggatgggaaggggagggaggtgaggagatgagatagggttagagaggaagtgtgcttttttcttctattgggccaatgggcctgaaatggtgggtggtgggagggttcagtttgggcttcttttcagttttgaatgggtataagtatttttcctttttttcctatatatacatatggaatatatacttcatatatgtatttttgttcaaaaatcttgggtattcatttgaatacctattaattgaattgggcccgcccctgagattattgtgcaatcctcaaactccacatgcgtgatcgatgcatgatcaccaacgaacaaaatggaagtcaattagcaagaagaaaatctgtcagcgtcagtgcttacactctcaggaagacggtatccatggtcgattggaaccagggagaggccatggccttgttcgtctctgcaggtgaggatgttgccggcgtgcctgccggcgttggccagcctgatgtccaacacgcagatcccatctcgccgagcgctggcctcagcatcgtcgactccactccggggacagtggcaccaccgccggaggggggtggcgaccgcctcttcatcgagccgagatccacggccatagacccgccggacgaactccccccgcagcctcagcctcagccccatcgcggcaccgactacccagcctcatccgctcccttgtctccatcatcgccgtcgccgtcgaccgggaggatgagctccctggcccagaacccgtatcagcttcaggccaccgccggcgacaccacaccgtgggccatgccccgcc

SEQ ID NO: 9929 - DNA, 8893 bp, Oryza sativa
ctatggcaacagaaagtttcagaagaaatgctatttcttgtcttcaagattcagatggaaaccaaatttttgatcacgaggggaaagctgatattttctagaatgtttttaaggaaagaatgggagtttctatgaaaccttctatggtctttgatctcaatgagctgattgaacataagggggacctttctactctgtgtgcactaattctaaccaaagagattgatggtgtcttgaggaaaatgcctggtgacaaaaccccaggtcctgatgggtttaatgggtgtttttacaaatcaagttggccaatcatagctcaggacttctataggctttgctcagatttttggggaaattcggtggatttgtcttctatcaatttttcctatatcactttggtcccaaagaaaccaagtcctcaaacccccagtgattatagaccaatctcattgatgaacttctctgttaaaatcctgtgcaaggtttttgctgacaggttacaatcgttgatgccaagtttggttcatcaaaatcaatatgggtttataaaaggtaaatcaattcaagactgcatagcttgggcctttgaatacattcatcagtgcaagcagtcaaaaagagagattgttttattaaaacttgattttgagaaagcctttgatacaattgaacatggtgccatccttcaagtgatgttagctatgggcttcccggatgaatggaatgtttggatgagtaacatcttttcttctgcttctacaaaagtgctcttaaatggagtcccaggaaagttttttaagtgtaaaagaggtgttcggcagggagatcctctctctcctctcctttttgcgttgggtgctgatttactacaagccataattaacaaagctcatctcagggggatactctctctgccaattccagtttcaggagataataactttcctattattcaatatgccgatgatacgcttattttcctagaagcttcggcccctcagctttttgctctcaaagctctgctaaactcatttgccatatcttctggtttgaaagtaaattattcaaagtcctgtatgattcctttaaatgttgaggatgacaaagctcacttgctagctgccacttttggttgtgccattggaactctccctttcacttatcttggtctgccgctgggaaccactagaccaaaggtgattgattttgccccattgacagatagaattgaaagaagattaacagtcagttcttcttttctctcctatggtgatagattgacgttggttaactcagtactctcctccttaccaacgtattacatgtgttcgctttctctgccattttcagtcattgagaatattgatagagccagaaggcattgcttatggaggggtaatgacctaattccaccaaaaagtctctggcagcttggggcaaggtgtgcaagccaaagaataaagggggcttgggagtcattgatcttagaattcaaaacagagctctcctcatgaaacatctgcacaaattttataataaggataatgtgccttgggtgaatttaatctggtcttcatattactcaaatataatcccccaagtggctaattcttgtggttctttttggtggaaagatgtctttcagtttgatgtcttgtttagaggtattgcaaagcccattttgagatctggcaagacagtcctgttttgggaggatttgtggcatgataatataagatctgtcaaatatcccaggcttttttcctttgctaagcataagggggattcagttgctcaggatcttcaaagaaatccacaggaccaattcattttacctctttctcagcaagcttttcaagaatataactccctcctagctgaagtgcaagatctcactctctctaatgaaccagattcttggttttacatttggggatctcatatttatacatctcagcgattttataagctctccttttggtccttatctcccccttgttcatttaattggatctggcaaagtaagctcaacatgaaaatcaaagtctttggatggctactgttgatggatagagtgaataccaagtatcttcttgacaggaaacattgtattcctttgaatgccactgcctattgtttgacatgtgggattaatgcaagagagacaagggatcatctcttctttcaatgtcagttcagcaagtcatgttggagaaagttgggctgggtttggaactcctcattagaataccatcaaatgctgaaggttcaaagaaattccttttctcagtatagttttatggaactatttctactggcagcctggaatatatggaaagaaagaaatggccttatttttcaaggtattcagccatcagttcacaattggaggaagggtttgaaggaggatttgagcctacatttaattaggttcagagaagttcatagacccacggttcaatcatggattgacaatctgtaatctttgctttcttcttttgtttctttgtgtgtattattttttccttctttaatataatttaaccgtgggggcttcccccctgtctttgagtaaaaaaaacaatggtctataataaaggcaataggtcattcccacccggtgacattaaaaaataaatgcaatagttgaatagaaattaaatgggaataacgtgatcaaagagtgattgggatctgtgtgacatgccttgctgcccttcaaactcatcagactcttctcctgcacagacagactctccgggaacatcggaatctaaacataaaagaacaaaatcaatcaaaaatagagacttgaaccaactaaatccgatctacggtgaattagttattaatttttgaagtttaaaccgaattaaattatttatagagattttaattgaattataacgcaataaaaaattattttaaaaagaaaaggagatttattgcgtcagcaggcttgggttcatggtgtaccgggtgcaccgaaacggtccaccacgtggcacgggcgaggcggggatgcggtcgacgtggcactgacgcggcgctggcgtggcgatgacatcacaacaacattaccaccggtggcggcggcggcggctcaggacctgacggttagcggcgaacgacaacgaggcggcgcaattggagggcaccggcgggtagagcgcgacgcggaaaactcaccagtggctcggatgacggcgaactgtcgaaacatgaattcggcaataataaaagggggtagcgcacgaggcctaaaagtggatggatgcggagacaaggatttagacaggtttaggccctctcaatgagaggtaatactctactcctgttttgggatttgaatccgccaagtacattgtagatctgacgatatggttgtgtgtcatgccccctagagggcctcctgcccaccttatataggatggggggcaggattacaagatagaaaccttaaccaatacggtatcggttccctaaatctactttacaatcttatcaaaccaggactttaggccgttccataatatacagggaaacgtaatacccaagtcatgatccgttacatattccatagatataagttatcccctataaccagtcggataactatgccgtgtgggtatggggtacccataatctctacagagcccctgagaccttcatagtcgaaaagataatcttctctcgaaccagattactccaaagccaagttcttcaatcatctttgccatggtctcccgagtacttttaccaaatatgaagactatggagggctgaaaaataaagtcaggtgcatcgactagatgcacctaataggtgtagccctcgactatgtggttagctgaacaaactaagcatatagtcaaggaataaataatccaaccaaccgagtggttttgataattgtaatcaaccaaatgacttgatatcaatatatagcatatgcggtgtgaatcccccaaataacatgatccaagtgatataccgactgctttgtaaaatatgatgagtgcaacctaaagttgactacatcattgaaaataaaacagctataaagaagcttatatgctgtgaataaaaaatttccaaagtattgggcacacaccatgcgcacactgctttaacagatgtgcttaagtccctaaaagacacatggtttcaccacacctggaaatatatggcatatgtggtatgaaatccgagtaaataaactcaaaaatgatttaccaaccgcttggaaaatgaccacaatatataatcagcctaagccataatattagtaaataaaaatgcacacttacgtggcaaaaagcaacgatattgtatccaatcaattgcttaaaaactcaaacatcaccttgacttatataaaaaagtcagcggggcagctatataaagctttactgtttgacaccttttaagatgcattgtaccaactcctaaaaagttgagtaattgcggtataaaaggattttaaggtattgggcactggatcacgcgcactttggcctaagcaaaaagtgcctaagtccctaaaagaacgtgacaggccacatctcataatatgggctgcagacatattaggcctaggccaaaaaatatgccttcgacaccctttaaaggatgacgcatagaacacgccaaataatatgatcccaagtgataaatatcctgggtgatgtagatcaagcgtaattgtccctcatggagaataccaaagtaaatgtgataattgaatcccgactggtgcaagcactcagctgatggccctcatgggaaataatgaatagtccagtcgttgagcataagaaatcgactcatgaccataaattcatgttgaatgtatccggaacaagtccaaattgaagatataatcctcgtgtttgagttcataagcccctgagcatatataacttgtccttctgccatagtcaaaattatccattggcaatagctgatgtagtcgacatgaaggcaagatgacgaacatggggatgatatcgccagtcagaggtgacgaaaatgttggtgatgataaaaacaatgacaccaatcaaaggtgatgaagtcgcatagccattggtggcgaagaaaccagtcgacagcagacaagtcagccagcagtgaagacgaaggcgcccaacaacggcgacaaagttgtgcagccacgacagcaaaataatcagtcgataacagacgaggcgcccggtgaagaagacgaagacgcccatcagtagaggcataataaaccagctatgaaagcgaagacaccatgaatggcggcggaggcaagccggtggtgaagacgtaaacgctcatcaatggcaatggcgaaatccaccaatcatgaagatgaagaaaatagtcgacgatggcaaatgcaaccgacggtaatgatgattagcatcaatagagatgatcgactatgatgacaaagttgtgcatcaacgacagtagagtagacatagccgaagaggtatggtaggatgttgatgaagacgatgatatcattgatccagtcaatagcggtgtagcagtcaatgataacgatgaggtctccatcgccagttgtgtagtagaccaaccgtgaagacgaaataacaagtcggcgatgcaagtcggtgatgacaaaagcaaccgacagcgaggacgtagtcaccccttagcaatggcggagacgtcagggccgatgaagtagaggtgttggtgatgatgtcaatgataataatccatcaaactcccagacatgtaaattacatctcaaacttgatacttgagaaatttggagtatattgtggcagcatggagaagccaaaattgccggtgaaataattggagtttctcaagtagaacgccaactcttaagtgaagacgaaactgatgactcccgaagtagattccatagaactcgttggctgattgattgctttgtcttgacataaagcttgtcgaattttgagtcttgtatttgtgtagcccccgactctttggttagttgagaaacaactgaacatagagtcgcgaactgtagcttcttgtcatcgagtagccatcacttgagtgaagatatgcattggggatgtccgagtagaaatattgaagattggaaaaccacttgtagtagtaaaataacacggcatcatatttggtcacgcatgctgagatgtcgaagctcttgtagacgttgtggttggtgaagtatgtcacgcccgaaatttctatccaaaattccaaacgcttacatgtgtgtaaattctcgtccaggaatcagccgaggcacataataacaaattgataatagagtgcaattattactctaattaataagggaatataaagtcattacagaggcaattattactccaaacaataaaaatctaagcagcggaaaataagataaacagcgcaggcgactccatcccacaagcagcttgacaagggctacgcctaatcctccacaccttcagcatcactgtagaactcctcctctgatgaatgattgcaaggtgagtatatgacatactcaacaagccacacaacaaatatgcaaatgcaagggataacaaaggatggcataatatagtctcatttgcataaatggcatttaataaatacttcagaatttaataaaacagtaaagtatttaattacacaatattaatccaacgctatacaacatacccgttgcataggcccaaccattcttaacaaccattcccagcggcacagttctatctccaaaccaggaatataccattccaaaccaggagctaaacaagttattaccaattacagtatcatttattatggtgagatgtatgaaactaatcacgaatgacattgttagacccgcccataacagcgggcacggctattcgaatagttttactctggccagaggtgtaccactgtacccacaagacacaacctcaacatcatgtcaaccatgcgtcgcgatacttaacaagtacccgaatagagattgtgacaatacccttcgcataacacaattcaaagcagtgcacccttcctggatcataatcacccccttataaacaaggcatggactccccagcgacccctgtgggcttatctccgccacttcacagtctggtgctctacaatgaaccatactatacaaaaagtaaagccgttgcccacgctggcttgtggttggcacggttaatgtttcacaaccgaaaatcgtgaactggtccttaattgtcatgagcacgaccatcaaaaccatgtgctcacaacccaccattatcaagttttagttggcaaattaattaattaaccaatcacgattaaccatcgtgagctatcattaagccatcattaaataatagtgaatcataagttatcccatttatatgagctaatgtctctaagcatggctaagcatcctaagcactttagctaaaaccatataatgttctagctaatccaattattaaccaaatgacaaagaataggtaatcaataacaaaaagactataacaaggcaataggttattcccacccggtgacattcaaaaataaatgcgatagttgaatagaaacaatagctttaaacgggatcaacatgctcaaagggttttttgggatctgtgtgacttgccttactggccttggaactcttcaaaatcttctcctgcaaaatcggactctccgggaacgtcggaatctaagcataaaagaacaaaatcaccaaaacagtacataaacaatcataaacagcacatgtggatatttttaacatgtagatctcaattttagaaaaatttagagacttgaaccaactaaatccaagctaagatgaattagttatgaatttttaaagattaaattggattaaatcatttatatagattttaattgaattatgacggaataaagaactatttttgaaaaggaaaaaggatttattgcgtcatcggctcgggttcacggtggaccgggtgcacagggacggtctacggaacgaacggccgagatctaatctaaacaaaacggacggccgagatcgattcgatccaccgcgggtctacggatgacgcggcgctgacgttagcgatgacgtcatcaccggcgacggctcggcacctcgggctcgccggcgaacgacggcgcggaggcgcaaacggagggcatctacgggtagagggcgacgcggtgaactcaccgaaggctcggacgacggcggacgtcaatggacggcaacggcggtgaggtcgaagcggcggcggcgttcgggtcgacaacgacggcgatgctccggcggtctttggcggaaacggaggacgggacgaggacggcgacgacttggcgatcccaacgacgaccttcccgagcgacgacgacgaacggagcggcggcggcgcacggctggactcccttcgggagcggcggtgcacgggctctagtggctagggcgctacgagcggtggcgagctaaagcgagggtggcgacgaagagaggaggtcccgggggtccttatataggggctagagggcggcgatggaggcccacggcaaccggcgacggcgatggaaggtttagggttagaggagagaaaacgaatccgaattgagctcgaatccaacaatttccaaacgaaattagatgaagtttctataggagaaaagatagaggagatcaaggggatcatttcccctctaccaatttgaccggatcgggaaaggggcgatgtaatttggaagggggcggcggcggctggcgcgctagggcgtggctgcggcgtgaggaggaagacgacggccctgacaggtgggcccacctgtcggtgggagagaggagggagagcgggcggcgcggctcggcgggctagatgggccaggcgctagcaggccgcggaga

SEQ ID NO: 9930 - DNA, 8054 bp, Oryza sativa
cctatctaaatcgagccgagccggagccgagccagcgggccccaccacgaccgcacgacgagcaatgcgatcgaggagataaggtcaagctcgctctcttcttctctctcgtctcgcctcttctctgtctcgctctcttctctcatctctctcctcccttcttgatctcctgcagccagcggaggcggaggcgacagcggcgaccgcgccctccccttcgccagatccgggggcggcaggaggggaggcgccagcggcgggcggggtcggcgccagcggggccggcggtgtcggcagcgggtggcgggatggccggatccggcggcgggcggggtggctcgaggaagggaggcggcggaggacccgccagcggggaagagccctcccctccgccagatctggcgggaggggaggcggcggcaggggcggtgatggggaggcagcgacagtgcgacaacgactcatgcgacgatgacttcatccggcggcatcttctaccctcccctcctgcttcttctccggtgatgaatgttgtgatttttttattgcataaatttgtgttgtgggatgattgttgtgggatgaatccatctttgaatgctgtgggatgaatcagtctttgaatgttgtgatttgttctgttcttgcggatgcgggttcttgcggatgtgggaggtcttgcgatgcgatgtgggaggagggactgctcgcctgcttggctcgatgcgtcggctcgatcgagctgtcacatcgagccggcttttttttgattcgtcgaacctaaaaggtgccggttctaagcaaccggcacctttttattttcaaatcagtgccgccttccttgtgccggttgggaaaaccggcaccgaagagggttccccaaccggcactgaaatcattttctgtagtagtgaagcgattttgtcccataaatattattgtcgttaaggttcatccatcccgcgccattaaatgcactgttcatcctatagcattcaacgagggatgctaacggaactctaacggtgaaggtatttttgggacaaagtcgtatgcacaatggtatttcatggaactcgtactcttcgatgacatttcttggaattgtgcacttgtgaatggtattttttggattatttcttatttttttagaagttgctgacttgctggtactaaggtgtgatagaaaattatcttggccatgaacatatatagaaattaacattgaacgaattatatagaggatcaatttttccaaaacataaaataaattttttctttcttaaacataaaaaatgaacttttgcacaacttatttctatttttgtttagattccaaatagtatcttcaaaacatagttgtgtgtttagctgtcagcatattatcggtgtgcgtcacgttgcgtccattttacttgcgtgaatcgtgttgggctaggttcgcatggactagccgactaattgcacctgaatgagtaatttgcaagctattataccaatttatacctatcccgtaaatttgtataccatgagcgcaatttatgttcaagagttagtaatcacttgtattaataaatcaataagtaaaccgtcaaaaaaattaaatcaataagtaaaagttttcatagacactttattcatgacaattttaagtaaatgtatgttcaacgtgcatacgggtgagtttggtgaaaccttaagaccgttatacccaaggtaatcaaagtacacgtggttttctgtaacttcgatttttttttcaaaaaaatacatatttagatgttaaaatcatgaaaaacactactccctcagtttcacaatgtaagtcattctagcattttcatatatgtctagattcattaccatcaatatgaatgtggaaaatgctagaatgacttacattgtgacggaggaagtagtatacaaaacaaggttatattgtacttgggggtattttgccaggctttgatagttgagaggtgttaaatgttgttttgatagttgagacttgagtggtactatttgttagagtttgtgtcgaatatgtgtacatagtcggttatagtttaggacttggagttgtactatgtataggactagagtatgagtcggactctatcctaggatctctcataaatagaggggcgtgcctgttgtaaccgcatgacgacatagcatagcgagagggagcggctgccggcggtaactggccgtgagtcgttgtaactctgatacgttgtatatgctagatcggggaggagcgctcgtaatcagtgccccggagatgtaggtatcggctgaactccgttatcaaatatcgtgcctcggtgtcgtcatcatgtttggatctcctgtggcgtttctgccgcgtttggtttccgatgtgaattcagagccggtttctaacaagtggtatcagagcctgcgggagatctatggtagaggtacgagggaggtgctccacgccgcgacgactacacggggtgtccagggacgaacatggacgcaaggtggagcacggcggcgatcaacggaatttgatcggtggaatcggacacttcaggcggtggtctgaaccgttcgatggctgcaatcaacagggagatgaccagacgtggtgctcgggttgatggcggcgcaagcgattggcggtccaatcggtgggtcggacacttcgggcgggtggctcgaactttctggtgagctactctcaacagggagacgtgtggccacacgctcggggttgattaaagctggaggcgatcggcgttctcgattgatggaatcgaacactctgggcggggtggcccgggcctttcgatgagttgcgttcgacagggagacggctagacgtagcgctcgggtcgttcggcggctggaaagacggcatgacgatttgtcggcttcggcttgcggctaaattgacggttgtcaattggaggtcggagcggatttgttggcgacgaagtccgagcggcaggaacacggcttggtgtggtcgtcgtgttggtgctggcgggattcgacgcgggccggctcctgtcaacggaggcggcgacggtatgcacaggagctgcacaaaagttggaccaatcaatagaagctgtttggatttgtgccatggatcacacatgcagtcacgcagagaagtcatcaagcatgaagacatcaattaattaattgcatggttgcatgcagggagtagttaattggatggatgtgcttgcaggctcggttcatggtggctgtggatgtgtgtatgcatgcagcagaggggtccatgggcatattgtgcgttggtccaaggcatcgagcagaggttgcatcggaatcggtcgtaggtagatagatgcatgagcagttttttccgcttgtggaggtcgacacgatcacggagttgttttcagctcggagatgtgatggatgtggagatcaatacggaggctaggtggctgggattgtcaccaaagccaagtcggttactcatatggacggtgctgttagggagtagatcgaggccataggatcgacagcgaaagtaatcgtgcatcaaggcttgggcgttacgattcaaaggcaaaaggttgtgtcggtgtaggagtgcagtaaggccacgtgcaaaagaagttccgggcaacggcgggtgaaatatgttgatggagacaacgggtctgtctgacagtacaggatatatccagaatctacggggtttgtataatggggatatatgaaatccgcgtcactaaaggagaagagcgaacgctatggtgataatttcttcgggtgattcaaggcaacggtgattttctcaaattgtccagttcagcctacggatgtggaaaagcgtggatgttggatttgttagctcggttcataagacgacaaggaagaaagggttctcttcgtgtctagtgagtttgatttatctatttggtgatgacgtcggttatctggccatggattagatcaagtcaaatttaagatggtagatgaagttgaacatggctttcaagaagtctataatgtgacggctaggaacgaattcaatttcacttggcaagacgattgtggtgataggagagaaggtggagcactgttgcaggtggagtcaagaggaagaagttacaaagatggcggagtctcttgttacggtaagcctggtggacgcttgtcggggcagctcggcgagagcggcgaaaaaggaaccaactcaagtccgggtacacggaggttcgaacaagtaacaaattcaggtcgtcgtggcatattcgctaaggtggagtttgttagagtttgtgtcgaatatgtgtacgtagtcagttatagtttaggatttggagttgtactaggtgtaggactagagtatgagtcagactctatcctaggatctctcataaatagaggggtgtgcctgttgtaatcgcatggcgacatagcatagcgagagggagcggctgccggcggtgactggccgtgagtcgttgtaattttgatacgctgtatattctagttcggggaggagcgctcgtaatcagtgccccggagatgtagccctcggctgaactccgttatcaattatcgtgcctcggtgtcgtcatcgtgtttggatctcctatggtgtttcttccgcgtttggtttccgatgtgatttcggggccggtttctaacacttagtaagacaaacctaatagttgaggggaagggtgtaatgtggatttatcccttgataatacaaatattacttcccgcttttatatacatagccatattaatttaatacgtcgtgccttgtgtgtgcgtcataatggacaaagcaaaaccgtcaattgaagtagctagcgcacatgtgatcttcctttgccatatcagaacaaatcgagagcaacaaaatggacaaaatttcgtgtcaagaaaagcaagaccgtcagcgcagggcacagccacaggaactccatttcgttttgtttcatgtgttgtttctatgcatcgacttattttgcacaccgtgtccacatggccgagcatgtgggctaggagctagtatcaatcacttcatgtttggcagatattttaagttatttgttagcatctaattttagtacttaatttcatctgaaataaaaggatattcagaaaaaaattatccttaattttatatgcaattgtgttttctggttttccaatttttttgtgcgtttttgtttactttttcacaagatgatatgataaattggtaatcgccgggcgaattctgctaatatattttcaccttgagtcatatttgcattcttgcatatatatatatatatatatatatatatatatatatatagttatttccttttcaccggattttaacatataaaaaaagggatgttaacatgttgggcatgttacctggaacctggaaaggcagcgaattcaagcaccgtgtttggagtccaaaaaagcatgagacaatatttagcaaacctagattaataaaatggccggcatgtataaccaatgcatatgcgccgcagctcatgtacttcttttcatgacagtgcatgtaaccgtacacagcagctagagtaattttcttttcctgaaagcaaatagctcgtggataaaggcctgattagttaccaaaaactttttctcaaaaacatcgcatcgaatctttggacacatgcatagagtattaaatataggtaaattaaaaaactagtaagtgctacagtaacccacatgtgctaatgacggattaattaggctcaaaattcatctcgcggtttccatgcgagttataaaattagtttttttatttgtgtccgaaaatctcttccgacatccggtcaaacgtctgacgtgacactcaaaaaaaattcttttcacgaactaaacaggcccaaagtaaacattctggcaacttttttatgtagattctgtcttattttgttttttaaaaaaatgaatatactgaatgaaaaaaaaaatgcatgcgtatatgcatggtttgatttttttaagtcctttagacggttctactatatagcggtagctgttctagatttcaagtttatttgtatccaatttttcttttcttttcttgagtaaattttgtcagggttatggataccacatacctaatagtagttgactaaatctcggcaggacccaccacataacatgttttatacggaaacaacatttgggtatagaaggagttccggataaggaaagataaatagagttctacatggaaacgacaaggattattcggattgtatccatattggtttccctagttctaattggaaaagggaacacctataggtataaatacaacggaacaatagatcaagacataagatcaatatacaagccaacatacgccaagacaagacaccggatattgacttcagagataagcatggctagtcccctacagtgtctacggatactgataggagagacatagcgctgtctttgatcttgccggatgtggattcgaagagaaaggctaccctgttgtcgactacgagtcagcacttcagaccgccaagtcgacaacacttagataggctaccccaaatattgtactagtgtgattatggtgaataagagcaacgaccggcttcggtcaacaggagtagggttattacctgacaattcaggggcccgaattgaacctgtataaaaatcctcgtccccatctcttttattacaatctcgcatatattctagtaccaacgattcccatactatgcaaatactggaatcgcgacatcaaacgtcgccaaatttcataaaactacatatgctttaatcaaaattatgataaaactctatatttaaggtagtgtatcaataaactacaaatttaaaaatattttttcacaaaactacaggtttaagctaagtatcacaaaactacatactttagggtttaaatttttagtactaatattagtttgtgtaataaaggtccatattttgtgattaaattggtgttgaaccactagttttgtaatactttaccttaaatatataattttctggtaagtttattgctaaatttgttatatcaggttaaatatatagttttatcatggtttggttaatatattataattatgtaaaatttactcaaatttaattgcacccagctttggtccaaggtagatcaccagtatagagacttgatagtagtgtcgccatcatcatccgtgtagacaggtctaaactacgcaaagattcgctggataagaacaaactagaacagactagtctatgaagtcataaagtagactagtctgaaagttacggttcttgtatatatcatggtgaaattatcaggacataaacgttcaagttgaaaggttcaatgtgcacctttttctttcatttctgcaacataatctgtctaatacttatatagttaatccccactaaatataattaatactatttctctcttctctcattaagccacattatctctattagttttagcctttggattcaatatatatggttcaaattgtctcctttcctctcccataaaaccatataattataattatttttgactcaaaattcatattagtttaataattatattgtatcttatttgtacatgttatacaacttaatttaacgcgataatgtggcatggtatttatttgtaaaaaaggtatataatggtaaaatagagaaataaacggtggattattgagatgtgagcagcttctgggtacaaatggattattcgcagtgtcacccctgtaaggagcactactaataaaaaattccaggtatttacgggcggaaaaaagtagcatcacaaaatagttgaggtcttcttggttttttacgggcggaaaaaatagcgtcacgataatagttgaggctgtctcaagtcatacaccgcctgtgaaaccaattttcaggtcattagtttacatgcaggcgacttgtggcggcgcctgcaaaactcgcccccccgggggcgggtcgacgagccgcatgcgaagatccattatcgcatgcggctgcttaagacagccgca

SEQ ID NO: 9931 - DNA, 18520 bp, Oryza sativa
ggtttctccaccagtgaaacctcccaccgcggtccgccacaaccgtccacgtattccgctgccctcacagcccgtgggggatagcctcaccgacaagctctccccaccaccgcggatcaagttgtgcctatgggtggttgggggtgtcactaccacctgttcagtaagagctttttaggattggagaaatttaacggtgctcgacacaatgcctgaccgggacatggtctcctaaaacaccatgctcaccgctgcactgcatactcgtatcgaaatggctctttggcgatcagtcgtgcaactctgtagcgcttgatcagatctgccccaccattattggcccatgtgtttttgtccacttttggcgatgcgaggtgcctaagtcatttttgtggcgcggtgggctcggcccattttcaattaattttcgctcggttcagcccatcatgggcattggttgtgggaggcggagcaccccaaactgttaaaaaaaatgagtctgttgcattttgaacattttcatttttcctattcccatccatctctctatttttcccactttttttcctagagagagatttgaaaagaggcgtaaggcaggggtgtcgcctgttgggtgagagcttttttggattgcggaagtttaaccatacatgggagaaggaagaaagaggtaggaggttggcggctagaggaagaagacgatgatgagtagtcctcatgacatgtatgcaaaaaatgaaaaaaaaattaagaagcaatctctctccagtgacaaatttgtatgaatagataaggggcatatagagagttgtcaaatctaatagtgacaaatagttaaattacttcccaatagtaaatacgcacatttttttcctttaataagcatgatgcttccatttttgtttacttctcatcttggaaactcacgagatataattatatctctcttcttcagacgtcggcgtccacacaaacgtcccacacagttacgatgagtccaggttgccgtccatctaccaagcacagagaaaggaattcgaggtagcaaatcttcatattcctttccgcgtcttaagtttcaaaaaagcaaatcttgttaacaactggggcacttctatgtagccattccatcagcctggcttcgcactttgttccttggaagccatttatcccaatttccacgagatgtggtaacgagacgctgaggtaatcggcttgattaccagcaggatctgttggtttcgtctgctcctatacaattaaaaggagagaaaaaaaatccgagagttgttagcatatcaaaacttgtaatgtttaattttttttaatgaactgacaaactgtgctaatttcataatgtttgattgttgtaatgttaaattagcacatttgcagtgtgcagcaatgcaaattaaccctaacaaaagtttatcgaaatagacgtcgagatcaattcagtaagaggggacttaccacaagataagcgtcgttcatatcttagagagctccatcctggaaggcgtgcatgctagccacttgatctgttgcatgttttagagaagtttgatgagttatattttagttatacttcagttacatcctagttacaatatagttacaatgtaactacaatgtaactgcattgtaactacatcgtaactactatgtaactgaactgtaactacattatcatctctatataatttagatatagtgttacatatattattttaatatttatatacgagttacattatacttatatataaaattatattgtaattataaactgtcaacagtttataattggctcgttaaaaaactaggaggaagagcaagttttctccttaaaaaactgtcaacagttctctaggtagtccctttgtatgctcgtctacatcagaaaaagtctcgtcctcgggagaaaaaggatttaccgtcaaagatgtgacaagaggcaaatgtggtatgtcgttcatcatcatcacgtcatcaatcaccccttcctcttcctcctcgccttcctcatcggcatgagataccttacaagcaaggtggacatcgagggattcgacggcggggcatcgccggagaaggcgtccggagacatcaccgaagccgatgcggagcccatcagagctcaagtacagatttttgaggctccgcacgcacgacattatgtcgccgacgtcgagcctctccaaagtttcccagttgaaggatgatttcagctcctctagccccggcgccgacatcgtcagcgtggtgtggtggatgaagtagcattcaatgccaagaacacgaagctttggagtgttgagctccaccagggtcaggcccacgccgtcccagatcagggacagctccaggagctcgccggcgtcgagccgtagctccttcaacccgactatttcctccagggctagcttctggaggcgcgggcagcacgccgacgagaggaggcggccgagaaggtggacgtcgtcgagccggatttcgttaagtgaaagatccaccagagaatcgaacgccacggtggccgggagaggaagagttaggtaggtcagtgggccatggactccagcatcgtcgagctagggagctcgtccaggaccaaaccgtcggcgtcttcgtcgaagtcgtaggaccgtcgctgttcaggcagtggcagcaggttgggctggtcgagtttcagggcgaacgatctcaccccttgctgttccatggcgtaccgaatccacgcgttggcgtgtgcgccgtggacggccggcacggcccgggcgcagcagccctcgtgcagctcgatggagatcgtgagctgctcaacgccggcgcggcgcgtggcgtggacgcggttgacgaaggcgacgaaccgttcgacatcctcctgccgcttcacgtcgcctgatgggttaattagatgagatagagagaagcgcaggctgggaacgcgcgcccggaggcaacgccaccgccgcgacacggcgcacgcgcgcgccacgtcggtggcgttgggcaggaggccgaggacgtgcgcgaggacgtcgtcgttgagctcgctgatcaggtcgccgccgtggcggcggcggaggtagtaccggtgatgcgtcgacgttgtctgtggtcgtcttctcttccccatgccaaacagaaggcgagatgtagctgcacgggtatatacttttttctttacggatatatataatttttttatggaaactgatcggatatattacctttttttaatgggaactgatcggatatataacgtgatatttctatatacatccctcatgcgcgcgaataggtttccctcgcgtgtgaaatcgaatcccagtatagatgactataagacccgcctggcacggcccggcccagacacggctaggcacggtccaccagcaatcgggtcgtcacggcccgatcggcacttcgtgctaggccgtgccagctcatggtctgcacctccagcctaggcacgacccatcagctgtcaggccgtgcagtgccggcccgaaggaacgtgtggcccatcgtgccttcttaaaataaacctattttccatctcctctttgggctgtgacatatatatagctaaaataagtctattttccctctcttctctttgggctgacacgtatatagctaaaataaatctatttttcatctcattctttggaccgtgacatataatatgtctaattttactccctattgtttatgtgtcgggtccggcctgccgacccattgtgccatgctggcccagtcatgccggaccggcccaacgtgccggtggggaggcccatgcatggcccggcggtcatgggccgggctaaaatatcgtgccgtgggctgggccgtcggacatcggacattatggccatctataaatccaagtatagcacttacagcaactccagtgtatggacaaatcgatccgtgagacggaaaaatcgtgtgtaatatgtatctagagatgaaacacaacacaaacacagcacattaaaggcccaggaaacggtaaattgatgtggattcgaatttaaaaatagagtaaatttcacaaaactacacattttatggtccaagttgtagaaaaccacacacactttaacactataagtacatatattttattagtgtagttttacaaaaccacactatcaatgaatggattcacccgtgagatgacgtgtttgtttcaccaggacgaggatgtggcatcatattactagccatcgcacgaaattaataggatggcacgtcctcatcttagatggaacaaccacgtcatctcacgggtggatccattcattgatagtgtggttttgtgaaacactaccaaaatatatgtacttaagtgccaagtgtcaaaatatgtgtggttttctgcaacttggaccataaaacgtgtagttttgtgaaatttactcttaaaaatattgggctaatagctaagcccaataatatggggtaagggatttattggagttatttacggaagaaacaacaattcaagatgtgcgatattatgcgtataattaggaggatgccacatgttggacatctgataatttcacaaatatcgaatactcaacaccacacagccgtgcgcctgtagagcctacaggcatgcatacccatgcaggtgcatgtgctgttgtattcccctatctaccgagtagtgcattgttgcattccttgccgctgcttgagcgaggactgaaaagccgtctcgtagatgtactctacccatggaagccagcgtagccactggcagggacgatctctggtgaggcagcggagatacatggcgatgaccttgttcacggcttcggtctgtccgtcggagtggggatgaaatgccgacgtcatgtggagcttggcgccgatgagacgcataagctcaatccagaatagggaggtgaacacggggtccctatccgagaccatagactgcggcactccgtggaggcggacgatctcgccgaagaatgcttgggccacggactccgccgaatatgggtgcgccaagggtatgaagtggcaatacttgctgaagcggtcgaccaccgtgaggatgactgacttgccgcccacgtggggtagcgcctcgatgaagtcgagcctgatgtctgcccaaatggacatcggcactaggagtggaaagagtttcctagccgagtgaagatgttccgacttgtagcgctgacaagtgatgcatgcgcggacatggtcctggaccaccgtgcgcaggttgggtgagtggaagtcgcagcggagtcaatgaagagtccgctgcaccccctcatggccgtcgccgtgtaccgcggcaaggagctcttggagaagaggtgaggccggcgggatgtagaggtggccgtcgtatgtcaccatgccgtcggtcaacgcccatggggcggcgtgctggtgcaccatgaactcctccctgagtgccaacagcgtcggatcgatgtcttgggcttggcacagacggtcgatgaagtcgaaccgcggcccagagatggccagcagcatggtctcgtcggtgtcgtgtcgtgacagggcgtcggccattgtattgttgacaccggccttgtactccactgtgaaatcaaagccgagaagcttgccaacccaatgatgctgttggatggtggccaaacgttgatcgagcaaaaacttaagactgaagtggtcagttcttacgaggaaccggtgaccccataggtacggtctccattagcggatgacgaggatgaggccgatcaattcctgttcgtatgccgccaaggattgatgtcgcagggtgacggtgtggctaaagaatgccgtggggtggtggtcctggaggaggacagcaccgaagccataggtggaagcatcacactcgacaacgaatggcttggcgaagtggggcataacgagcaccggtgcggtcgtgatggctgtcttgagggtggtgaaggctgctcctgtctatccgactaggaaaacccttcctcgtgtagcagtgcggtgagtggtgctgtggtcgtgccgtagttctggacaaacttgcggtagtagcccgccaagccgaggaatcctcgtaccacacgcaccgatcgcggctgtggccagtcggagatggcttgaaccttgggcgggtccatggcgacgccctcggaggagaagatgttcccgagatagctgatagaggagacgccgaaagcacacttggaccacttgacaaagagacggtgctgctgtaggacttagaggacagtgcgtacatgacgtaggtgggctgcccatgagtcgctctatatgaggatgtcgtcgaagaaaatgaggacgaagagacgtaggaatgtccggaggacgtcgttcatgagtgcttggaatgtggtgggggtgttgcaaagcccgaacggcatgaccatgaactcgtagaggccgtcatgtgtgcggaacgcggtcttggtgacgtcggcagcattcatcctgacttggtggtatccggagcagaggtcgagcttcgtgaagaagcgggcaccgtgtaactcgtcgaccactggaatagggtatgcattcttgaccgtgatggcgttgagggcgcggtagtcgatgcaacatcgccacgacccgacatctttcttgatgaggagaaccggtgaggagaaagccaatgtgctgcaccgaatcaatccttgtgtcagcatagcggcacactgccgctccaactcatccttgtgggaagcggggtagcggtaagggcggacggccactggcgccaagcacgaacgaggttgatgtaggggtcccgtgatcgaggtggaggcatgcccattggtttggcgaagacggtggtgaattcctcgagcagggctcccatgatgtcgtggccggcaacgacttgcagcgatggggccgtcgagcctgcaacaccctgccaacatacacggtggtcgtgccgccaaaaagacatggatcgtgagtcgaaatcccacaagatctacccaagggacgccagccactgcgtgcccaggacgacatcgtagcccgccagcggcagcgcgaagaagttggcgtggaaggtttcggcgccgatggtgaaggccgtgtcgcggtacaacctcggacatggaacgcgttcaccgttggcgactgtgacctgcatcttgccgcgagggaggagcggaagcttggtgccgttggcagccaatgtggagatgaagttgtgggtggaacccgagtcgagcagcgcgaggagtgcggcgccgccaaggtcgatgcagacttgcatagtgtcgcagcaacggacgcccgcaatcgcgtggagcgacacctgtggctccgtctccccggtcccctcttgggcgctgtcgtcgtcgtggtcatcgtcaggcacggccaagtcaaggaggaagaggcgttggcagacacggttgtggccacgcgagaacctgtcgttgcagttgaagcacaagccgaggccacgccgttcctccatctcagcctgagataggcgcttgaccattcggccctcaacggtcaccgtggcagggtctgacactggtggttgaggaggcgccggcagggcgagttgctggggtggcgccggcagcaggccccgctagttttggcactggttcggaggccctggtacggcagctgcggcgcactggtcgcgcagctcgagcttgcgggcgatgctcatggtgaaggcgagcgtctgtggattatggatctcgacgtcgaggctgagcggtggttgaaggccggccatgaagatttgcatgcgttgttcctccgtgagtgtgcctgcgcgaggcaagagagactcgaacttgtcttggtactcgatgacggagtttgtgcgagaggattggaacataggggagggccaaaacggaggtggagcagctcggtgaagcgacaccatggaggagtgccttcgtcttgttggacttgaatgtaccacatttgcgtgccatcttccagggtttaggaggccatccaaaccttctcctcatccgcaatgcgctgctgatgaaagtatgattcacaacgattgatgaaggcgagaggatcggacttgctatcgtatttgggaaaatccatcttctggaagcgaggaggccgatcgttgtggtggtcgcctgaggacttggatccggaaggtgcagcctgctggagcgaggtgacctaagtctggagcttgtcaacggtggccgtgagcaccttgatgagcgcggcgagctcggtggtggatggtttagccatggtggaagtgatggatggagtgggtgacgatggtggattggagtgggaggaggaacgcctggaacctgataccaagttgtcaagcgtgtcggtgccgaggatagccgggccgcggctacgcagtttgtagctcgactcggttgaggtgtcaggaaccttccctgcacacccaatggtggaagaagggagattaggaaaagttgattgatattgcttgcctttagcaaggctggatacatagtttatattggctcgtggccatcttaatacaaggaaatgtcattattcctcctaaattaactctttccttgtttgattctttccaaaggactattccttgattggtgttgcttgctatgcatgcggttgagcaccatccagcttgcttcagcgctggtagtaatgactccacatgacatacttttccacgcctcatccctgaacctctccatctctactctcctgtaacagaataggaaaacccaatctggcgatggctgtctgccgccggtgcccggcagtgctgttcctccgttcttccttgcacaccggtgggtcaattaacctcagtcgattcttcttgcagtttatttattgcgcattgaatcaatctaggtcagtagatcgccttctctccttaattttcagtcaatcaacaagttaggcaaactcaaaatccccaatagcttctctgtagtttggccccctattcccctccatttccagcagtttatcgccgccataagggctcgtttaatctgcaagagaaagggggttcagagaggattgagaggaaaaaattccacaccataataggtgtagaataaatccttccgaatcctctcggtccacttgtgagagagggattaaaagaaggtcttgttcggtttagaggggattgaagaggattggaggggattgagggggaataattccacaccataataggtatggaataaattccctccaatccctccctcatggggattaacccaacaaggcctaaaggggtagggttccactacctcccatttccacttttctgatttcttggttgaaactctcgatggtcgccggcaagtcctccttgggtcctcgtcttcgtgatcgcagttgttgctgcttgtagtgtgtccgatctgcgagtatcctggtagtgtgtaaacttgatttcatcaatgcacagctattgttattctgaagatccaccaagcataatctcaatgtataatttttaattcactaaattattctcattcctgattagtatattactgtttaacataacaaggcacatatgtagatggagatcgaagaattgcttgctacgaagtatgaacttgagtgctcaaagtatgaagtgaaactcactagctcttagcttctcttcccaatccttttctcaacccaactcccttctcttctcaaatctcactcacaaagatctaccacttagctaggggattagagagggggtatgtgacttcggatagatatgtttcaaactcaagaatagccatcactaatggaggggtggaggagtttatataccagagcccctgaaaactagtcgtttctggcaaagattccttttttggatgtgccgaaatgcatcaacagaaaacaatcttagttttgcagccattttcggaattttcgaaaatttttggtcttttcaaaatatttttggacattctgaaaaacaccagagagcaaaatggccataactttttgatcggaagtccattttttacgatcttagactttatggaaagctcactcagaggattacccaactcaaccaaaaagaaggtccaaaatcactcaaaggataggttaatgggtttctctcaaataggtcactttaagcaccgagacatacaaaaacacatcgacgttgcatacctcttaatagtatggcattctatcctcaaatataaataggaaaataattataccaataggaatgtcttcatgccatcttcctttatttgtcttaagggatgccaacaccaaaaccatttcatcatatattcttcaaagatcgatgtgggctccttgtagcttcaaatggcctcgcacagcccatcatgacgaagccgtcaatcacccttcgccagcggttttggtccttcagtgccaagccccttgcttcccctttaccgacacatggtccatggcgggcgagcatcacctgcctttcaccgtgtcgtcttgtccatggaccatagtctttgtgcaagcctatgaaattgagcgagtttggtctaatgtgtgctccaataattttttaattggaaaaatatgtaccagatatgaaatgatgtagggatttgatttgtttttgttttatctagtaggagcaaatttatttaggaaaaaatgggagttcctttagaaatcacgtggattagttttatagccttttggcgaaaggtactgttgaacatataaagacttaggctctgttctatttcttcaactccaatttcaacttcctcgttttccgttagcatgcttttcaaactgttaaatgatgctttttaaaaaaaaagtttctagaagttgatttaaaaaagcaaataaatccattttttaaatttataatagttaattaattaatcatgtgctaataaggtttctcattttgcgtgaatccaaaatttatctccatgttgagatctaacggggccttagggtccgtacctacttattggggtttttttttccttttggataggggcaaatgcaggaagcaaaatgagtgggggtcgacagtctacaacttagttagaataggttaatgtatacataaaaatgataggggcatttgcccccacgcgatgtagagggccaaggccccccactgagtatactctaatccgcacaagcatttagcccgattgtcatgaaaaattataccaaattgttgacgttcttccaccttttcccttatggcctggttaagatcctcaaaacaaatctggcattcaaaacttgtgacctcagatgagcactcagcaaggccatatatggtgtagttgtagccatttgctatgagatttttccttcatgtgacaaactttatagacaagttagttgccttacttgtcaaggcaaaaataagtaatagaacaatatagttatattatgggttctaaaaggaaaatgggtcgcaaagtattgctatcttgtctatatttttagaaatattgaaatgaatagtgtgacaagaaattctaagcccacacaagtcgtaaaagatggtagcttccatctttgaagctcaaactatttgcacgttccgtattgcatacataacacaactattgtctgtagtactactaatatcagcacgacaccatccaactgcttatatctcctcttttgtgctattggccatgatcattgcaaacaaatctaggatagatgagaccttaagtggcagtgtcattgataaaaattgcatgtttcgcttgtatatattgtctggtgtgtagtttttgccttcacaatgaatctaaagataattggataatcccgtgacatatccagataatagtagaaatcctagcataaccagtgcaatcgccatcatttcaggtggttgctacacaaatctaaaatcataattaaaagaaagttagttcgacttaaaataatgacaattacatttttcttttaaaatgacatgaagagggacaaactctttctaactattttttaggggagctctttcaattctaaattttgagagtatattctacagttggtcttatcatgaaatgtgtttccattttatttttaaatcaattagatcatggttcgactgatactctccatcataaagcaactcattgtatatggttgttagagaatgaaacctcctcacttggattgtgtcagtcccatttctcttttcaaatccccattttgctgcagccttttagaactttatgctaatctaacatatttgttatgatttgtacatttagaggatcatttgcttggctactttatatttctgttggagttattcactgggctcaatatatctattgcctctcaatgtctggtcatactagctaactctgtgctctatactacggttggacttggtgactttatcatttaatttgatcacgcttttcgaatttctaaatgatatgtttcgtaaataaaatatattatagttaatacttaattaatcatatgctaatcacccgtttcgatttctgttcctagaactacttaaacaaaaaggtattatgaaacaaagccattatttcaaggctcgtacttatggaataactgatacttttgaacagggcaaatgcgataagtaatagggggcatttttttttgcagctataatttcaaggttcagcttcctatttttttgtgcataacacaattaattcattccttcgagtttttcctctcattaacatttgtgttgtactgaaaatgcagattttgttcggttcgcatgcatgctcattgttgctgtggacagagttacatggaaaatggaatacacttactcacttggccagtagctacaagcaagttaatcgatgtttaattttttctatcctcaatcaggatgcattgattggtgataactaattataactagctagcttcagtagtcaccgtagaaagggttggcacttttacatgctaccatcccaataagtatatgctatggctctttgcatgttatacccatatgtgatcaagtacttctatcatgagcagtaacaggagtgttccttagctaaatcagtttttcaataatcattacgttcgttctcttttcagtatgtagtgtttctgaaagactatatataacttacaacttcctagcaaatatattaatcactgaaagttatttacaataatagacaaacatgcatcacaaattctaagccaaattgccacgtggctgttaaaataggtgccggtttttagtttaaagccggcacctatttattgggtcaaaaaaaattgcagtaaattcatccacacaaccccaattccatataaacccaaattcatccctagagccccacatccatacagcacattcattcacattcacattcatcacaacaaataaaaacctacaagccattcatcacaagttcataacatataaaaacctactagcctaagtcaaaattcgtaagtcaaaaaattcttatctttaaatcctaaacatttgcatatataaactaactcaaaatgtgcctagtttaaaattcctaagtcaaaagattgtaagtctaaaatttttaagtccaaaaattcttaagtctaaggctgtgtccggcagcaagttttcccaactcctatctctcgtgttccatgcacacgtttttcaaacggttaaacgatacattttttttgtaaaaagtttctatacggaagtaacttaaagaagtcatattgatctatttttgaagaaaaaaatagttaatacttaagtaatcatgcgctaatagaccgctctattttccgtgcataggatacttgttcccaaccagtcctaacgaactcggcctaaattgtgaacattaatttgcacatatatccttaggtgagaaattcacaagtctaaaattcaaaagtccagacaattgtaagtgtaaattctagacatttgcatataattcacattcatatcctcgagtaaagagcaaatgagatattgctgagactcagcgcaccagtcaacttcagcctgagacgtgcccgtcaaaccacacgaaggcgatgaccagatgtgttacacatcccaggagacttgactaaatcgcttgagctctacaacatctcagaaattcacaagtcaaattcgtaagtccaaaaaattgtaagtgtaaattctagacatttgcttgtaagtgtaaattctagacatttgcatataattcgcattcataatgaatatttacctttaggcttcaatctttaaccaaacacaaaaaaaaaaagagcaaaacctcctcccctcctctagctgatcgggcaagaacgagaggtgccgctctcttcttgctcaatcagctcgagtggcatgggatggagtataagtactattgtcggaacaaaggtgtcggtttagacccaaaaccggcacctttgtcttcctaaccggcatctttgtgttgggcatgaaaagcactattggaacaaatgtaccggttctagaccaaaaaccggtacctttgtcttcccaaccggcatctttgtgtggagcataaaaagcactattggaacaaaaggtgccggttctagaccaaaaaccggcacctttgtcttgtcatagcgtgtcacgcccggaaattcactagtaatttccaaacttatttgtgcataaaactctcgtccaggaatcagccgaggtacacaaactgacaatttaatatacaaatccatcataataatatcgttacatacttataaaagaaatgaaaacaacagcggaattaacggtctagcgatggcttcagctccactcacacaggcagctcaactggggtataagccaaacgtcttattcttctggatcatttttcttcaactaaggttgattgattattgcaaggtgagcatatgacatactccgcaagccgcacagtaaatatgtgcacaaggataccaaaggatggcataatataggctcatttgcaaaagcagcatttagcaaaaatattgagaatgtaaaacaatagagtaattaatcaattttaatcaacactgaacagcacacccatgctgctcaggcccaaccattctgaacaaccatatccagttgtacagatctaactccaaaccaggagctaaacaaattattaccaattatagcatcaataattattgtgagaggtgtgagactaatcacgaaaaacattgctcaacccgcccatgaccgcgggcacggctattcgaatagttttactctggccagaggtgtaccattgtacccacaagatacagccccaaaacatgtcaccatgctctcagtaccaccacggtacctcgaaacggaattgtgacagtacccttcgcacaacaactcatcacagtgcaccattcctggatcataatcaccccctcaataaccagaggcatggactccccagcgacccccacggacttctcgccgcttctcagtctggtgccccgcaatgaatcatgctatacaaaaggtaaagccgttgcccacgctggcttgtggttggcacggttaatgtctcataacagtagctcgcgaaccggtccttaattgttatgagcacgaccttcaaaaccatgtgctcacaaccgccctttgccaagttttaattatcaattaattatcataacacgattaaccatcatgagctaccattaaatataaccataaataataatgtagtatgattcatcccattaatgagctaatgtttctaggcatggctaagcaattatatatatatatatatatatatatatatatatatatatatatatatatatatatatatatatatatatatatatatatatatatagcttttagctgaaccaaaccaatatataaggttcaagctaatcaatttattacccaaggtaacaaggaatagagtaatcaatgcgaattggccattacaaaggaatatgttcacagttgaaataaatacacagttgaaataaatagagaatttaaatataggatcaacatgctcaaaggaactgtgtttaggatctgtgtgacttgccttgcaataatcggtcttcaattagtcttcagaaccacttccgacgcactcgcgaacctttcgcaacgacggaaacaacaagctaacacgcaaaatgggaaaaaagactaataaaaaccaaataaacagtacataaaagtaaacaaacatgtagatcatgattttagataattttagatgaattccaattaaacctattaaagaaaatactattccaaattaattaaaccatttacaaatgatttataactgagagaaaagattaaaacaacctttgaaaaagattagattatatttggtagatgacatatagtaaaaagaaataatatgccattgaaaagagagaacggatagaagtctcaccgaaccaaagtgatcggagacgaagggatgatgacaacgttccagcagcaacacacggagatgacaacgctagaccaaccacggattagattatattggattaagaccctagggataaactacaccggtgaacgacataagagcggcggttgccggcgaaccacgacacaataatgcaaacagagggcaccgggaggtagaggaggcgacggcgattcttaccaacccttacgtgatgacggacagcgacggaagacggccggcgactctggacaacagcggcgacgaccaacggtgatgctccaacggaaacaaagggcacaggaaggaataggaggacacagcgaactcacctgtggtggcggcaacgagaaacagcgacgggagatggccggcgacaagctccaaaaggcgacgaggtactgtccacggtggcgacggcgtttcggcgaccttcggcgacaatggaagggtggccgggcttcacttcgcagctgcgaatccaatggacttcgggttgatggcgacgacgggcttcccggggtcttcggcgcaagggaaccagctgctgggcttgctcttgaccttgcggagccgagagatgtggtggcacaggagggcgtcggctgaggcggcggcaaacggcggctggagcggctgccggcggcggagagagaagacgaacgcggcgacggcgctacaagcgacggtggagagagggagaggtggcggccgaaagaggagagggaggggacactatttatagccacgggagagagagatcaggcttggaacgcaaagaatcgcgccgggaaaacctagggtttggtggagagataaactcgaaaacgaatccaaattcgcgtcgaattcaaagggataaagtcggatttttggtggaagagatagaggaggataagaggaatatttcccctcaactaattttaggaatgcacgagagataaggccggattcggaggagaaaaaccgagccaactcggtctcagtttggcagccaggggttgaagatgaacagtactagggacgtaaggtagactttctctgtgagcttcctttactaggccggattgaaggagggaccaaaaatggactttggaggagggatcaggccagccgaaaggaagggagaatgagccgaggactaaaggtgaacttttccagtttcagcctgaaaaggaaaaagggattttaattacttttccaattaaattaatcactgaaatgatctttgaattgttaaaaatacttccaatgctcaaataatttcaagaaaaatcctgaaaatacttggacacccaaagtacttaacaagattataataagaccatttaatgattaatttaatatgtggataattactgaaatgttctttatattattaaaattaggaattgagctccgaaaaatctgagaaaatttcagggagtataattaatcatggagaattaaataaaaattaaatcccgccatgatttatatttagaaaattttatttcctatatttaacttcacttgtaaattaatgaacatttaatataaattctaataataatttattaaataatttataaatcctaaaacgaaaatcaggatgtgacatagcagctagtgtgggagggagaatattaaaggtgccggtttttggtcgagaaccgacacctttgtcttgtcataccaagaaccggtacccttgtgtagggcccaccgtcgttcataaaagcactattgaaacaaaggtgccggttttgggttgagaaccggcacctatgtatggggcccgccaacggctagtgggggagggagaagattaaaggtgccggttttgggtctagaaccggcacatttctctgacataggttttagttgtcggttttatttaaaaaccggcacatatttggacataaaggtgtcggtgttttgtgtgccggcacctatagtggcgacatctatttgccttttttaagtagtgctcgggctagatgtgacatattctagtacaatgaatgttcaaatttgtagtactgtactagaatgtgtcacatccagtattacgttagtttttatggaacggaaggagtataccatatcattttatt

SEQ ID NO: 9932 - DNA, 9671 bp, Oryza sativa
attttgatcatttgtctatataactttgtttccaacagcttgaaattgattttgataatatgacaaatctaaacagcatttgtaaatattaaatgatttcaaatggaaaagccataaacagctaacttgtacagattatcaagatctacaacttttattttggtcacttcttcatccgacaaagtgatagtaccaatgtttacaaaattgacatatctgtgttgatatctataaaccagatgagagaaatgtgatttttgtgaatagtataactatcactttgtcggatgaagaagtgactaaaataaaagttgtagatcttgatgagaggatcaactttgttgttgaccatatttccatttgaaatcatgtagtatttacaaatgctgtttagatttgtcatattgtcaaaatcaatttcaagctattagaaacaaagttatatagacaaatgaccaaaataaaagttgtagatcctgatgagaggatcaactttgtttttgaccatatttccatttgaaatcatttagtatttacaaatgctatttagatttattatattgtcaaaatcaatttcaagctgttggaaacaaagttatatagacaaatgaccaaaataaaagttgtagatcttgataacctctacaattttgttgttgaccatatttcgatttgaaatcatttactatccaaaaatgtattatgactaacaaaatgaattattatacaccagctatatttttgtactcacaaatataaagacttgaatggaaaaatggaaaaatagtcatcggtgacgggccttagttaaagcccgatagagattaatctatctctatcgggcattatcttagggcccgtcacagatgagtcatccgtgacgggcctgaatgtcatctcaatcgggcattagtatggagcccgtcaccgatgagtcatctgtgacgggccctaccgtaaagcccgattgagatgactcatcactctactataactagggtttctcagatcggatcgaaaatttttctaagtcccgctacactttcctgcctacttagaaccctagcgccgccgtcgtcctccctcgccaagcctgccgccgtcgccaccgagcccgccgccaccgccgtcgtcctccctcgccgaacctgccgccgttgccaccgacgccgaggccaaggccgccgcctccctcgctgagcccgcgtccgccaccaccgagcctcctcggccctccattcggaccaccgccgcctcctcaccgacgacccccaccgagcccgccgccgccactaccgagcctctacaccgaccagaccggtgttggccttcctcatcgtcgccgcccgcgtcctcaccgacgcacgtcgccgacccccaccgagcccgacgccacccgaccggcgtctccaccgaccggcgccgccctccaccgagcccaccgccgccgccgcgaactcctcctttgccgagcccgccgccgccgccaccgagaccgctgcctccaccgagcccgacgccgcctccaccgaccggcgacgccgtccaccgagcccggctccgccgccaccgagccccaccggccatcctcaggtgagtactccatcgcgccgtcctctgctaactgtgaatgacatgtcattgaaatgtggatgtggatgatatgtgattgaactgtgagtgagacatgtcgatgttgggatgaaatgtggtgcatttatgaattttgtgatagatgattgtagtgattgatgaaatgtatttcatttaactttatttatatgcaatgtggttcatgttgggatgaaatgtggtttatttatgttgggatgaaatgtggtttttttatgttgggataaaatgtggtttatttatgtttgggatgaaatgtggtgcattaatgaaattattgtgaaatgtggttaattttattactgtgagatgtgcaatttcgtttatttatacgtggtgcattaatgaatttagtaaatagatgaaatgtggttcgttttattactgtgagatgcgcaattttgtttatttatatgtttcatttatttttataagtgacattcaattcattgtaatagattgtagcactcaattgtgtatttttgttattttgaaaaaaagtagacgatgtctcagcaaggcgaaccaatgtcgacgacaactagtgggtcctcaagggcacgtactcctaggacaggaaacaaaatccctaaggaacggttccgcataatagcggtggatgccgtagggttgtcgacatctccaaggaaaatatggagccgatttaggtctatctgcggggtcatagggaggcaaaaattcagtattctgcaagatgacatcaagctcgtgccggccgcagagaaggacattgcttggctaacgtttaaggagagcttcgattatcctgcggagcatgaggaccgtcttaggcgggctgctttcaaggttatgggcaatgcttggaagaacttcaagactaagctagtcggcgagttcgtctacaacccgacgaatccagatccaagagagaaattttcttggatcatggaacaggtctgggtggaattccatgcgaagaagtcgacccccgagtccagagctagaagcgaggcatatcacttgctccagaccaggaaccagcatccacaccggcttggcaccgccggatatgccggtaaggaaaaggaatggccgcgtgaggatgaagaagcggaggaatcgaacacgccactcgtgtttggtgatatcccacaccctcgggctaggaactgggccagggccaggtaccagaagaatgatgatggcacaatcttcatgccaaatgcagaagatcaacgagtgtacgaagctatagtaagtatctagtcaaactagatgtttgcattgtttcccatcgtgcagtttatttaaccccactaaattgtaatgcagaaggagttggttgccgagcaacaaccctcgcaagaggcctgctctcaaagacgcgaggacgacctcctcacgaaagtgttgggcaacaaggaacaccgtggacggacacgaggcgttgggtcttctgttccctggaagtatggatttccatactacgcgtggcagtacaagaagcggacttccaacaaggcggagaaagatgcatggcttgaagccaatatccgggcgtcgataagagctgagctgacatctgaattcgacgaaaagctcgagtcaatgaggaccaagattaggcaagagatccgagaagagcaacagaacccccaggccaccgctgctgcggcgcacgaagagttaggaagtcccacccaaaaacgcagcagttgcgcatcaactgagttggcggaaaatccaacatcggtcgacagcaccgtcgaccacataatggtaaaagtgaacttactcaatacatgaaagacttaacgaatccatattatatgtaatattctaaaaaaattgattaatctatcgcaggaaccaacgagctgcaccctcatagttagggtgatgccgaccttcacggttctagcagccgagggacttgcgtacaagccgaccccaaagacaagagtgcatggagcgcaactcagggccgactgtgcaaaagttcaagtcgactcggtgaagcccaaatacgagctgttccctctgaagtatccaccgaacgacgaggtcctctcactaggaaatgcccgtggtaccttcatccaatggcccaaggacctcattgagatcagggttacagcgaggccaaacactgcaccaggcggtcgtctaccaaagagacccacccctgctccttcagcccctcctgctcaagatcgtcatgcacaatcttacgatgtgcagttgcagtacgacacggattttggggaggaccgaacggaggccgacagcaaggcaattcatgaacccccaccgatgaagaagagcaggaaggcacactcttcccctcagagaattactctcgataaacccgaagcaaagaggagaggaaggggaggaaaggtgcaggcctcgcttctagctccaaggaagctagatctgggcaagggccaggaagagactaagggcaaagaggtcaagaagaaatatgtcgctccacaggagttccgactaggcatgccattggttggagatgacgtgcttgccgcaatgggcaccgcttgcaaggaccttcacttatactacatggagaaatctaacgccaggaagccgaataaagccaccgatatccttggagagcacgatggaaagccattccttggtccaacaaattatatcatggtcaacttcaaggatcttttcgacctctacaggctccgagcggtggacacaagcctcttaagtgctactccttgtaagtattgtcgcccaactcaatctggtaataacaatcggtttaactttcttacaagatcgtttatcctgtgtgtaggttaagttggcaatggtgtcagaagcatgcaccggaaattgccttccttgatccacaagtggtcattgtcacaaatctccagaatgaccgtcaaggaatggtcaactacatctatgacaccttatggtcccgccgagacaaggagtacattatgtgcacctataatcaatagtcatgacacattccttgagtacttaattaactttcactatattaatgccgcagtgcccattggatccttctggtcataacacctaagtggagtacatgtcactacctgaactccagaattgataagaacgcatatgatttgaccccaattcaactagcgatagatgaagcgtgggcccaatacgtgcaaagaggaggcctcaggaagataggacatgacaccctcatccacaaaaaagacttcccggtgaagcaacaaataggtgaccagtgcggattccatgtgtgccacaacatgcgccttctgtatagagaaaaggtgaagaccttggctgagtttgaggtcggtggtctcaattatgatagactaactacattttagtacttatatatgatcaatcaactaatctggaattatgacaatgtagggcacaataaccaagtctctgcctaccagctttgggaggttcacgaggagatagccagcttcatcctccatgaaatagttaaccccaaaggaatgtttaggcttaaactaaaatgatgaacaatgttgaacttctatgtttaggcaatgatgaacacttattatgcaattgtgatgatgtaactgtgatgcttatatttatgtatatatttcatatgtttatgttaaaacttgctaaataaatatttgatctaattaactcggttttgcaggtgaaatatgataaatatttgaatggatgtgaaatatgtgaatggatgtgaaatatgagatggctgtgaatgtgtggttgcgtgaaatatgttgatgtctgtgtatgtgaatgcatatgtatatgaatgggtgatgctggggagctggggatattagatatctgtgtttgtttctgtcatttttgcagcgggtatggctagcaaaggcctgaggctagccaaaaaacaaaatttattttttttgtggattatagtcatctgtgacgggccataactaaatgcccgattgagatgaggtcatctgtggcgggctctattttaggcccgattgaggtcagtagtcatctgtgacgagctctagtttaggcccgattgaggtcagtagtcatctgtgacgggctctattttaggcccgattgaggtcatcagtcatctgtgacgggctatagtttaggctcgattgagatgagtatcatctgtgacgggctctagtttaggcccgataaaggttagtagtcatctgtgacgggcgctagttgtggcccgatagagataggtcatctgtgacgggctatagtttgactggtcgtctgggtcaaagctatcggtgacgggctttacttagggtccgattaagatatattcattcgtgacggccgtttgcctgattgagataactcttcacatcagtgacttctagcctgtgacggacgctgtgcccgattgagatggggcttaccgcccgattgagatgagggtatcctttctagtgtctctgtagaaatatatatatggatctagttatttgagatatgtcagatctatgtgtgtggatgagatatgtcagatctatgtgtgtagatgatgctatatgggagtgcaatctgtgggagtgttcaaaaattattttgctttggtcgatttcattaacaaatgtcaaaggtttctcaaagtttttagaattttggatcaaactgtaacaagttttagaaataagcctaaggatgatgatgtttggttggatgtatcattttcgacatggtgcatcgaggaatgattcaaatacacagaaatgaacacggctgcgatagagctctagatttaagttactagggatcaaattttagctttcctaaatcaagttcatgcatttttagttttaggacagcaagattgaaagatattcctatgactgttatggttattgagtttgatattagagatggttcgaggtctctaaattcttgcatgattgaagctaacctatcatactaccccccttaaaatttaaaagttttagcaagcaggattgtggtatggaagatgaacaagctaggtggtttcaggtctgtcctaggtgtcaatctgctgaaaatagaagttaatgaccaacctagaaggcttgtaaattcaaataaaatttatattcaggttgcttacaaagttttctatgttctgggaaggaattgtgatttttggacaagtactttattttattcaaaaagaagaagacagatgatgcagttctggaacaggttattatctatggttgttgaatttttatctcttaatctacaggtgtaaaaatcccacgaaaaatcatgaaactttcctgacaagaatacaagttactgaccaaaggttttcattttatcatttatggtttaggagatataaaattgttaagtatgcaacctacagatttcagaacctgactatgcagactatatgaatttttacaccttgatgcagaggttcaaaaattctaccaaaattcatgatgcttcatatggtagtacactaactactgctaaaagatggcatgcttatcacttatggtttgggctacaaaatttcgtgaaagttgctggctataaatttcagaacacgtgcaactaatgcatttgaatttctatagcatgttttaagtttgataaattaaccattccatcataacatgaaaccaacaagattcagaggctataagatttttgggtggtccatctaagcattcaatctagtggtcataacacaacaattccatcctaccccaaatctacccattcaaggtcataacgaaattttgaaatgctgggatagaagagcataaaaaacccatcaaatttcaccatggtacagaagtaacatgtttatgtgatacaacctaacatgtctatcaaattttaatttatttaatcaacttcaaaacctacactctatatgccattccaaaacccgagatttttgcaaaaccgttctaatacataggagaattttgcaaatagattttaaaacttttcaaaacactttggtactgatctattgcgattaataagcgttttcaaactcatttttacagaaatataagctttcaaaaggtttcggtcctatggaacaagataaggagttttagaaatcaaaacatgagacatagggaaataatatccagagagggataagatataaggttaaatatgattttcgcaaataatttgtagctgagagcaaagccctcaaaataatttttttaagaatcaattctaaacgaccaacttaaaggggctcctatagtcggtatttgctctgataccatgctgtcgtaggctctccggaccttctattataattgggagataaagtgaataattcaagtcatcgagcaatcataatgaaacatccgacgcctcgagagaggaatattggagacattgctgggcctttagcctgccagtcaacttcagcctgagatgtgcccgtcaaaccactcgaaggcggcgaccatatgtgttacacattcaggagacttgacaaaaatggctaaagagctacaacatctcaaatattcctaactcatactcatgtgaatctagttcccaggaagtgcactagattcacactttcatcttaagtatgaatatacatagcaagatacatctaaagcaaataaaactcagattacaactaataaatagatacataggccgaccggccaaatataactatatcagagaacagcggaagcttgactacccaatcctcaagcacaccgactaggggtttaccccattaagttcacatcctagaagaagcagtcgaaacccgcatcactcaaattaaactaagcctattcctgcaaaacataaattagacaaaacatggcagagcactatcaaacctacatacatgaaagctctatgtcaaaggaaaggctatttgtagtctcaattttcagcataaagcaaattttagttcacaaaccatttgcaacgtaatttaagcaaaacattttagcaaattgtgaagcatattaatcatggcatgatatcaacataaatagatagacatcattcccttacaacacaacgggaagtaaggcaatcatatcacatatatcaatcttatcatcaactcaaatcatttagtttcagaaaaagtacgaattaccgccccccccaaactatcgcggccgtccaaattacccccctgaaccacaaaaccggacattcttcacccctaactatgcaaaccggacgaattactcccctcgacctaatccacggtggttttggtctacgtggcgtacgcgtggaagtccagtcagcaatttatttattgaaaaatactgggacccacctgtcatactcctattgcacttttccccctctctctctcctctctctcactcttcctctctctcttctctcactctctcacgcgcacgcgcacaacagcaggcggggggtggcgagcggcggcggggtgtggtggcagcggcgaggcgaggcggcggtggaggaggtgaggcggcggcggaggagacgaggcgaggttgtcccatgggttttttctggttgtctcatgctctcacgattggtcagtgtgtgtcgtgttcgatcgatctacatgtacagatgatcgatcaatcttcgaatcgatcgccgtgtttttgttgtgtttggtgatgagatgatggttaagtggtatggttagtgtgcgctaatggcggtggtttggtttgggggtggttgtgtgtgtgtggttgcagggtggagagcttcatagagcaacaggatgcgtgtaactctggacgggtgcgcggcgaggccgtgcccgtggtgacgacgctgccggtcatccgtcacgcagcgctgcggcatcatcatcatcatctgccgccgccgccgcctgagcagcagctcctcccggcgtccaccacggcaccgttggccgccgcgttctcgtccaactccacgaccaccacgaccaccgtctcctcctcccacgagcaacacgccaacacgcgattacgatgaagctgcagctctccatcggccccgccgtcgtcattgtcacggcg

SEQ ID NO: 9933 - DNA, 32046 bp, Oryza sativa
cgctccccgccccccgcttgcctgtgtgcgcgtgagacagagagtgagagaagagagagaggaaaagtgagagagagaagggagagaggaaaagtgcaataggagtatgacaggtggggcccacctattttttaataaataaattgctgactggactgccacgcgtacgccatgtagaccaaaaccaccactgattgggtcgaggggggtaattcgtccggtttgcatagttgggggtgaagaatgtccggttttgtggttcaggggggtaattcggacgaccgcaatagttcgggggggtaattcgtactttttcctttagtttcaaaagcatttagaaatcacaaaattatacccatagcacatcatcatgtcgctcatgaccatgagcacggctaatcgattagtttttagaactctgtagagtttgtacagctttacccacaagatatgaacaacactctagtttgttttgtgctcgcgatgcaccaccacactctatacgttgagtgcggtctagaggtcataacgaagcctttacactacttagaatctagccttgcaccagcacgatacgtgttcctccatcttaggtatacttggaaatatgtctagaaccgttaagtggcgggcccacgccttaaacttaatgccgtggtggcggacacgacgggaacccaccacgtggcacaataccgttgtattggacagacttagacgcccatgccgtgaggtggatcagtacacccctcacggaacacacacacacacatagggaatgtatcatcctatgatcatcacaaacacacactcatgggtagttcctctaagttatcgacaaaattctcagaattatcgactaactcatacacaccggcctaccagaatgcaaggctagtcctaaatagattaatcagcttaggccatcccatactagcacatgtggatgtacggtaaacataatgggtgatatgttcggtccttaatcgactcgggcgaatactccccctatcagtatgcaactaccaccatatgcataccacatgccgctcaagtctaaaaatcacatttcatctcattttatttcacaaatatccagcgaacacatcgctgcccatatcacataaaaaggttttccaaatagtataataagtgattccatagccatgtttttatttattactaagcaaggctaagcattagcattttataaaagcttaacttagctatatgagcacaataaaagtactctaattattcctaaggttcaaaacagcaagggagtgattttcaaaagggttcatgcaaattttttttttttttggtcatatctacaatccagtttcgatagttcgaattacgcatgcaacttttacaatcaaaacatttagcccgaaaacatgggattcaatgtgttcaaaggaagggcaacacttgccttggttgatataagaccttcttgagatcagctataagaccaatcacctcaccggtaacgaattcaccgtctaaaagaaataacggtaacgataaatgccaaaacatgtaaaaatctaaaatgctctaaaatgcatgagtttactagtgtggttaggtactggtctaagatgaatttagatgaaagaatttatattttatcactttgcattagagagttataaattttcaagatgtaatactagcactagattaattaagctctaatagttcttaggtgcattttaggtctatgatttatgaattgttggcttgctgcagtgaaggggatgttctcaggtgttcaacaaaattggtttcacatttttgtagagttgggatgattttactatgaattttacaagctaagtgatttattatagtagttgttaactatttcaaattttagacaagttttgggtactgaaagtgtcatattttattttataaaaactaaggtcatggttcttataacctaacaaactttgagatctcttcctttagactggtattaaattttatatgaattctagaagtttctataccatcttttaattttaattcattattcaaatttgagtgatgtttttggatatggtttcttctacagatttatctacagaacaaatgtatatgcttttatcaaactaacaaattttagttcatctcatttggagttaaaataaatcacttatgggttttatagtttctagattacactatactagttattttaccaattaaatagttggtgattattttaatacagaaagtatcaagttttagttcatgtaaattaagaacatggttttgtgagaatactggagcttggttcactccaaattaagttaagatgaattttatatgaattttctaagttggagattgctctatgttcattatttcttatgtgaattattagagctatttattctactgcaagtgccaagttttatgtttccatattaaggttcataactggtgattctacagaaatttatttcatccagattggagctaaaatgaattttatatgcaatttacaatttaacctatttttctgttgattagatattcactaaggcattttccttatatttttccagattttaaacacatagggcccactggtcagtgagagatattttgcagaaagattcctagaggttctagtaataggtcccgaggtccctagcacgttttaattgaatcttcattaagagttcttgagttttaatctatttacatgcatgttcttgggtccacatgtcattgtaaggttatttgaagttacaaccttaccagatctaaacattcagtaatgaaagtccttagtgcctaatccaactggacccacatgtcagctagcctgagaggaggaggacagagcagcggcgacagcagcggcttcacagcgtagccggcggtgaacggtggcagatttcacgatgcgaccagaatagaaaatgcagagtggaacatggcgaagctaatggtggtggtttcgctggctgcggtggtcggtgtcagcgatggtggcagcgcgagcggcggtgagcttcggcatgcatgtgcatgtcgagctcggtgtgaatgagtgtatgcatgtgcctctacggggttgctggaagcttactgtgggttggacatgcgccggtaacgcttgaatggcgacgacggcgtgaaggatgctccggcgacggcaagaaacggcatggcaacggcgtcgacccccttccagactccggactgccaagaagagaagtggaacggctcaacgacaatctaaggatgctacacgaacgaggaactgcgccgaagctcacccgagagcgaggaacggacgacgttggccggcggccggacttgaggaagaaagagaggatctccttgttggctgctcttcagcgcgattcccttcgcaggccttatcctagaaccttggcgacgctcatggcgcagcggctaggtcggagatgcaccggatcatcgggaacggcgaagcgaccgacggcggcgctctggacaccgaggacgccgacgagctcgacggaatgtgtttgatccatggaaaggatctatagatcacgttcttatgattagattgtggcgaagctcaccagagaagacatacagcggatcaaacaccttcgggaaggatgaacaagtgggtgttctcggaaattccgagggagttttctctaagttcttccttggaacatgatgaggaaagtgggatgagttatctggtgaagtggttaatcaaagaatggatgttgtgctggcaatggagagataggtggcatgatatggctttgacacgatttttggagagaggatcgagtttagggctgagattcagcttgtacttcagttaacctagtatgagtggctgtctagtggccccatatagatgtttcccagaagaaatgggaggtatggtgagttcttcggtgaaacttggactctaactctctttctcccccactctctctctctttgatgaagtatatatagattataaatgagtgatcacatgagtagatggctggtacatgggtgacaaatgggcccatgtagatatactctaggtttatatgtgtggtaaggtaggtgagaattgtatttttaactctcctctcaccttttgagaaatgaaatataaattaattgagaggtgtgaagatgatgggttgaccgtgtgttaacagtgaaaattggtaatcgacaaaggcgtcatcggcttagaatcattatcggctgcagcatctcggaatcagccgatgggagttatcaagtcgccaatagtcggattcctgctatattcggttaaggaaatcaatctactaaaggaagcttatccctaagtgaccgagtttaaagaggatgcggcatggcagtttatctattaattaggaatagtttgttagtttccttttatctttagaaaagtgtgtttagtgtccgataaggactttatgttttccttttatctttaggttagtttctttcttgtccgataaggacttgtatcaacccatgggtataaatatgtacacccggggtctatataatctatcttcacgatcaatacaattcggtgcattgccaccttttaccttttctactttattttatcatccggcgggacttggcacctgacgcggggctgcatcgatgttcgatctccggcgaaggggtaagtccaatgttccatcggcctaggcaattgtctcatctacgtcagcgtcgttcaagactgcatcagtacattcgacctcttggattgctctggtttggacatctaccaccctgaaaatcagtcaacggcttgattgcctaggtattgtcagccgatgggattatatgaccagcaggaagttgaatttgcttctctcggagtagtagatcaaagatcttgtcagctttagtcatatcaaagtcatacttctcctcttttccagaactttttacccattgacatggtatgacctttttactcctcatctattcggctgcagctatttcagaatcgtcctcatcatcatccgacccatacatgtacagacaaacatgattaaccttcttagagcttttcctaacttctgcagatctatgctcatgcaaggttaccttctatcacagcctgaatttccgttttaggatttataaattatttaataaattattaatataatttatattaaatgttcattaatttacaagtgaagttaaatgtgggaaataaaatttcctaaatataaagcatggatagatttaatttgtattaagttctccatgattaattatactctctgaaattttctaagatttttcggagctcaattcctaattttaataatacaaagaacatttcagtaattattcacatattaaattaatcattaaatgagctggtttcaattttaataaatactctgagtgttcaagtatgttcaagatttttcttggaattatttgagcattggaagtatttttaacaattgaaagatcatctcattggttaatttattttgaaaagtaataataatcctcttcctagtcttgggccgaattcagcccattccattctctcctctcagcccgcagagaagtctgtttgacttccctggcgctacagtactctatcttcaacctccagacagagaccgagccgtcccaagcctgtgcagccgtgccgcctcctcccaccaatccggccacctcgttgctcctttttccaaattagttgcggcaatggaatcctctcaatctcctcttccttttccccaagaaatccccaaaagtttctatggaaatcctttccaatttcgcggttcaatctttccttactccggcgagaaccctagactttcccgagatttcccgtcgatttgggctcggacccgagctcccgtgcctatataaatgaccccctagtcgtcctctacctatcccctcatgtctcatcttccgccgtcgtcggaatcgccctccccgcgagctccttctctctccgccgccgatagccgttccagccgccgtgcgccgtcgcctcggccgtcgccgatcagcgccaccacctcccgcggctccgcaaagtcgagctctatcccggccgctggttcttttgcgccaaatccaaccggagattggccgtcatcgtgaaccggagcgccgccgtcgccgccgtgcctccagccgcgccgttcgtcgtcgtccgtcgtcaccttcggtcgccgtcgtctccatttgattcgcagctgcgaggagaagcccgtccgccatctgtcatccgccgaagatcgccggaaagtcgtcgccggccatctccttcgccgttcatcgctgcgtaagtattggtaagcatcgctgttgcctcctctttctcccgttgccctccatttgcattattgtaccgtggttcgccggcaaccgccgctcctatgccattcaccggtgtactttatctctagggtcttaattcaatctaatccgttgtttgtctagcatcgtcgtcgtctccatgtgttgccgccggatcaccgtagtcatctctctctccgatcgctttggttcggtgagacttctatccgtgttccctcggtttagtttttaatctctcgtttttgtcatcgagtagccgccaccgtgccacgcttagctgctgccctagcgtcgccactgcgctagccacctagccgtcgctgtgccgctccctgctacagccatgctgctgctgctcgtgcatgccaagtcgctgccgtcccactaccatagccacagtctgccgtcgttgtgtgtcgtcgtcgctgtgccgtcatcctaaccctagccgcgtgcctccgccgagtcgccgccgcctagctgagccaagtcaccctagtaccgccatgtcgcagctgtgtgccgctttaacctagccgccgctttagccgttgctcggtagccaagttgtttagccgttggtgcatcccttaattcctaccggcctatcgtttgccgtaccggggctttaccgtgaatcgtgtctagctcaccggtttagtcgcaaccgttgttgagtcgttcgctcgttcgttcgaacgaggtgtcccccatgtttcgttcgttcgtccgtgtggagtcatcctttagtttagagccgttcagagcagccggttccgttcgccagtttcggttgatcatttgggtgatcccgtgtcacgtagaattgactcgttgagtcggtatctcgtgaggcccgcttgccagatcaatctaagccatccgatcttggtcaactctcgatcaagattaatctcagccgtccaaaatcaatataaatccgttctctcttttcagtggcatattatttctttttaatatatgtcatctaccaaatatgatctaatctttttccagaggttgttttaatctttatctcagttataaatcatttctaaattgtttaattaatttagaatagtattttctttaataggtttaattggaattaaatcttgtaaaatttgtaactaattcatatgaaattagaatgaggccgttcaagtctcataattcatctaaaatcatgatctacatgtttctttactttatatgtactatttatttggagtttcttagtctttttcttcgttttgcgtgttagcttgtcgtttccgtcgttgcgaaggttcgcgagtgcgtcggaagtattccagaagatttattgaagaccgaatattgcaaggcaagtcacacagatcccaaacataatttctttgagcatgttgatcctatatttaaattctctatttatttcaattgtgcatttattttcgaatgtcaccgggtggtgtgaacctattcctttgttatgaccactttgcattgcttactctattctttgataccttgggtgacaatttgactaattggacttatatattggttcagctagatattagatataattgcttagccatgcttacaaacattagcacatgattgggataactaatgttccgctatcacttaatgatggatatttaattgtagctcacgatggctaattgtgattggttaattaattaatgtgccaactaaaacttgataatggtgggttgtgagcacatggttttgatggtcgtgctcatgacaattaaggaccggttcatgagtttcggttgtgaaacattaaccatgccaaccacaagtcagcgtgggcaacggctttaccttttgtatagcatggttcattgcggggcaccaaactgaaaagtggcggagataagcccacgggggtcgctggggagtccatgccttgtctataagggggtgattatgatccaggaacggtgcactgtggtggattgtgttatgcgaggggtactgtcacagctcctttccgaggtaccgtggtggcattgagccgcatggtgacatgttgtggggctgtgtcttgtgggtacagtggtacacctctagctagagtaaaactattcgaatagccatgcccgtggttatgggcgggtctaacaatgtctttcgtgattagtctcacacttctcaccgtaataaatgatgctataattggtaataatttgattagctcctggtttggaatggcacattcctggtttggagatagatctgtacagccgggtatggttgttcaggatggttgggcctgtgcagcatgggtgtgctgttcagtgttgattaatattgatgattaattactctactgttttacaattctcaaatgtttgataaatgctgcttttgcaaatgagccatatattatgccattctttggtatccttgtgcacttgcatacttgctgtgtggcttgctgagtatgtcatatgttcaccttgcaataaacaatcaaacctcagttgaagacaagttgcgaaggagaagacgtttggcttataccccagtttagctgcctgtgggagtggagccggagcttcgctagaccgtaattccgctgctgttttctcttttcttttgtaagtatgtaacgttgatgaatctgtatattaaattgtcagtttgtgtacctcggctgattcctggacaaggatttaatgcacaaataagttcggaaattactagtgaatttctgggtgtgacaccttctgtatcagatgtgacaagctatcaaagtcttcagacgagaatttctccctaatcggagcaatcataccttgaaaggccagatcggctaactgggcatcagttaaactcaagctgaagtatttgttcctcatctccttgaatctctgaatatactcgtgcacaggttcatcatgccgctgcttaaacgctgtcaagtcagataatttcatctcatgaaccccactgtaaaaatagctgtggaattgcttctccaaatcggcccaactattgatcgatccatacggcaaagaggaaaaccaagtaaaagtcgattcagacaaagataatcggaataacctaaccttcagagtgtctacagccgatgcttcaccacactgagctaagaatcggctaatgtgctcataagttgacacaccatcttgtcccaaaaatttggagaagtccggaactttgaaccgattgggaagaggaactctctcaaaccactcagggtaaggctgccgatacaagcttctagtctcttttggtttaagcccaaactgttccctcattacgtcagcaatcacatcggcccacgaccgttgctgagctgccccttgttgctgcatgggctcgaactgaccgtattgagacgcaaactgaggttgagccaatccccctggctgatattgggcttgcggggaaggaggctgatattgataattcaagttacccccttggtaattatgaaggttcggctggatattacgtaccaagtgctcaggaacaacttgaggcattactgtgccatccggctgtacgtggtgaaccaagtgttcttggacaacttgatttaaaaattgttgtacgggctgaccaccaggcgttgcaaacccggccgatgcgcttattgaaccttggtgctggatcaactgaacgatttgctgtcttaacagcgtctgctgaatcggctgtagaggctgctgccttggtggtgtttgctgaactggttgcatgacctgttgctggattggttgtacaacctgctgagttgggggtgtctgctgaatcggctgctgctgtattggatcaacaacaggttgacgtggcagaaacgtggcagcaacctaatcttgggtcagccgattcgcaacctgcccactatgctgtggatgctctctcattaacaaccgagggttcaccggctggcctggcgccatcgctgatggagcaggtaggggagttgatgtcggcgtcgttggctgagttgttggtgcaacggagggaaccgcctgaatagatggctggacatcggtgatcaaagaccgataatttgggaagacaccttgcaaataaactgggcctgcagcctgatgctcagctattgaaccatcggctattgacttcatcatgtttgataaggtattgactaacaccctagattgattgatcaaagcatgatgcacagcgtagtcaacccggtcttggaaattactgaaaaaatcttatgccgcatcactattctgattaagatttcctccttgcaacccttgggcaccatcaccttgcattccatggactccttgagaattgtcgccttgatttcctagagagacgtcggtagcacctttgttactcggctgagccgagtcgtctagagcttgtttcccatctccatccttagaagaactggtcccaggatcatcagcaaccacttttattttgtacttctgaacaagtgtccccttgcgggtctgcatgaatgagttcaagaactgatcccatgcttgctgcaacattgcttcaaactctttcttctgctcaggtgtgaatttttctggatcgatcggcacgacgtttccttcattgacgtcagtcgatcctaatttcagcatcttttccttaacagagcctgggctagctggagatagtggtggtggttgtttctcggccatgaggaagaattgttcatgccaatctgtgttgacgaaaaaatcgaacacatcggcctgggagatctgcttagctcctgtgcaggtccaaatcttgatgagatgcgggcgtgccagtcagtttgatcctgcaactgacaagatatgtaaacaacagataaaatagccgatcggctgacaagccgatggagtagttccagccggtagccgataatagccgatgctgataccagccgatagcgatagggtttaagcaatcggctatacgtccaatgtagattctaacactttagtaaataatgatatatagacaatcggctactgataataaaatataacaataatatagtccagtataaaccaatcggctagtattgatataatagaataagcattgatccgaaggttaaagcacacatcggctggtggtccgatgtcatgaaatccacgagattagattaaacagtgaaacctttgttgtcatcggctaaatccaacttatatgtatatgcaatccttatgagccgatgcaacgtccagataactcaccggctgaaaccctgatgaaacccttattggcagtcaaaaagcatgctagagattacggttctaagcatgacttagtaggtcaaacttaactgatgcagcactaagtatgaaaagaaacacaatatctagacaatcaagccgttgactgattttcagggtagtagatgtctaagctaatctaatctagcaacgcgatttagccgataccggcagaaaccctaaaacgagaagcagccgataaagctaaattgatatgctaagactagattaacagagacatatgataaatgggtaggcaaatatatcatccaaaccagagcaatctaagaggtcgaatgtactgatgcagccttgaacgacgccgacgtagatgatacaattgcctagaccgacggaacattggacttatcccttcgctggagatcgaagacgatgcagccccgcgtcgagtgccaagttccgccggaatgtaaaaacaaaagtagaagtaaaaagggtggcgatgcgccgaattgtattgaccgtgaagatagattacatagaccccgggtgtacatatttatacccatgggttgatacaagtcattgtcggacaagaaagaaactttcctaaagataaaaggaaaagataaagtccttataggacactaaatacacttttctaaagataaaaggaaactaacaaactattcttaattaatagataacttgccatgccgtattctctttgaactcggtctcttctagataagtttcctttagtagatcaatttccttaaccgaatatagcaggaatccgactattggcgacttgataactcccatcggctgattccgagatgccgtagccaatagtgactctaagccgatgatgactttgggcttaccaaatttcactgtcaacaccgtggtgaggatgacacatgggtcccacaatggcttggccccatatgtaagagagatgtagaagaagaggcctagaacatgtagtttatttccctactcctctcttccttttaaattagaattttagggagacaaggttgctgcaaggtagacaatgatttgatggttcaatgtgccaagttccaagattaaattactttttgagttactatggtaatttagtaaagaggtctaaattactatgttgactgcagtctaaatattgtttaagcaacttgtggctctcatttcaggtggtttaatttcgaatttaattaagccattgcaccaggtggtagagtacactatagttaacattctgaccaaatggtttagctagataagttatggttaaattttggtgaaggtgcaaagtaggctaaatgatatgctgttttccaaatttctagatgagttgttcgaattatttgagaaacatttgatgtgatatttattaatttgaaactaaaattaatatagactcaagatgttgtgtagtatttatgagaatatagatgcaatttgttgttgcataatttatttttaggaattttctttagaaacgacatgcatatgaaacctattatgagacgcaccaagaacatccaaaaacaaacctaaaataataaaatgcacatacaaccaagtatatttatttccatttaggttttttcttatgattaaaacttatatttccatttgttttcatttagctcaaatattttgcttaggttgaaatgcaaaaccaaaagagttaaatttctatttcatggttaaaccaatttatttgaattgtgttttgttaactcgatatattataaaatctaattttggattagctctaatctaatcccaacaaatctttatgttttaattttatatacaggattcaaactctaagttcaactattatgctcttaaatgctttagctttcaaaaagttttaaattttcctcaaaaatttaatggtgaagctccgaccgttatacgcatcgaggcgtagggtgccaggagcagcacttcgaccttaggtttggttctgttgggctttacaaccaacggttcgacatcgggcccagtagaccgcgaacacccccatggaagacgtaaagttctagccgacggctttttagtggctaaagagtaatttgggataaaagaaagtatttgaaaatgcaagcataaggtcaaacaatatttgaataaattcaaataaaattataaaatagcaaattgggtatcaaaatgtagggtttgaatttagatgaatttaggtcctagtttcactagaatcggatctacggttcaggagatatgggcttctagagaataggatttgaattaaatatgaaaattgcgaaatagtactgtactggggcccacctgtcaggtgtcctctctctcctttttcttcttcttcttcttcttcctcctccgtttcttgtcttctccagcgcgagcaacacagagagggggagagacagggtgccggtgctccggtgaccgggaggcgacgacgtcggcggtggaacgtgttcccgagtgtcacgcatccggggagggtggtggccggcagggggagtgagagaggaggccggaacggcgatggcaaggacttagctccggccggtatgggaggtaacggtggtggctaatatcggaaggagaaaggaaggggaaggttagggaatgggtttgcctcgtcgaggcgaaggtattggcgcgagggcttggtcggcaatgctccaacgagggagatcagccgatggccggcatggggaggagagagagagaagaagagctcgaagctcagttgtgggggaaaagaaggggctttgccggctatttttaggcggcggatgtcggttcgcagaggaggaggggaagaagggcatggcgatggcggcgtggggaagaagaacaaggcgccggccctgtccaactattggtcgacgatgacggttttgctcgcggatgacgccagtgaagtgatgtcacgtcccagaagtaccctaaaatatatcctttaaattataaattatgtctagaataattaaaatcctagtcaaatctatcaaaaattaaaatgtgtaaagttaaaagtcaaataaggctgggaggatttttttatatttcctaaaagcctaaaatgtgtaaataaattttagtggaattttcagagcacaaataataattatgaagaaataaacaaagttgaaaagattttataaaaagaaaaccctataaccctctcccctctctctaggtctgaattcggcccaactccctctccctctctcttctctccccgcggcccactcggcctccctccctccctacgtgtgcgccgctgacaggcgggctcgtccgccaccctcgctgacgggtggggcccacccatcatccccctcctcccactgctcccgccgctccctccgcccgcgcctagcgccgccgccgccgcaaatcctgccgcccccgaccgttcccgcgtgccattaagtggggggaaatgttccccgtgattccctctccctttccctccattttctcatctctctcccatgttcaaacggccggatttgctcccgcaaatctcgccggcgccattgatgccgatagggacccccgcgccggtttccttcctcgccggccgccctctctcactcccaaccctatataaaccctcaccgcacctccctcgtccgtttccgccactcgccgccatttctccccgccagaatcgagctcgcgccgtcgctctctctctccgtcgtcgccgccgagctccgatccgccgccgtcgtcgccccggaccgcttcccatgccacctcggcgtcgtctcctccggctttgccgcaccatcgccgacctcgtccacccctccgtttcggtcgccgacggccggaacgctagctcggaggatgacgctactatcatgcacctggcacgcatggtggaggcgtacgacacgggccgcatcaacttccatcatatggtgcgccgtgggttggtcgaggacaacatgaagatcctggagctacgttaggagaatttgcagctgaaggacttggacgccgtggaggcgcagctgtgtcagctcaagattgctcagggggagatctgtcgccccaagcgccgccgcgtttgccgcagccagaagatcaccgcccgcaagagtacctctaggcctgagcttgttcgtcagttcttggcgtggacctgcttcgtggagactccttgcgtcgagcccgcgcccttggttccttaggaggagggagcctctggcgttggcagcacggaggatgtgttgttgctcaccttccgccctggcccgtcgcagaagtagacgagcagctagtaggcacgcgcgtgtgttctttttgtttgttttcttgcagagtcgtgtggggcatggttataccggtgtgtggtataattgtgtcggagcctgtctttattttatttgcataagcaacttcaaccttaatgaaccaatttaatagcagaaataaattcaagaattatggtagtcgtgggtggttagttttaatcgtcagctctttctgtttgctggttctgtgtggaatcttcagatggtgacaaccaggagaagcgctgctaccggtgagggcagtcaccccgaaggcagcaaccacaacaaccatggcagcccacctccacctccccctccgccaccaccaccgccacccgataccaaccccatcctcacccaaatcctcgctcagcaggccaacatgatggctgctttcctccaccacatccagactccgccgcaacacaatgctccaccaccaccaccaccacccccacagcactccaagcttgccgagttcctccacatccgcccgcctaccttctctagctccaataaccccgttgatgccttggactggttgcatgccgttgggaaaaagttggacaccgtccagtgcaatgatgaggaaaaagttatcttcgcaacccatcagctgcaagggcccgcatcactatggtgggaccacttccaggctatgcagccagaaggacagccaatcacctgggcccgcttcaccgccgctttccaaaggacccatgtgccagctggagtcatggcccttaagaagagggaatttcgggagttgaagcaaggcaaccgctctgttatggagtatttgcatgagttcaataacctggcctggtacgccctggaggatgttcgtgaagatgaagaaaagcaggagaagtttctagtaggaatggaccctgaactttctgtgcgtctggtctccggggattaccctgatttccagctcgtagtggacaagagcatccgcctggaggccaagcacaaggaactggagtcacacaaacgtcgcttggcgaatttccgtaatcaacagggggctaaccaaaggatccgctacaccaatccctatccagggggatcctcctcacaacaacagcagcaacaacctcgcccagtgccatgacctcaatttgtggtacgcgttccacagccgcagcaacagcagaatcagcaagggaaccgtgcaccccgtccccctgcaccggccgtgcagcctagtcatggacgcagggatgttcaaggtcagccgcgtttgtgcttcaactgtttagagcctgggcacttcgcggataaattcccaaagccgaggcgttaggaaggccaagcgcctccccgccccaacaatggtggaaaggatgccactcggggtcgtgtgaaccatgttactgcagaggatgtgcagacaactccagatgtcatcatcggtacgttcttcattcattccatccccgctaccattttgtttgactctggagcttcccactcgtttatatctgtgcaattcgtggggagaaatcagctggggttagaaaggcttaggaactcactgctcatcaccacccctggaggagctatgacagcaaagtattatagcccggccgtacctatagagatccagggaattccttttccctcggatctgatccttctagacaccaaggatttggatgtgatcctcgggatgaattggttgacccaattccaaggagtagtggattgtgcaaggcgtactgtcaccgtgtaccggaagcctgatcaaccggttgttttctttgcgcacccgactcccaccggcagctcagtacttcatcaactaggactgtcagaaatacccgttgtcagtgagtttggtgatgtatttccggaagagctacccggcatgccgcccaagcgggagattgagttcaggatagatcttgctccaggaaccactcccctgtacaagcgaccctaccgtatggcagcaaatgaattggctgaagtcaagaagcagttggaagagttgaaagagaagggatatatacagccgagcacttccccctggggtgctcccgtgatttttgtagaaaagaaagacaagacaaagaggatgtgcgttgactaccgagctctcaatgaagtctataaaaaacaagtaccctcttccccggatcgatgatctattcgatcagcttaaaggtgccactgtcttttccaagattgatcttcgttccggatatcaccagttgtgtatccgtgaagaagatatccctaagaccgcattcaccacgcggtacggactgtatgaattcacggtgatgtcgttcggtctgaccaacgctcctgccttcttcatgaatttaatgaacaaggtgttcatggaatacctggataagttcgttgtggtctttattgacgacatattggtgtactcacagtcagaggaagaccatcatcagcatctccgtctggtgttgggaaagctctgggaacatcagttgtatgccaagctcagcaagtgtgaattctggttgtccgaagtcaagttcttagggcatgtgatatctgttaaaggagttgctgtggatcctgaaacagtaacagccgtcaccgattggaagcaacccaagacggtcacccaggtccgcagtttcttgggtttggcagggtactatcggagattcatcgagaatttctccaaaattgccaggcccatgacgtagttgctgaagaaggaaaaaaaatttgtgtggagtccgcagtgtgagagagcatttcaaactctcaaagaaaagttggtttcctcgtcagtgttaatcttatcagatactcgcaaggatttcctggtgtactgtgacgcttcgtgccaaggtttggggtgtgtgttaatgcaagaaggtcatgtggtagcttatgcttcacgccagctacgaccccatgaaggcaactatcctacccatgatttggaggtggccgctatggtccatgctctgaaaatctggcggcattatctcattggaaatcgctgccaaatatacaccgattataagagtttgaaatacatcttcacccagtcggaactgaattttcggcaaagaagatggttagagctcatcaaagactatgatgtgggaatccactatcaccctggtaaggccaacgtggtcgctgacgcgctgagtcgaaaaggccattgcagtactctttgcgtccgtggcattccaccggaatttaatcaacagttggaagccctgaacctaagtgtcgttagccatggattcttggctgcactagaagcaaaacccaccttgcttgatcaaatacgcgaggctcagaagaatgatccggatatgcatgggatcctcaagaaaatgaagcagggtaaagccgctggcttcacggaagatgaacacggaaccttattgaacggaaatcgtgtatgcgttacggacgacaaggaacttaaaaagttgatacttcaggaagctcatgaaagtccttattccatccaccctggcagtacgaagatgtacttagacttgaaagagaaatattggtgggttagtatgaagcgggaaatcgccgagttcgtggccctttgtgatgtgtgtcagcgtgtcaaagcagagcaccaacgaccggccggactcctccaacctttacaggtaccagaatggaaatgggatgaaattgggatggatttcatcaccagacttccaaaaacccaaggcggatatgattctatatgggtagtcgtggatcgactaaccaaggtggctcggttcattcctgtgaagaccacctatggagggaacaaattagctgtgaagaccacctatggagggaacaaattagctgaactttacttcgctaggatcgtgagtctccatggcaatcctaagaaaattgtatccgataggggaagccaattcacctctcacttctggaagaagctccaagaagagctggccacccgattgaatttcagcactgcttatcacccgcagacagatggacagaccgagcgtctgaatcaggtcctggaagtcatgctccgtgcctgtgttctagattttgggaagacctgggataagagtctcccttatgccgagttctcctacaataacagctaccaaaccagcatacaactggcaccctatgaagcgttgtatggacgcaaatgccggactccactgttgtgggaccaagttggggaaagccaagtgttcgggattgatattctgagagatgttgaagctaaagtcagaaccatttaggataacctaaaggtggcacagtctcagcagaaaagttatgcagataaccgacgccgcgatctggaattcgcagtggacgattttgtgtatcttcgggtcacgccattatggggagtgcacagatttcagacaaaagggaagctcgcacctaggtatgtggggcctttctgcatcatcactcgacgcggagaagttgcttaccagttggagctgcccgcatccttgggcaatgtgcacgatgtgttccacgtgtcgcagctcaagaaatgtcttcgagtgctatccgagcaagccgattcagagcagattgaggttcgcgaagacttgacctacgtggagaagccggtgaagattctggacacaatggagcgtaggaccaggaattgggttatccgtttatgcaaggtccagtggagcaaccacgccgaggaagaagctacttgggagcgcgaagacgagctgaaggcagcccatcccaacctctttgcatgttcttccaaatctcggggtcgagattccgtttaagagggggtaggtttgtcacgtcccaaaacgaccctaaaatatatcctttaaattatgtctagaataattaaaatcctagtgaaagcctccaaaaattaaaatgtgcaaagttaaaagtcaaataaggcttggaggattttttttttatatttcctaaaagcctacaatgtgtaaataaattttagtggaatttttagagcacatataataattatcaagaaataaacaaagttgaaaaggttttataaaaagaaaaccctaaaaccctctcccctctctcttgggccgaattcggcccaactccatctccctctttctcctctccccgcgtcccactcggccttccctccctccccgcgtgcgcgccgctgacaggcgggcccgcccgccgccctcgttgacgggtggggcccacccgtcatccccctcctcccgccgctcccgccgctccctccgcccgcgtctagcgccgccgccgccgcaaatcccgctgcccccgaccgttcccgcgtgccattaagtggggggaaatgttccccgtgattccctctcccttttcccccattttcccctctctcccgcgttcaaacggccggatttgctcccgcaaatctcaccggcgccattgatgccgaccgggacccccgcgccggtttccttccccgccggccgccctctctcactcccaaccctatataaaccctccccgcacctccctcgtccgtttctgccactcgccgcactttcttcccgccggaatcgagctcgcgccatcgctctctctctccggcgtcaccgccgagctcgggtccgccgccgtcgtcgccccggaccgcttcccacctcggcgtcgtctcctccggcttcgccgcactgccaccgacctcgtccacccctccgtttcggtccctgaccgccggaactccgccgaccccgtcgacccgagccgcaccaccgcctccctctgctccggccgcctcctccgtcgccgtcgtcgccctggggtgagccgtggaccgccgcctctttcccccttcccttcccctctctcggccgccgctccgccgcgcctatggccggcgccggcgaccataggggcgcgggcgccgcctaacgccagccgcaacgacgtggccgcctccgggcgcgccgtgtggccaccacgtggggctcggccgtcagccgcccgtgccctcgggtgcggctgacgcgtggggcccacggcgccggctggtgagccacgggtgcacccggtccaccgtcgaccgaggggctgccgcgtagggcccaccactcccgtggacccggtccgcacgccccctcttctcggctgacgcaataaaccctatttttaattaaaatttaaatgaagaaattcgtaaatattcacattaagagcatataaacttcaaatggtcatatcttggccgtttgaactcagaattggaccgttcaagtctgtaatttttccttaagaaatcaagaacatatttttgtgctttgtttctgcttgttatatcgagtttattagagtaaaagcctttttctttccgttggtcgtgtagatgcagcagctttggaagatcacatcatccttgaacaaagcctttttctatgtggaggttgaagccgacgtttgggaaagcgagcaaggcaagtcacatcatccttgaacatattgaatcccagtttataaaattattttggtttaaattactgcattatcgctttatttaaattcccgcgttatcactattttatttagccatgcctatttacctttgttatgaccttattaatattgctattgttattattaccttgttcaccctaggataaacaaaaccccaactagtgggtaccctattcatggttccactagtatgaatttagctagctgcttcgctgattaattagacaacattaggtcgttttataaccttagactttgggaatgctcatatcatttggacgttatggaatggtttgattatgtggaaatggacacacacctccctctctattcaaaaccctcaaaatggttttaggctaggctcgaggtgcatggttttgatagtagcacctcggccactataaggaccggtcttcaggcctctgttgcaaagtactactgtacttccacatgtctagtgggtaaggcgtagtttgtggctcagtctggtcatgggcaaaagtacacggatggagatggacaaagtcggggctcgatggatatctctagggcaaatgaaggccacacgagctgtcgcccggtagtcgagatgtcatggcacagggccggtgtcctactgctaggggctcaaccttggttacctgtctcgggaatcccggtcgtagccagggttgggtcggtactcttgtttatggctaggataggttgggaactatgtcacatctttcgtccgtatgccgtggtggtatgtgctacgtggttacacgtgagaaagatgtgtcttgtgggtaaagatgtacacctctgatcagagtataatctattcgaatagccgcgccctcggttatgggcaagcctaacaatgtacccaagttagtggtttacttcttaaaacttgcttaacaactaaaatatggaatggttggcctaggttggcttgggacgagctgggacccaggtcaggttgccagttcggtctgaatcatcgtaggccttgggttaaggcaggttcgtgcgggttcacggccttgattaataacactgtgtagctctaggatcgtctttacaaaatggccctaagcaactaaaagtcttgtaaatgttgtttactgcaaaccctaacccctttattataactcccttgtactcctttgcatttattctgcatttgtgggtgtgtcttactgagtacggtggttgtactcaatcttgctcaatttttccctaacccaaaagaggagttcctggaggatgaagactttggtgtctagctcgtgcctgccgtcaagtgcctgtggtcgttgccctagtcttccgctgttttccgtttatcttcgtgtgtgctgggccttcgtcgcccatgtaataaattaactatttacgcttccgcttgttaaactctgaattgtatcaacttttggtgtaccttgcctcctgggacaaggaataatacacgcacgtatggaatgatcgttgggttaattccggtcgtgacaagtgaggtggcggctaatgttggtggcgattccttggcggcgacggcaagacaacggcggcggtggcggcggcgcgcacgcgctgccatggcggacggcggcgcccacagaaggaagggaggagagaggaggcggctgagctgaggctgggccgacttgggctgcatgaatgagaggagtaaaaaggggaattcggcccaatcttaaaaggaagaaagtctaaggtttgaataaattggatttagagaagtatttgtgtttgaagggaatttagatagctaggcctcagaaaggatttgaattcggagagatttatgtgcggagatgaatttcaaagtaaagatgttctaatttgtttgagtgcaatattttggagtgggagtttgtttaatgcacttaaataggaaccataaataatatggctctgtatttctggaaatgtggtaggaaaaataaagagagggaataaataggattttatccccacaaatgggtggtatgggtttaaagaaatattttgtggctaataggagatttgcatgaggataaaatctattttcttagcacaagagcaattattcacaatatttgtaataatactgttcttgtgacgaagaggaaatcaagccacatgaattaaattggcggctagatcagaaggaggaatttggatatttagatcgaacatcaaagtataggtttaagatcaaaggataggttaacaattaattccaacggaatcggaattacgacggtttaggttcaagggcaatatgggaaggtttcttggaccataattcataaaagggtttttaattaaattgagaaaaaggaattttgcaaaagaaggtttaaggtgcagaatcaaatcaaagcaaataccttggtttaataaaatcaattttagaatacaaaccacgaaagattttaaataatagagagagattctacgcaagttaatatttggaagtctctctaaatatattttcctaggtttaaaaggttattaagaacataagaatcagcatgatgcaatattagaaaatagtgaattttcaggatgttacagacggtgggggtgaggaggaagaagctgagaaaaaagtctagtggtatttctgtccgagattgtactgtagcaaacaaacccaagatgaatgtgatattttatcgaagcccattgaactgatggtattccaatgaaaccatttttttatggcataatcctaattttctctaggtttagggtggtgggtatgggcaatgaaaggccatttggattgccaggataggaaaagttactactccctccgttccaaaataagtgtagttttagcactgttcatgttcaacgtttgaccgttcgtcttatttgaaaaaatattatgattagtatttttgttgttattagatgataaaacatgaatagtaatttatgtgtgactaatttttttttaatatttttcataaatttttcaaataagacggatggtcaaagcgctaaacacggatatctatggctgcacttattttgggacggaggtagtagattttttcgttggagatttgactagagaaatggcatgcaattcgaatagagagcttgttggagtggtgttcttattatttgggatagagagtgggatggcaagacggttggaggtgttctaatgtttgttgcctgtataaaaccttgaacgtgggagacggaatgtcctcttgcaagttgcaattttgtatgctgtacaaatatatttggttaagatcttgtttggttaatcccgaccacaagagaatcaagaggaatttgtatgggatttattcaatacctatttggttaatccatttaatcactcctttagtattaacctaacaagcctaacgcctaaggcctaagaagaaatacaatgctagccaggtaaaatatcatgctaaatcagtttgcccaaaaatcatgttattgcaataaacaatattctaccatttttttttgaagcgatgggtctgttcatatgatgcgactacacaatcatttacaaatatattgaaaaaatggatggcattttgcctaagaaggaaaagaagcaactgtttctacgagaaaaactacatatagaacataaacaatttactagtatgagatttattgttccaaaatgcaaacatgaatggaaaaaagcctggaattacttaagtgtgtgtttagtttggggatgaagtttgatggattaggttcgtcctatttctattttttttgggattggatgattccatctacatctacgtgcttgacataaaggttataatgatcctacttttttaagggttggaaggatgtggtccatacatcaatgagagagaaaattagttggattggtccatctgtgtttggttcacggtcatgcatggataggatatggccatccatattttgttggatatagcgatctaattttttgtttggtttgtatggatatggcgatccgatttcttgtttggtcggagggatatagcatggatggaaaaagccaaaagttagtgggacccatttgtcatatatatttttttatcaaaatataatcattcgagatcttgttttaaagatttaattgtaacaaatataatggtgtaatcaaatcataaattagataaacagtttaggagaaaaaaaatcatttggagcttacttaacagaaaatcaaaccaacaacagccaatcagaataggacacatcacccagaccaaaactggatggattcatctagccaaatcggcctgatgcactcatccagcatattgagggaatattccctattctgggccgcctcatccaccctgccctccaatcaaacactacaaaaaaccggacggccatctcctatccagtctcatccacccaaccaaacacaccctatctagagagaatatttcattctagagatcatgacttcttacctatcttcaagctaaacaccctgaaaagttctccccatctagacctattccattcctccaatcaaacacatgctaacattcactctgagtctagcttgggtgatgccattgctaactccatgatgccttatcataccatatgttcctatcatgataatagaaaaaatgattgaagagattcacctattgacattccgaacttcgtaaagcacatctagtactcctacttagggtttagggtatcactcagaaccacatattaaaggctagcaaaaaaaattaccacttatttctgaattgttttatttggttgtcttggagacaaaattttgggatagagttttggatatcttttaggttgagttttttttatttcactttcctaactccacctcccgaacgcagaattagtgatgctctgagaccaatgtgttaggttagtactaaagtggaaccaatcccttattttgaaactttagattactaaagttgctgagagcatcactagcagtaccctactccgtctccgatcctattttttttcaggatttttgatgaaaaaactgcttcaactgttccctacgcttcctctcaaaaatcagtactccattctacttcactctcgctctccaaaagttgggaatcgttctcgctcccaatttccgtcacttgagtgagaatgccatccgagaaaaggggtaagcggaagggcgttgacactagatgatatgatcttgataagttgcgggtaaagggaggcatacctttttatttttatattttagggagttaaatataagccatctattggaaggaagtatatacctatacaagttatccccacctactaatctcctgcactgtggttgctccacgtcatcaagttgatcacacccattcgatcataagagacatcttgaccatactctcacaatggccaattacagtactactaggggcagtagaataaaaaccacttcaaacaaaacgccaggcaaaaaaaaaaaaacaccaattctcaagagtggattttaaactctagagggaacatgtatatcactcgaataattatgaaaaaatttcaaaacaattaagaaattgtattaacatgtagtataccactccaaaagcatgcaagttataatttaacttttataagtaaaacacatataaaagagtagcaaattaactacaactagttaacatatattcacattaaatttatttttttcgttgcaacatataaaaaattaaatttaactttacatgtttatgaagttataattattttcataactaagtgtcatacaaataacgagatgacgtctcgagttcttcctgcagccaggttttgaaatttcggttcgaaatttccgaaattttgccccccccccccccgaaatgctcacatctcgtccgaaattttcggttttttgcaatttttttgtgtatttggtcaaaattttatttaaaatcagcaaaatttcaaaaatttcgtaaaaaaaatccgaaatcggttctttcgcccacctgcagcagaaatcttgggctgtgtttagatacaaacaactttcagctttgaaaagaactaaacacagccttagtttggaaccctgcctgctgcaaaattataatatatgtttcgaaatttcaaacccagcctgttgtcgtcctgtactgtactcctgtgcattgtctggatgggcaactttttcatagcgaggcgagtcgtcgtgtgcgtgcgtgtgctggctcgtctcgtcttgttcggacatgacaagaacagaactgaccaaaaatggactggacgcatcagatgagggaggtccgagtatgcaggcggctgttatgcaaacagcctaacagcttaaacaaaatgctggaaacactgttgcttggcttggattttgctaaacatatgttatgattttgctacacacttcgtccttgttcattttgatttgttgtaatttgagaccgtaaggcgattaatcaggacgggaagaaaaaccactgaaccataaaagaccagactaaaaccagatcttgatgcaaccaggttcatcagatagattcatcattcatttataatttataaatttacccccattcttctacgggaaatttaactatttgccactcttgtgacatgtcaattaacgatttaccacaccttgtcaatgacatgtgggccctcatgtgtttatgacacgtgggcttagtggcaaatcgttaagcaccactcgtaagagtggtaaatagttaaaagccccttcttctacagacagaagaagcactttcttcttgagctctcatacagcaaccaaatctagacaaaatcaaagaatccccaaatcctccccccaagttcctaaagccccaagcgaacgccatcttctcagaacccggccaccgccgcgccgaggagggcggcggcaacgagcacggcgccgctcgccgcggtcctcccggcgttcccagtcgccggcgctggggcgggggcctggaagaggccggcggccagcggggactgcgcgggggccggcacgggcgcgaagaacccctggccgcggcggctgtgcttctccgacatgacgaggacgatgacgcgctcgcccttgtcgcagctccccggcgcggcgccgacgaagaagtggtacccggagctcgtcagcggcaccgtggcggcgccgccggtgggcttgtgggtggcgaccgggctccccgtgccgcagtggttgtagtcgtcccgcgtcacctccagcaccgcgtccgccgcgccgtcgaacttgaacactgcgccagcccaaccagagaaggagaagaaatcagaacaaatcaagaaacagaggaatccaagaaacactgaggaaggaatcgagctttgttgactcaccgaggttgtcgccgatgtggaagcgggtggcctcggcccacctgttgagcgcgtcgggctgcgccggcaccttccacccgccgccgttgttgccgccgaccacgaggtccctggcgttcgccacggccacggccgccgcgaaggccagcgcggcgcagagcacggtagccaacaccttcgccatcgaagtagggtgggaggactagcaaaagtagaacacgagagcacgagaggagggaaacaggggaacgaggaggaggagatgatgctgtggcggccatgggaggcggatataaatagggtggtggagtggaggtagccgttggggtattcgaacgttcgggaggggaggcagtagagtagcatcgggtgccgcgaagacgcgtggcgacagcattcactggcattgggatgggatgggatgggatgggatgggatgggaggagtggcaggctgttgctggcttgctgctgctgcttctcagcactgggaaaggatgcttctgttttggaccttaccgttgctgttttggccttttgaggaggcactgggctggatgggatggcactgttctggtgtagggctgtcacctatggcccgtggggctggggaggcttgggaccagtggagtggggtccacagggaagtgagtgagaattgtgtgaaccttggagttaatattcctcctggaagaagtgtttgtgttgtggcaataaaattatcattttttttaaaaaaaaagtcacatgaatcgagtggactgttgggttcagcctcgttatcaaaaccctcaccaaattagaccctgtttagatgggactaaaacttttgttcctatcacatcggatgtttggacactaattataaatattaaacgtagactattaataaaatacatccataatcttggactaattcgcgagacgaatctattaagcctaattaatccatgactagcctatgtgatgctacagtaaacattctctaattatggattaattaggctttaaaattttgtctcataaattagctttcatttatgtaattagttttgtaagtagtctatatttaatactttaaattagtgtttaaatagagagactaaagttaagtccctggatccaaacaccaccttaatctacgtcacgtcaacctatgtgatcctgaacaattaagacatgtttgatagagttctaactctaaaaattaagtctttctaaatcaagcttcacctcttgagtttattttgtgagagcactttagtccactctatttttttttattgttggagctaaaactttttgtttggacttccaactttagaagagatggagttggagctgaagatccaaacatgcccttgatttggtttgattttgcttgtagatgatcaaggcgtcgatgttggatgagatcatcgatcggctacgtcaagttcttgctagaggcggaaatttccctgttggggtcggagacccaccctaagggccgggatcgggggataagggggtgttcagttgggactaaaactttttagcccatgtcacatcggatgtttggacgctaatttagagtattaaacatagactaataaaaaaaactaatttcataaatgagagctaatccgcgagacgatttttttaagcctatttaatccatatttatcaaaactttactgtagcatcacattgtcaaaatcatggcgtaattagattcaaaagattcgtctcgcgaattagtctaagcttatgaaatgggttttataattaatgtatgtttaatactccaaattagtgtccaaatatccgatgtgacaggtacttgaaataagtcctggaaaccaaacagccccctaattatcacccgtgggtgaacgggggcgagccgaccgcacccttcatctcccaccaatcgctattattgcctgtgagtgaggcacgctgtgcgggccccagtggtgcgggtcatcaaagaggccagggacgaggcccgggttcatctcttctagtaggatggggccgggtggactcgcagggggagcagggtggacccgcacctgtctcgcccccttgccatacctagttcttgcagctcatcgattgtgcgttttgatttgagctcagctgatgctgatggcagctaaggatcgattagacgtgtcatagtgactgctttgacactgcaggatcagcaaccagtggcgaatccatgatttacatcaagatggggctaaagcaaactagatatatcagcacgatcagcatttctctatgaaacccaaatacactacgataaacaaagagataatccatgaaatgctattg

SEQ ID NO: 9934 - DNA, 49951 bp, Oryza sativa
aaaatggaaaaatagtcatctgggaggggccttagttcaagcccgatagagattaatctatatctatcgggcattattttagggcccgtcacagatgagtcacccgtcaccgatgagtcatctgtgacgggccctaccgcaaagcccgattgaaatagattaatctctatcggctgtaaactaaggcccatcaccgatgactcattttccatcttttatttgttgtgagtgcaaaatatatagctgatgtgtaataattcattttattagctataatacattttcggatagtaaatgatttcaaatggaaatatggtcaacaacaaagttgtagagcctttcaagatctactagttttattttcgtcatttttctatataatttttttccaacagcttgaaattgattttgacaatatgacaaatctaattaacagcatttgtaaatactaaatggtttcaaattgtaatatggtcaacaacaaagttgatcctctaatcaggatctacaccttttattttggtcatttgtaataaaacaaaattagccatattaatgactacacatatcaagtctttgcaataaaacaaaatacttcattcattacaatagataagtacaaatccatcggtcacaaggttatgccttccgtatgatgtgaacgagcatatgccacaggctcttggggatcatcgtcaaggtcaatgtgaggtcttacatgaagattatggttgtattcttcttcatcgacgacgttgtcaactcctacaattcggcgctttccatccctcacgatgtgcatcttcttgtttgaagggtcttttatgtagaatatctgctcgacctgtttcgcaagtacaaacggttcatcggcgtatcccaccttagatagatctactaaagtgaaaccttccttgtcggctttgacaccagtgcgtagattcacccaacggcagcggaacaaaggaaccttgaacttgacgtagtttagctcccagatctcctcaatgcggccgtagtatgtgtttgacccaacttgatcctggaatgcatttatacggatgccgctgttttgcactgtgcttttgtcatcttgtttgacggtgtaaaatgtgtatccatttatatcgtatccttgccatgtgtctacggtccaagacggtcccattcccaacaactgtaatgtctcatttgggacatccgtggacattgtcacacgattcatgaaccattcgttgaaccgagaattatgttctttgttaatccatgcatcagatcgccccaagttctcatctcggattttcgctaagtgctcctcaaagtatgggccaacttctgccatatgttggagcacagcgtaatgaacctgcgcgtacgacgcttcatcgggcctaattcttttccttccgattgtgccaacacctgacaaccttccctcgtgacgaaacacaggaactccgataggatcggcatcggacatgtaattgacacagaactcaatagcctcctcggtcgtgtaaccttcaatgatgctctcctcgggtttagctctgttacgaacgtatgacttcagaactcccatgtacctttcaaacagccacatttcccttagaaaagctgggccacatagttttgtttgcttcaccagatgaacagggagatgaaccattatatcaatgaaagacagtgggaaaaaatatccaggtgacagagggtattcacaatatcaatctgcagcccatcttgatcttctggatctataaccttctatccaattgcattgaagaaggcgcacagacgttggatcgtgtgacgcactttcggtggtagaatgcctctgatagcaactggcaagatttgtgtgattagcacgtggcaatcgtgagacttcattccaacaagttttagatcgtccaatttaacatacttacttatcctcgctgaatagcccaatggaactttaatatccttcaagcatgataacattgcgatcttctcatccttccacagtgtgtggcaggctggagggaggtacactttacctgtctctgcatctcgtatgggctggagttcactgcgaatattcatgtcctatagatcaaggggcgcgttcaacccatcctttgtcttcccgggaatattcaacatcaggctaaccaaactctcacacacattcttttctaaatgcatgagatcaatgcaatgacggacatcaagatctttccagtaaggtagccgccaaaatatggattttttcttccacataccattctcctttgtcttgctacgttttcttttcttcccaaactcattgcttttgtccttgaccatattgtggacctcatcaccggacaaatctttgggagcaggctgaagttctctcttaccgttaaaaattttcttctttcttctaaatgcgtgacgtagcgggagccacctccggtgacccatgtataccatctttcgtgatttcttcagccaccggcttcgtgtatgttccttgcaatcggagcatgccttctttccttttatagtttgtccggaaagattaccgagtgcagggtagtcattaatggtgcagaacaatagaactcttagcttgaagttctcctgaccatatgcatcccaagtttccacaccttctttccaaagaatctctagatcgtcgataacaggctccaggaatacatcgatatcattgccgggttgcctcggaccttggattaacaagcacaacataatatatttctgtttaaagcataaccatggcgggaggttatagttcgcaataagaactggccaagtgctgtgagtactactcatgtcaccgaaaggattcatgccatccgtacatagacatatcctcatgtttctagggtcggcagcaaagtctttgtgttttcgatcgatattcctccattcaatcgaatccgctgggtgtctaagcataccgtcattccttctctccgtggcgtgccaacgtactaacttcgcttcgttcgggttggcaaagattctcttgaaacgatcaatgataggtagataccacacaacctttgccggaccacccctctttgacttatttccttcgtcagcacttttctttcgcttgtatcgagaagccttgcagacaggacaagcatccaagtccgcatattgcttgtggtacaatatgcagtcgttgggacaagcgtgaattctacggatctctaaccccagtggacacagaacctgctttgcttcgtatgtcgtctcgggcaatgtgttctcaactggaagcatagccttcaaaattcctaaaagatctgtgaaactcttgtctgtccatccactacttgccttcagcttcattaggtccaaggtaactgacaacttagtgtgttttgctttgcatctagcgtacagaggcgtctcggaatcactgaccaacctgctgaacttcattccatctctctcattctgggctgggtcctcaacgtcacgtaacatgtcttgcagcagatcgtgatccacatcaaccatttcacccccaatggagaaggtataaacatgtcatgctcatcttcatcttcctgattatgcgcaccacttctgtctgctgctgctccacttcctcattcttgctctccatgcttcacccaacatgtatagccctccatgaatcctcgttgtatcagatgaccgtgtacgtcctctccgctatcaaacatattctcttgcaatctgcacatggacaacacctgtaatcactgtttcttcttatccgatcctcctccgcggcgttcataaaatttattatgccctttctgtactccgtagaatgacgtttcaaattttttgcatacatccaacttcgatcaattgctacaaaataaaaaaaaacgaattagaggcacatattataagatcagtattgcaaaagtaagatgtgatgaaattgctcaattaatgattaatattactcacttgattgatccattttgatcacttttgggaatttaatttctgttttccttggaaaaatgacaaaaaatcgccccctacagcctcccaccaaaatagtgaacagtggcatacagttacactaggtggtgagggggtatttatacttgcaacaaatatctgtaatggccctacaacaatcaaccgtgacgggcatacaagtaatctctatcgggccttcataaaagcccgtcaaaaaagagtgtcatctgtaacgggcactaaacttatctcaatcgggcctctagttggagcccgtcacagatgaccctcatctgtgacgggtttcttttagggcccgattgagatatggaacccttatctcaattgggcctcaactatagcccatcacagataagtgtcatccgtgacgggctttagttttatgccgatataccatggttgtgcgaccatatctcaatcgggcgaaacttcagcccgattgagattacttccttctgacggcccgcaaattccagtcttgttatgggccgtcacagatggaaggatctgtcggttataaccgtccctgtcctgtcttcggtgattattctcatgatctcggtttttgtcgttgttgtgtcggtcattatgaggcgactgtctcgatcttcattgggggtattccctcggccgtcgtctctttctcaccgcgagggagagcaatgatggtgttgtcggtgcatagtaccgtcctcacgacgagaaggggagtgatggctgttgatggtcgttatcgatcagtttcgaccgtcaatattaccaaaatagagtagaactagtaatgcttgcaatgcataactatgtaagaataacaatattccactagtattaggtttactaaccttttgcagagaataaccataaagtagaggagaatcgatatcaactcaaacgataaatcagtcggacgatgtcaagaatcagacttatgtatgaatgggccaagaactcagaaatgacacgatcaattgggccaaaattcacaagtttgcagagaagaataatagaggaggccgccagccaaaccatgggatggttgggccagccccaggttcagccgaacctccctcatcgctgctggatgcagggtttcttctggacagtgtggattagctccaaatgatggttggagggtagttccgaccattccaaccgtcacaaccgtcattgggaggctatataaacccctcaccttctcacttcactcacaaacctcaagcaagagctctctcatttctctcaagtttagttcagtagtatctagctggtggaataggaatagagtagaaatcaggagtccggaagtcttcggaagagtttgggtatggctctagtggcttttctcttctcttttgtaagctttgtacttttattagaatactcttctgtatacatttatggtattgaaatactttccgagtatatgaatgcctactttacattatattcatgttatactgaatatacggctagcttaactgggagatgctttggtgcgggtataatgtttgcttatgcaattactctatgtcatgacgatgatattagagtagtatctggtagtttagacgtggtgtctagattacgggatatcattatttggggttatatgctgcggttgagaggtgggccgctgatgatgacagctcagtatggatattcctccaggcctatatagaatcctaagttaattctctagggagggtatggttgtatggtcatgatgggctgtcgtaaggaagtcgtcagtcaggggtggcttctcaaagtaccaggagggcatcggatagagggtattatctagtatatcggttaactagaatatatgtatactatatatattagaagtataggaatagattatctttctcttttctttccacttagcttagataatatattatgagaatgagtggctaatgcttgtgtgtcactctacccttagattatcttaacccctgcttaataatataattatcacaagtagcatataaattattagtcaagttctctctacatgatcttcccacgggataaaataaatacgatacccttggaatactctcgggtgaaatgctacaatggtatatctgtgcgcttgcggataaactctgtagccataatataccaggagtatttctgcgccattgctgggaattatatttctagtaatgtcgttaagaaataccaacaagcatttctggcaccgttgccggggaagattcataatagagattacctgaactaatattttatatttacctctgtataatcattttcctttgcaggctaaccttgattgtttttacttttgttgtgaaaactgggtagtgcatgactggtttcaacttgccggagaacttcaaagaaaatccagaagctttcttccagagcgtcaggccgcgagtcgttgctccacagaaaactctaccgacaaagaaaccagccgtaccagcgcaaccaaccttcaagactatggctgacaagacccttcgcgagttcgctgctctctctgctaacaatatggccattgggccgcaaatcaacatgggagacatggatttcaacttgaagtccaacctcatcacgatggcgcaggctagcccattctatggcaagcctaacgaggatgccaatgctcatctgcagcagttcttggagatctgtagcacgtacaccatcaagggcgtcagtccagacgccgttaggctaaggctgtttcctttctcccttctcgggagagcgaagtagtggttctatggcaaccgtgctgctgccaacacctgggatggacgactgcaggagtatgtggccacctgtcctcatcatgggatggacgactggctgatcctgcagaacttttacaatggactcaccccgatgtcccgcgatcgcctggatgcggcagctagaggagcattcttctctaaaacggttcgaggagccattgatttaatagagaagatggtcttcaatatgggttggagcgaggaacgactccagacccgtcagcgaggcatgcacaccgtcaaggagacggaactgcttgctgccaagctggacctcctaatgaaacgattggacgaccacgacaaacggctacaaggcaccatcaaggctttggactcacacgttacgtgtgaggtctgcagcaacacgggtcactctaggaatgactgctcggaaacccgtgaggaggcgatatacatgggcaacaacaacaacggtactgtccacaaggagatctggggtgaaaacaaccacgcccatattatcaaggaggtaacaacaacggtaacttttctaaccagccctccttgatggatctattctttgtggaagctaaaaccactgatgcactaagcaaaaagcttgcggccaatgacaagatcctagagaacataaatgttaagttagatggcttcgcttctgctttccaaaactagctgagcttcaataaaatgatagaaacctagctagctcagttagcatccttagtccctacaaatgaaactgggaggattccggggcaacctgactcctccgttgagaatgtcaaggcgatcacgacgaggggaggtaagtccactcgtgatccgccgtatcctaaccctgcaggaactaacgggattgcaaaagaagcgccatctagtgactcggctgacaaggaagttcagccagagaagaccatgctgcaggagtactgtgacacacgattgctaccgtttcctcaacggagtaggaaaccgtcagttgacgaacaattcgctcgttttgttgaagtaattcagaaaatccacatcaatgtgctgctgttggacgctatggaagtgccaacatatgcccgttatctcaaggacatactcaacaacaagagaccgctcctaacaacggaggtggttaagctgacagagcaatgcagcaacgtcatactccacaagctcccggagaagaagaaggatccgaggtgtcctacaatcacctgctcgatcggggcacaacagttcgaccaggtcttgcacgatcttggagccagtgtcagcatcataccaaaggacgtctttgacaagctcaacttcacggtgttggcatcgacaccgatgcgcctacaactggctgactcatcagtccgttacccggcagggatagcgaagatgtgccagttaagatacgggatttcttcatcctggttgatttcatggtgttggatatgggcacagcaaaggagacgccactcatcctagggcgcccgttccttagcaccgcgggagccaacattgacgtgggaacagggagtatccgtttccatatcaacgggaaggaggaaaagtttgagtttcaaccgaggacggaacaatgctccatggtcagaataaagtacggggcgaacccacagaaaattcaagtggtcgaagtggagccacccaagacggatagcctggtgaagttcatgcaaaatttcctggataaggaaacaacgatgcccatgaaccgttattggaggacgccggtaaaaccaaccataccggccaagaagcaagagcagccgactcagaggaagacgtcttccgcacctaagacaaggaaggtgtggaaggaaaagccaaagacgcctgctccatcacctccggagacggatggaaaatccacgaactgaatcagaagaaggtacaatcttgcacgtcggactttaaatgacgtgacctttgtcaacaggtacattggtatgtatccgcatatttattttcaacaatttaattcttgcatcaacacatgtttgaatttcaaaattgtatttatgatttttgaattttgaggaaattcttcagatgaatttttcagagaaagccaaaataaagttttcaacgaaaatttactgttccacgatcacattgaccgttggaatccaacggtcgaaagtggggctggttgagcccactaggggtggttcggccgaaccggccaggcaacgattacgtgccacttttggcagggtaactgctagtgggtcccacatgtcatttatgaccgttgtgggtaccctataaaagccagccgaccgagagaggaaattcaaccccatttcaacacattttcatttcctcttcaaaatttgctctcaagttcattgaagctttgatagtttccctcaaattcaaacactaattgcatatatacaagttgctttggtgaaactaaccggcaggtgaaactcttgctattctaacccccatcgagttagtctgttcttgctccattgtgcagaatgaggaggcgattgtctcatctgttcaaggggtccggctcttcatcaagtcatcatgacgagtctagtactcgttcatcagctgatatctcgatggaagacgccgaagctccgcgatgactcatgaatggcaccgacctcggccttgttggtgatcgggaaagacaagcctactacatgccgagcgaccgggagtatgctcacacacgagaatactctccggagctgctgaaaaagataggtatagatgttgaatttcgtgctatttggaaagttgttggttggcagagatttgttgtggtagatgagcctggttctcgtttgcttactttgcaatttctgtgcactttgaaagaaatagaagatgtaatttcctttcgctttttccataaggagtatacacttacatggaaaggcttaagcacacatcttggttttcacgattcctgtaaaatcgatcttcagaaaggaatttctgggttcgagaaaaataggttttgggaagatatttctggtgctctaatttgcaagaaacctaggacgaatgatatccataatgctacacttaggctcatgcataaatggattgctatgactttgttttctagaggtgatcttagacccattaggggggatgaattgattatgatgtttgccatggttagaaagatcaaaattgctcctgtgaaataaacacaataatggcaacaatttgctgatgctcagttcgcaaacttcaacaacataatgcagcaacagcacgatgaccttcaagcgtacttccgcttccaggggttcaatccttaccaaggaccctgagcgaaagctaagcttggggggggagacatctctctcccactgaggtaacttgtatcacattgcatatttccctttccaattgcatatttctttccaattgcatcttataaaacttgaaaataacataaaaatttgcaaaatagaaaaataccaaaaagataggataggtttgagtcatgctaggtaagacaagatagttctctttgttgaaatgatgaatagttgctctggtttatatctcttatatatgggttcatagtaagcgctctctcaaaaggttaaatataagtagccaacaattatctgaaaacctgaggtaaatgagctgcacttgctgatctgagtctaagttgttgtaagatatgagatggtaaataagagttgctatgatcctgatactagtttggcttgaattccggatgttctgcttttcaaaatgataaaattgagagtttctcatttgataaaaattcctaccaaagccaaaaatgtgccatcatgattaaaccatatacattttggttgcttgccattccattggactttgtcaaactcttgagacttgtgtagatacttctcatgctctatgatcaaaatcatacacccgtatttatgcacttgctaaactcctacactgggagttaagcaatattccattccatttccatattgccaccaaaataaattctccatgctttcatgtgctttcttctcgtaaaaagaaaagttttttccaaaaaaaaaagaaaaaaagagaaagagggaaaggcatggttatgaaaaataataataatcaagttatgctctcacaagcttgagcatgatgttaaaaaaatgtagccatgccctctcctaatcaataaaagaaggatttttgggagaagaaagtaagcaataaggagaagcaatttctttattttttctcatgtaccactttcatcatataccacacacacattgcacgatcttgaacttgagtttgtttagtcatctgctttagtctaagtttttgacttagtaataaatgtgaatgcaagtgttctatgtttgatccctaccgagctccacatatcaaaccttagagtagaaatcaaaaaagggcaaaatggtgaggaatccaaaattgatacacttggagagactgtgaatcatatgaggaacttggctttctttttcaaaatcatttgaaaacttccggaataagagttgaataaatattgggtgattagtgctctaattattgttctgtctttcaaccgcccaaggcaaggagaagtagtgtctcgtgggaatcaggggtaaggataagccatcgtgccaaagattatttaatccgagagagagtacatataccttacacatgtatctttgagatatgcagcctagtagcaactcctgatcaataaccaagtctttgtttcctttcgtccttcactcgggatgagcaaaggttcaagcttaggggttttgttgacggtcgttatcgatcagtttcgaccgtcaatattaccaaaatagaggataactagtgatgcttgcaatgcataactatgttagaataacaatatttcactagtattaggtttactaaccttttgcagagaatacccataaagtggaggagaatcgacgtcaactcaaacgataaatcagtcggacgatgtcgagaatcagacttatgtatgaatgggccaagaactcagaaatgacatgatcaattgggccaaaattcacaagtctgcagagaagaataacagaggaggccgccatccaaaccatgggctggttgggccggtcccaggttcggccgaacctccctcatcgccgctggatgaagggtttcttctggacggtgtgtattagctccaataacagttggagggtatttccgaccattccaaccgtcacaaccgtcattgggaggctatataaacccctcaccttctcacttcactcacaaacctcaagcaagagctctctcatttctctcaagtttagtttagtagtatctagctagtggaataggaatagagtagaaatcaggagtacggaagtcttcggaagagtttgggtatggctctagtagcttttctcttctcttttgtaagctttgtacttttattagaatactcttctatatacatttatggtattgaaatattttccgagtatatgaatgcctattttacattatattcatgttatactgaatatatggctagcttatctcggagatgctttggtgcgggtataatgtttgcttatgcaattactctatgtcatgacgatgatattagagtagtatctggtagtttaaacgtggtgtctagattacgggatatcattatttgggattatatgctgcggatgagaggtgggccgttgatggtgatagctcagtacgggtattcctccgcacctgtttataatcctaagttaattccctagggagggtattcgtctgtatttagccccggttgtatggtcatgacgggctgttgtaaggaactcggcagtcaagggtggcttctcgaagtatcaggagatcatcgaatagagggtattagctagtatatcggttaactagaatgtatatatactatgtatattagaagtataggaatagattatctttctcttttctttccacttagcttagataatatattatgagaataagtagctaatgcttgtatgtcactctacccttagattatcttaacccctgcttagaatatgattatcacaagtaatatataaattattagttaagttctctctacatgatctttccacgtgataaaataaatacgatacccttggaatactctcgagtgaaatgctacaatggtatatccgtgcacttgcggataaactctgtaaccataatataccaggagtatttctgcgccattgctgggaattatatttctagtaatgtcgttaagaaataccaacaatggcgacgacggtcgttgttgttacaatccctcctgcttcgccgacgtcagttcagatgttcgcgaagattgccatcttcacggcgtggcggtgtaggatctcgttcttctcgaggtgagcggtcgccggaggtatgtcttctgatgaggtcttctccatccacgtcctcggtaggtcgctcttcgttcctgctgcttcggcaaatgcgacattgaggttcgtcacggtctcccgcagtcgctctgcccactggatggcgtctgggtttgttgctggatcaaaaggactttccatcaatatcgcgtctagattccgaaactggtgagcgggcgttctcgctgctacagacacacttgtctcagtattatcgaccacgtttacatgagatcatgagatctagatatgtggatcggacagtaagtggctcccgttggtgaagtacgttgaatccctcgttcccaatacgcgtagagttcagcttgcacgtgaagtatcaccggatagtcctcaagagtatgcttggttgtcttatgcatagaacaccaagatctcagtcttagggtggtcatccttgtcggctttgatctttcacatggggggtaaatttcagccgcctgaggattcctcccgggtgttggggccgtcgatgttccgttctccacctgagtgggaggaattatcggcggggtgtcgtttctctcaatcattgccgtatctatctcgttcccgatgataattgggccagccgagattggcgtaacggtatagactggaaagtcaatggacctgacttgagtccacaccagcggtgtcgaggtagaagctccttgatcgacgctggtgatggcactactgtcgggaagtgttgaagtcatactggtagatccttgagcaccaagtccctctacctggcacgccactgtcgacgagggatactcgcggatcggatgagttgagtattgaggtacgttggaacgagggtctacgtagtacgacatcaaacaggcaaaagaaaaggattatactggttcaggctccctatcaggtaatatccctagtccagtttatatgagattgatgatgatgagaacagattacaaagggagtagtcgaaacagacggtaccgatgagatcgtagtcgaaggattcgatgagatctcccggcgactgggctccgtgcactccagcttcggaaactttggtgggtgtgttagcaatgagattcgatgcccttcacctccccttaggggtcccttttatactgtggattaccttgaccccaagtaagtcttggagatatgtaaattggcacgatatagcagagattctaccccctccgagtaggactccggtaatttcttaactcgtagaaatatttttcataatttgagatagattcctaacggcgtatacagaaacgatccgtgcgcgtgaaggtatacctcatcggtatatttcataagtcataggatagaaggtatgccttatccgtaaccctgacagcatgcctgttgtaaccgcatggcggcttagcatagcaagagggagcggctgccggcggcgcccggctgtgtgttgttgtaactccgataggctgtaatatgctggaacagggaggagcacctgtaatcagtgccctggagatgtaggcctcagctgaactccgttatcaaatatcatgcctcgatattgtcatgatgtctggatcttctatggtatttcttccacgtttggttctcagtgtgctatcgtggctggttttataccagcatagctgtttagattggagtagatgcgaatgttgttggagaaacatctagtttttcctttccttgggcagagtgcctcctgtactgaatgattgcgaagttgcttgagatgaacattcccacagaagcatggtgagaaatggagagtattgtttaagggttaatttgatttatgccaatacaaatatggcatattagaaaaataccgttgcaattcacgttatcggttaggtgtcactgaaaatttctaaaagtagtagggtgtccgtgcgttgctacggggaattttgttgatcacgggaaaaaaaaatctggcaatccaactacaagtcatagttgttctaagattaatttgaaagcaagatatatatgttattattacataagcgtagtgcaacctttttagcgcataaaacaatcttatggtatttattaaattataaaaaaccaatatagatagaagataactatgaaaatttgatgatgtcatacaaataaagcacaaacaaaaaatctaaaacatcaagcatttctaaatatggtattttcggttaggtgtcactgaaaatttctaaaattaaaaccatgccactcccattactatttccgtcctcctctctcatgtcgacatcctcaccgtcacagcccgcccccaacgccaccgctgcggctgaccttgcgcgcctccaccggccattggcgcctcgcccgctgcgtacaggcggggtccgttggcggtcgccgcccttgttccattccccaccctcgaagtgcgacgacggcgacagcgtccgcaccaccaccatgccacaaaactcgccggcggtgagcgttcattgtgcggtgtggaatgcggcgcgcagtgagtaccagagcatgagatcagcgacggccgggatgtggcagaagtggctgccgacgaggcgcccggattcgtcactactaaaaaaagtgtttctccaggcgacccaatcacatttttcgcaggggccaaaccatccgcatgcacctcaacgcctacgaaaatagttgattttcataggcgtgcaacaggtccacctgcgaaaatagcttcaagcgctaaaaaaaaatgggcagccaccgccgtttccggcggtcgcttcccgtttccaatccatttcccacccattccctatccaatccagtgaatccacattcaatagagaaatcaccagttcatccaaaatcaccgaatcaattctagcaaagaaaacaaataaaatcattcctaaaatcacggccgccaccctgccgtcgtccgccgccgccgcacggccacgccgcaccgtagtccgcgccgacgctgcacggccgcgccccgctccccttcggccaaatgtgggagggaggggccaggagccgctatcgcggcctcaacccccctcaccgccgtggctgggagccgcgccgcctcgaccctcctcgccgctgccgccaccgcctcaaccctcctcgccgccgtcgccatgtctgccctccccccgcccccctccggccagatctaggaggaaggggccgggagccatgccgcctcgaccctcctcaccgcagccatcgcccgccgccgcctccagccggcggccggggagaggaggagaggtgaggggaggggagaggccggtgaggtgtggagaggtgtggaggggaggagaggtgtgagtcttagaaaaaacctagctcgcaagtctatttatattcaagtctattttcgcaggcggacagcaaatttcactccgatttatatttttgtaggtggtcatttcgctctaagggtcatgtccgcatgcgaaaataagaccctcacgtcgagaaaaatgctttttctagtagtgcgtggaacaaggacggcttcttgaaccagttcgccgtggagatgacgacataggcacatgagtaactgtatatagttcctggccagagagtcgccgacgaatgccttggaccggccgctgacgacgtgcaggaacatcgctctggatctcatcgcaactccacgacgaacgcctgcccgcgcgcctcaccgtcaccggtcgcgctgcccagcccgctagccgcctgcgcgcgccggcgcgcgcctcgccgtcgccggacgcccgaatgcccggtcggcggtcgcggccgcggcgtcgcctcgccggccgcccacaggccacagccggctcgctggctgctcggctcgccgctcgccgcctccgcacctcgcgcctggccggcgcggcagtgccccgcgcccgacggccgcctgcgcgcctcgcggccttcggcctcccatcctcgagcaacatcacagcaaccgagcattcgagcaactgcaacggtgagtcgccgagtcggtgaactgaagtgtattgattattttagcttcatagtttatgaatgactatctagattactagattaggatttaggaaccaccgaacctgtgctgctttgctagtttgctcaattgctctttgatattgttgtttgtaggtttgaaacatgaagagaaaaaaagggtcccatggttaatttaaagagtttttttagaaaaagttgctaaaaaaaagaaatcaataaccaactggttctttgctcgcggtttgtcaataagacgggacaaccagttgaacggtttcttggtcttggttttgtatgctcaataaattaacgcattcaatttatggtcaattctattcatttataactttatgaaaacatgtttatacctttacatattatacaactattagaccttgggtttgaaaattttctctctctcttacaatttcgaatacccaagttgaaaaacctgggcccgatctcgtcgcaactccggttcgtgtagttcggcgcatcgccatcgtcggcgggggcggcaggcacccactgccgtggaagatgtcgcagtctccacttacgagctgcccacgagccaaacaaggtagagccctacaaggagtacaattggaagcctgcgggtgcgcagtccatcaaaagattcaaaaccatggccatagcagccgcaacatccctcggcccatgtcatagcctcaaagagacaaatacgtgcgcatcaggaataagttcactttgtgaccctcaggagtgatcgaaatctaatccgtgaccctaaaccacaaaaccggatatctcgacccccaaactcttaaaaccaatacaaatttactccctcggcggttttgtagagcggtttcactgacgtggtgcctacgttgcgatattgaccgagtcttcgttccacgtggcattgacgtggcacttacgtggcattagaattaaaaaatatgcgtgggacctgtttgtcattcacacaaaaagaaatgtgggcccactaacatgtggggcccatatgtcagtcctcccttcttcctcctccctctctcccttctctctcgttctctcccttcttccccttcggcaggcggcggggcatgggccacggtgtggtggcggcggcggtgggctggagctgatacgggttctggagcagggagctcatcctcccggtcgacggcgacggcgatgatgtagacaagggagcggatgaggctgggtagtcggtgccgcgatggggctgaggctgaggctgcggggggagctcgtccggcgggtctatggccgtggatctcggctcgatgaagaggcggtcgccacccccctctggcggtggtgccacggtccccggagtggagtcgacgatgctgaggccagcgctcggcgagatgggatctgcgtgttggacatcaggttggccaacgccggcaggtacgccggcaacatcctcacctgcagagacaaacaaggccatggcctctccctggttccaatcgaccatggatactgtcttcctgagagtgtaagcactgacgctgacagattttcttctagctaattgacttccattttgttcgttggtgatcatgcatcgatcacgcatgtgcagtttgaggattgcatattcgagtggttctactagccgcagtgtcgggagccattcagcgaggagacggtggagtacataaggtcactggacgccgaggaggacatcgccattctgaggttccatggctgggagatgccagccaagtgcgagcgcgtcctgcgcgtcaccaccatgctgctcaagaaaggcgtggacacgggcctcgccgcgttcgacgtggggagcatcgtgtgcagggatggggccaggcagtcccgggagtggaggagtcgacgatggcgaggccagcactcggcgagatggggtcagcgtcgtggaggaagtcgaccggcgggggttgtccttggcatcgtcgatggcccacgacggaggcggaggttgaaggcagcggcccacgcactagcctcgctcgccggccaacacggaggagccagtgtcgtccttgttcgccgccgccgctgccgctccggccctcgccaaatggaagaggggaggaagaagaaagagagatgagttagtgcgccccacaaatttttgtgtgtgaatgacaaacgggtcccacacatattttttaattctcatgccacgtaagtgccacgtcaacgccacatggaacaaagactcggtcaatatcgccatgtaggagccacatcagtgaaaccgtcctccaaaaccgctgagggagtcaaattgcactggttttagaagtttgggggtcgagatatccggttttgtggtttaggatcacaaattagatttcaatcacttttgagggtcacaaagtgaacttatttctgcgcatcaaccagcgcgagtgcgtgactgcgagagcccaagcagatcgcgaacgctctcatcaactagggccacatcgtgcagccaatgcccaccaagccctacgcctgccttaacatcttcacgacctagtgaagctgatttgcttcattcacttcgccttatttgcttcacttgattatctgtttgcttctgatttgctggtgcacatcgcttgattcacttctccccttcggcctcaccctcatgcaaggttgtcatatcatgatccatattctagtttcttacgatattatgatcctgtcaaattgtaacgataccgatcccgtctagtaccctatctttcatagtgtctcgatcctattgtttactttcacatgatcgtatgaaatcttaggtgctatcctgattctatggtgtctacgatcctataaattattatttaaaataaggtggattgataataatatgaataaatatgctcaagtttacaataaaaaccaattaaatttatcaaaatcattattatatgctttaatttatataatgtattattatattttatataaaaatacgtaatttctaaaatattatagtatctcgatcatcctatggtagtatcttataatactataatactacaaatcgaaaaattatcctacggctccattcgcttcttctgtaaatgaagattaaaagcgggtacgtaaaacaaggaaaccattaacatgtaattaattaagttttagttattacaaacttgagaaatggatttatctaatattttaaagcaacttctatatatataaagttttcgtataaaatatattgtttagcagtttgaaaaacgtgccaacgaaaaacgaggaaagatatgaatctttcattttaatgaaagttagaacggggcctatatctaaatactgattatcttgcccttacgtagctaaacgagcctagctcgttatgttggcacgagccaaccggagctggctcggctctactctactcgtttttgtttgagcgggaaagccgaaagaaacccgcgaagccaaaattccccaccgccgccgcggcggaaacaactccgatcttggacaccgacaccgcaccccgacggaaatccacgcggagaacggaaatcgcctccccccctcccctcctctttgatcctctctaagcacgactgcattgcacgaggttggttgttgcgagttctggcggcggggcgctgcccgcgtagtcggggcggctcgtgcagtcgcagttgagcggggcgagggcactggccgctggggcgagcaggaggcggctggcaacgggcggcgacgcgctgcgcctgtgcggatctggcgcgtggaagcaggcggtcggtggtgaggcaggaggttggggggagggcgtggcaggaggcgcgcttctccgcagagctggtctgctctctgctgcatgcattcttttgttgtattgttgaatttcaatgagattttattggatttatgagaaattgagccctatgtttcagagttttgatagatttgcaattggggaagaaaacaaaattggttatttgttttacaagcaattctagtaatactcacccaattgatgagggaacaaatcaaccaaatgtcattagctactttgagcccattccccttttttttggtcctggattcgtgcatttactgctgcttttcatcaatgtgcaacctatttatacagtgtagctgcttatgccaaagggtgacagaaatcaagaataagcaatagtattctgtttgcttggtgcaatgcctggttattacgacatcgatgatatcctgatggaggaggaggtaattttatgattgttttatcgtcttctggtgtgcttgcacaaatatgatctaaatgtgtttctactcttactgcagcctatttcggtagtttttcaagtgagtgcaaatggtgttggactactagatcctggcgctgaaagaaacagtgtaagtgacttttgcacctatggtttagtgctatggtgtaacttcctagggcacctactgacctttcttcctccatccctattgttctagaaggaagttggtttggaatctatgcagtagttaattgagtttatctgagatgagtgttatatgaccattggattttatttattaaaactgctttggaatgctaggtgtactcttgttggcttgtatgacacattttctagtaaacacaatctggtggtggatgcttttttagtttgtcttgtaaacaccttcacatcatttcttgctttggttggaaacaaaagtgagagatttgctccagttaaacattgtatcttctttatctccaggttgaaaagggtgctaaggtggaccttccattttggcttgcacatgggctgctgtctctggaacaagcagtttcaataaatgtacctccttgcttcacccagaagtaggtttcatcataacttgtttttcattgttgtatacagagaatcttagctagaattcatgtttcaacagatttacatgaaagtacttcttgtcaacttactgtagaggtcttcttcagtaattgcaaatgcctggtagtttcaatatttcctagaaaagttgtcctaagatcataacaacattgctacagaacccggaaggagatccaagctgatgcagcctgtgttgatttgaggattcgttgcccttacttctatgagctaggatgcaagatagtccctttgtaagttctgaaacgatttcaatctcatgcacttttaggatatagttctggcttactacctgcatccgctttttacttgatgccctagaatctgtgctgtcaacaattctaaagtttgaccaccggtaaaagaaagcagagatattatttacctttgtgttaaaaatcttactgaattattagttcatattaaaatgtttctatgtgatatttgatagaatagccacttcattgctttacaaaattttgtccacaaatgaccttattaacatacgctataatacttttcttttacaatgactaagtaattctttcggcgtacaacatacatttttctttgtgcatgtttgtttcaatattataaatgcttttgagtccattgaagatagattctttcatactttcataagacaagttcattttaaacccttgaactttgcaaaatttctacttaactccaacaaaaaaaatagatatgtttatctgattatctccagacttcaaacaatagagcaagggtggttttggaggttgttttgccattatggacaccaacttccatgccataacatcttggaaataccacattggtaattatcacttcaaataagatcgaaaatacaccaacactcactttatttcagtaatgtctctccttttaatcaacctatctatctttttgctcccctctcttttatccaaacaaattgcttggtttcacagaaaacaatcataagcaatagtgagttgctcctctccatattatggctgcagccttgctgatgtcaggcagcggttgtgaaagtgctgcttgatgaacatgacgttgctcaaaacatagctactgtgtgttaataataaaatatatctctgattccaagttggatttgatattggtagatcatccgaaattaaagaaaccaccttcaattgaaactctagtgagaagtataaacaaaaaatgtggaggcagtggtaagagaagaggttggtcggccatgccttgccacttcttggtatctagtcttgctgttcttgttttgcacaattgttattttccatctagtgatttcaggttgtttaacctaatcttcagcttcagtatgttaacaaaccattatgtacagatgatcatgaatcatataaattgctgtgtttgctacagataatattgtatcatacatgttcgatataaatgaatgtgtctgttttattaacacacccttcgtattttgttaaagcaaacacttgatacatttccacagttctatttgtaaaattagcatatatatatatatatatatatatataagctctattatacacccctcccttagaataactattctacaccccctcccacctcccatccgtccccacctcctcccctcccatcgctcctctctccctcccgcgcccccttccttcccgcactcctctcccccagtgccccctctccctcccgcgccccctctccctcccgtcgtgcccctctccctcccatcgcttctccctccgattccccctccttttttttttctctccctcctctcttttttagaaaaattaaaaataaattggtgaattcaagacttgaacccatgatctcatggttcatgacaagcagttctaaccaaatcatcgtatgatgatttgtgaacaaatcagttatgtacctataacaatcataccttgttactatgattcggcagtaacattatcccagaagctgcaaaaatgtataggttgttactgcacttttggcagtaacaatatgacgaaatttgcagtaacagagaacatgcatagtaacagtggccctatagtagtaatttttttagatctagagtattttaaatctcaatatttagagagtactaacgtacacgtcatgtcttatttttctaacccatttgcatcatggcgttcgtaaaaaaaaagtgcttaaccaaactagaaccatcataactattttttaacgttgttactgcgaaaagcagtggtgttactacatattggccatcgtgttactacgctgttccagtgagacaaggactaaaaaagaggtaaatctcaatctttagagagcaatatctctcacatcatatcttgtatttccaatccgtttgcaccatgaagttcataaaaaaacgcttaacgaaacaagatccatcatggctactttttgacgttgttactgcgataatgtgatcttgttactgcacgatgaccgtcctgttactgcacgattcctgcaagacgagagcagcaaagtggtgggcgggtttgaccggcgggaggacgctttgaccgaggtgggaggggggttttgggccatagggagggtgggggaggtgggtttggcccatgggagggggggtgtagaatagattcactatatgtatatataataaataaataaataatcttttgtgctaaatttgtatttagaaggtcgaacaagaaaagctaacaatatgtggaagtactgtcgaagggcaatttgtaaagctgatgtagaggtggagtggtagattcgccaccactaccaccattgcctttttaaaaaagcattatggatattggtaagatttagtttgaatattttgcagattttagttatctccgtaaaccaactgtgataggtttgagtttaggatttgtatgtgatacatgaaaataatcagtagatttgtcctgagaagtactttcagaatattagtcttgttaggtttaacaaatatatattacaataaaaattagctttcaaagctgtattttgaaggctctacaaatgctgaaaatgacttgtgacttgcctgtttgcttggcaagtttagggttttcagtggcaaaaaggttcccccagaaaagtttaccttttgctttatattttgtatcaaactatgtaatgtttggctttctattaaaagccggatcactcagtgatctgctttctaaaaaaaaattgtgttgctgacttgaatagtagtagagtagctgtgatagatgagggcttcgactaggcctattagaggaacagggagtgcagagagacatgtagataattgatctattcttgcctttggaatgcaggagattatggcctgaggatcccttgcaaagtacctaatggagcactgcatgcaactcaaagatattagatagatatttgaatacaactcaataatcaactactagatgatctaatgctgctcttaatgctgttgttgctgcttcactgctcatcgttggccatggcctgcaaccacggcattgtgatgttagcataccctaacttggtgcttcacaatcaacttccctttgtgattgacaattttattaaggcatgcttttgtttcttttattttttttctcaatttcattctatgaatattaaaagaagctcttaatttttcggaatgtgattgatcattcttttgctgacaatatgttcagatactcgaacaaagtcccttgctgtttcctctatttgtcagccaaacattcattataaatttcagcagtcctgacaaatgatctctgtgccaccaagacaccagttcaacttacacagaacagagtacatgagaactgtagttgtgctaaggatatcctctaaactttatgagcataagaacatattatattatagatataataattaaaagaaggtaatggtggtgatggcactgtggcggttgcgaatttgccaccccacctatagaatgtctttttatgaccccttcaacatgtctttttatgaatttgccaccccacttattgtagatcttgagcatgtttatttctccttatttgccttacaaagaaaaataaaattcagtatgggaagttccaaaatggccgaactgtcacatatagatggacttgtttggtgcaaaaatcatttgtatatttgggcaatattagactttttttttttaaaaaaaaaagggtagcaagtgtatttggttgttctgcagaacatttgaaggattgccttgtcagatgctccagtgtgttttgccttcagttttactggccaatagaacagtcatggaactactcatttggtctctcgctttagtgttgggtgtgagcaactggattaacatttggagctaccagtctaccacttatacatgatttgttcatgctcaccgttagtcatcctctcgggattcagcttttcctaatggttacggtattttcataataaaggtgcaatgaggacagagaacgaagtccacaatgaatttggagatgcacttctagagagggagtccactgctgttgtcactattttcttgcagtctgtcaagaagagttaagaatctgatgatgaagttatttatctagtgatctgtgggattattagatgtttggatgctgatatcttactaaattggtgtactttgcacatgcagaggtgtataatgatttattcgtttgcatggttgtgtaaacagggtgaacgacaggagcattggactgttcttgcgctatgcattcactagtaggtacaaggagatactaagcaagtcacacagctcttccatgatgacagtgcccaagtttgttccgcgccttacaaaagaagaagctcaaggtaaatacttctcccaactctgattttactcatcatcctgcatttcttccattaccattccaagctcccaactattatcacttcaagtaaccctttttttttctgtcgcgaagtgttcgaatctgctagggactcgatgaccgctttcaagaagtggcgcgctggcggtgtgaggctgcagaaagcgtccattcttggtaggaaaaggaagacaaaactgcctgatggaccttctgcaccttgaaccatgttttaggttcttctgtatggaaaatcgtacttgagctgatgtatgtatacttcattaatatgtcgctgtaagagaagaccaaaagtgaaacaattccgttcggagatcacacgtttgtgcattctaatctggtggctggccaaccaacacagcctcttgaacaaagggcagttagttattatattccttccttttggaatcaccgaaacgcgtaatacatattttaactgcatattgatgtgtgcgcgccttctgtgcaagtgaagagaagtttgtggtcttaaagtcattagggcaatagcagtgcttccttgatatttaccgttcttcgtacgccgcctaaatcaagaacgtattaaactacatactccacgatgcaagttacttgtagtgggttccaccaataccaatatttcacttttcatctcccctctcctctttttctttccccaccggtagaggaaaccgaggccggagaaaacaaggcattggggctgagtggtggcagctggcgaggcggtccaagcggtgacaacatcgggcggcccaagcggcgaccgagctagctgcggatcgagctcgctggctttgaattgatatcggccttgacctcgtgctcctttgcctctccgtcgcttccctcttcgtccccttctcttctcctctgccgtgcctccccctcctcctctggctgccacgccttcccacttcctcctttggccaccacgacagaatggggtggacggggcgaggtggcgcttgaggtggcggatcgaagcagctcaacgagaggagcaattgaggtcgtgctcgcgaccggcggcggtgatgagcgaggcggtggcgcgtggcccaagaggtgccgaggggggctccacctcgtcggggccggaaaccacggacgatggcgccaccaagctgtggatcaagcttgctggtagaggagacacggcacgcgaagagaaagctcctctccctctccctcctcctatcttcctcactaccggcgacctctcctccttccccaacgacagcagcggcgcttctcccctccccttctgcgtcgctacgtccccgtcgccaacatctgcccagccgctgtgtcgccattaccgtcgccggcctttctccgatcctctctctcccttcccggaggggcgcgggacaaaagattgtgggcccaaagctgcaaatctgatcatgaacctgtagcttattttggctccctattagggcatccacaatgtgcaaaaaaaaaaaaaaagtggatagtaagaagtcctattacctggttcaccattgtgggagtagctagtaaaatgggtagtagtatcatccggtagtagtgctactaccaggcaataaggaataaacaaatattaagactctctcatctctcattccctctcttcttcaaccacccattctcttaaatgtggggcccagcttactacctttacattgtgtgaactaaaataattactacttggttttgtaggttaatcggggcgttacataggtcccacccttgctacctaacttgatgcccttattggaggggaatctccgagctgaccgatgaaggctgaatgacaacttagtgtaatgtgaatgaccttactatgcgtcacataattttatgccgggctctgccagaacaacatgcatgtgagaaaggcccaatttcgagcctcacccttctttttaataaattttaataaggatatgcatgctgattttgttgggggatactatgcaaaatagtcaaaaacaatttctttttggcagtagactagactggatggcacggtagcagtggtagatatcctaagactttcccacagtggtctagctacagccttgataccgaagtgtcttcttcggcgaccctggttgtactttcccctctccacactgacccaactggcgacaccatgctatataaccaaatgaatcctctcctcgactcctccgtcccataccggcacagcatgcaggacacacagtgacgtcggtttgttgccacatgcgtgatgcagcggcggaggcagcgcgcgaggcagagagtcacgggagagagagagagatcagagagaggggaggaggaagaaacgaacgaaacgacgagaggaagaagacgacagcgttgagccaccagcaccgtatcctcgacagaacagaatggcgctgtttgtactgtactgttgctttctttcatctctccacccgtttcttccgatctctgcatccacctccactgcgctatgagtgctagtagccatcggtggtgccaccgccggtaaaacgtcgactagctagggggctgattgctacctcagagtgctctgagagcatgtcgaacctcacattcagaaccgtaccttggaatttgataccccgaaacggaacacaatttgagaccctacaagaatgccaagaaaaaaaagataaattagccgtggggctctgtaagaagcactacaacagaaaacgtttattggtgccagttgggaacccctataagtgttagatttcccaaccggcattgataagctgtttgaaaaaaaaaaagccggctcggctcggctcaatttgagccgatgcctcaaaagcaccaaaattaaatccaaaaatctaagaaaaaaatagacaaattcatataagagaatcaacaagttcatagaatgagaaatattcatgataagttaacattataggaccaaatattcatcaacaagtttattaaaaaaccaaatcaaagaatacaccaatcacagtggagaacttctaccgccaccgctgctcactggagaggaaggggaggctgctgcaaccacacacgaaaggaagggaggccgccgacgctcgttctgctgctgagggtaggcaaggtcgtggggaggcgatggaggcgcatcccccccttcgaggcgccgctctgcttgccaccgtcacgttgccgcaaaggagagcaagggaggctgccgccaccaaggagtcctggagagagagagagagatggagaggtggagaggtggaaagataagaggataagggagaggtggagaggacatgtccctctatcatcggtgcgcgtgaaaaatctcgtgaaaggctaggtcggcttggctccttcgaggtgttgtttttttaaaaaaccgacatctataatacttaaaatgttagtttattcaaaaaaccggcagcaatatttggtacctactttttaataaacatatacttatatggtgatgaggatacaactagctcggatataaccatgactaccttatgtattagtcaactaaaggtgcatatgttctatattagatttacttgttatatatttgaacaaacgttgctacacaatgagttttgtgtgttttcgtttgtagaggtacttgcttgggtgaaagaaaagagaccgagcataaagaatgcatgaatgattgaagaagttgattagggaccaaaccaagactttctccaagtcttctttcatctcaccacgtcacttttggtccatagaagacgagagataaagttccacacgttttggattcagattcagacctcctgacagcaccaacttcaaacggacctagccgctgatctagaaggaatttcggcgcccatgagtatttgttggaaagcttatggagtctactttcatatggttttggtcccacatcaaaattcctactgagctaccgggaatctgcaaaacaagccgcgtacctcatccagtccgaatctgatttgtgttttgggccttataattgtgtcgtggacttaggccaagggggtgtgcgccctaaggcaaccctaggacgtccctaatcatttttattcagtagccgtcatcgtttagagtcgggttttgcttagattattctgtcaagaacagtttcgccggtagatcggtttgtggaaccctaaattcgagtgcttaatcattcatatgcaatttggatgcaatctatcttgttcttgcttgtgttcttcgattcgcatgtagggattagccttctcggcgaggtcaattgggtttcggcacgattgataaccagaggagacgtggtgctgtgattgcggggctcagtagcgtgtttgttcagaagccggatcgagttgtgtctcgactccgtccaaatcgactgtttatcagtacctatcggaagatcgggacctaacacccttatcaataggatcaaatgtgtcggtcgtgttatgaggggtgggaaggggttgtaacttgtaagtgcctgttttagatgaattaacacctctagtgttgtttctttttttcctttcaatagtagcaaagattcttttaagtgaaggctgagaaaaaaaatatgtcatgatatagtgttttctttttattaaacggataaataaaatcgctgttgcccagaacacacgtttatattattgtcatgagctagctctttgtgttagcaatggttaccatcgaacgctttctggagcagaagaaaacaagtttgttatagccagatcagcataagagtaagagtgaaactttttgaatatcaaaagagtgatctttaaatacacatagacatagactaaaatataaaataattggggctctttttttttcgcgttgtaacgttactcactttacaccccctcaacactttttttttgagtttaatagtatagcaaactattaattagctttaaaatttgacacatcatttacagccaatcgaatagtctattcatacaatagttatatataaatatatactacaccattaataatatgtaccccgcttttcttttctcttcttccctctctctttcatatgtgctcgtagttagcttatactcttatattgtatttgctgatcttatctcctccacagatacttacagctgccttatagtctactacctccatccaaaaatgttgcaagattcattatcctaggataatgtcagtgaaatggtaaccggggtacccattatccggcaaaaggagcattatcaaataaataacatgatcaagatatctttagaaaataaaaaggtaaccttaaggtgacgtagctaggggcccattctgtagggtctcgagcccacctaagatttcatatatatgattctctttggctgagaaggaatactgtgtatatgagctaaaactctgagtataaaagtatcttggggcttaacttggatcccaagcataccccaaatataccttaagaatatagcctaaggtatgcatccctattccgggccccaggctcaccctagcccttataggttctatggtccttggcaagaggggcatagaaacttgtaaaacctatatcttaagaaaacgagctaaggtctgccttgagcccggcctagtcctaggccccgagctagccttagtccgcacaagtcacgcattactcgagaagtagaagtgatgatacttaccaaacatgaaggcgtaaactgaggtttgccttaggcccggccttgctccgagccctgggcttgccttggtccttgtctggctcgcctccctctgcctagaagggcgtcaaaacgtacaacacgcataatcttgagatattcttccatcaatgacactttcaagaagttcattcaagaataatcaaaattctttaaatgcgggaggacgcgatctcaaaaactgctaggaagttgagcgtgttccacagccagctgtgaggcagcacgccctgccataaatgaaacaggtttatgggggatccccggccagtctggagttgaaaggacgtagacaagacggcaacgttgagtcattttggacggtggtgcctaggacacgcgttgcacatgccccgcgtcacctgatttagccaaacagacagagaagcaaccgtggcgctgtcttgggcaggtcgggcctcatcgggcccaccacgctccacgtggtgagcacactggcagaggcccaactgtctcacacggagcccggggtaatatgaatagtaagatttgaagagtttcttgaagattgcattaaggaatcagccggcaacgacaagatggctgatgagacaagactaagagtagatttgtaataatgtgagccctcttggagtataaaaggaaggggaccaaatacggatgaatggttggattcttttagactttgtagtctagaaagacctcctttgtacttagctggtctatagaagacaacaaacaccaacacaagagtaggatattacacctctggatggcttgaacctgtataaattcctgcctccctctcctcgcagggtggccgggcccatcacgatcacagttacccagcacctctagccgactaaccccctggtcagatcttcactctcggagaggggtctccacttcccgctgtccgaagtaccaccccctcgatggatagatcacatcccattttaggttgcaacattttaggatggaggttactgtactcttatactactaattatttccgtcactttattatccctgccctaatatgctccacggaaaaactgcctgtctatgcaaaggagacgagatggccagatgggagcaaacgatggattgtttttccagatcaaactctgattttggggtacgtgcacgtcggacgagaaagtgagcaaaggcaacagtggggagagcaggtggatcgaggtggccatgcgtgatcgccatgatcgagccagcagtaggtccagtggtagctaggattggagagtacatgccctccgggcgttggtgtagcttgtcagcctttgttggcctcggcgtgtccccttctcgtcaggcaaattattaggggatcccgtcgatagccccccaccagcggccatcgatgcattttgtactagttcctgctttagggctgcatattcaaaccttaagttttccttcactcattgcttagcctgatctccgtacgtaacagaggaaattttcttgcggcatggaagtcctggaaagcacaagcaccggtggcatgctctatcatgtttcaaattcttgtgtctataaacactggagtaaattttatataactataaatattttcacaaaactatagattaaaggtatattttatacaaaatttctcatagaattacaaatttaagatgaagtgtcaaaaaaataaaaattaagtagtaaatatatcacaaaaatatagatttactgtcaatttaatcacaaaactacactctaacataacggtagtgctagagatttaaactatagaatatgtagttttatgataacttcaatattatatatatatagtttcgtgatacttagccttaaatctgttgttctgtaataaatttatcgctaaatctttagttttgtgatagtttgataaaactacacattgttttgagaaatttactctaaatattatgcttttgaagaaattagaggcagatggaatcaacagtttggttgtagcttttcatgactaaaaaaaaaggggaacgccattagtgtattaccattataagtttaaaatattgatttatttaatttgttttagaaacttttatttgaaaaaaaatgctatttaatttagcagtttaggaagcgtcataatgaaaagggtgaatgaaaagaactcagcctaagctcaaggacgttttcgataggaatagttttgcttattaagccgttcacggtgtggggacgtggcgcgttccttcactgcgccacgtcggaaaaacgcccgcgtgtcggtgcgagtcgtgtcccaccagagcgacttgtccccatggagggaagcgcgtttcttcgcctccgcgagtccgcacgggcggggaaagcgcgtcgcccatgcgctgtggagggcgtgccttcgtcgcgccgtgcccccgcgtcgtgcaatccaaccggaggaggagaatgggaagggagcggccaaatccgaccagaggagaaggcccatatggaccgcagctgaggagctcggcgccgccgcaaccctcactccatgctcgtctcgaccgccggcgccatagccctcgtcgggctcgcctcaaccatcggcgcatgcaaccctcgttgggtcgccgccgtcggggaagcctgaggaggccgtcgccgctccacgtcgcgacgaccccgccgatgctccatcgggggagctccttgacgccggcagagctcgtcgtcgtcttcttcctctacgcgccggtcgtgagtgggagagccagcaccggtggagggagaagggggacgccggccaatctcgcgatggatttgggggagaaaccgcgcaccgcccacaccatcgctgccgacgctgtcaactccgctatgagcttcttgcccgcaccggtgaggaggcgtcgatgccgccagatctgccccgagctcgtcgccatccacgccgccattgaggcttgttgccgggagctcgccgaacacacctagcctccatctgcgccaccgggagctcgccggccactccgtcacgcagccattgaagcgcgcctcagggatctccgcgaacgccaacggtagaaggaggagaggagagttgccggcggttgggctaggaggagaggacgccggtggagggaggaggggagagccagcgccgggcatgacatttgtgggggtggtggggtgaggccgtgagggagggggatttggtgagacaacactagttggtgcttgcactgtgaagaaaatgtcttagaagctcttcatcttaggtgccaccatgtggtatctcatagttggtgcttatacagcgagtgcccttgccaggtcattaccacatcaatcaaccccacccgtgaaagcctggtccaccatgcaaagcgaagcccgtacatgtacagggcggcacgcggggtggtggccagcgcaacagccgtcgtcgggtgatctccctctcccggagcccatatgcgcggccggccacagccgcagccgcaagagcgagagcgagcgagcgagactcgcgcgcgacgcgagatggcgtacgagatctctcctggagaggacaccgacgacgcagcggcagcgcagcgcgcgggcagggcagcggcgtacgtacgtgacaccggagcgagcggggtgggtcggcatatgccgtacgtacgtgctccacggcgaacgaacggagaacgcgacgaacgggattattcacggggcgtcgctgtcggggtgggcggggcctgctttgctttgcctgtgtccactttattcattcattcccctgtgaaaacctgcgcctcggctatcgtggattcgtggtcgctgccggtgccagtcggtccgtggcgtttccacactcggagtccatagatcagtcaatcgattctttctgtgtttgggagagagggactatgctgtgtttagtttgcactgaagtttgaaagtttggttgtaattgatacgatgtgataaaaagttatgtgtatatgaaaggtttgatgtgatggaaaattggaagtttgaaaaaaaactttggaacaaacacccgcttgtaattttttcttcttttttatacgagggacaccggatacacagtcaaacaaacacacacgatcgattctggtgtagtatactagtagtatgtcgtgtagatcggcatcaagaacgtgcatatggacgggatatcggtactgtcacatgccgataacgtagtgccgcagctcgtctctgagattgtggtctggctgggcagaatcgattttaagctgacgttaaaccttaacatcgatgtctctcttacctcctccttatctctcccttccttgttggcaagactaaggctgtgttcagctctatgaattaagaactaatctcccacatatgcaaaacaaaacgatttattagctactcccttcgtccccaaatacaaaggattttgatattttgctttcattgtttcaccattcgtcttatttaaaaaatttagaaattattatttattctatttgtgacttactttattatccaaagtactttaagcacaacttttagttttttatatttgtataaatttttttgaataagacgagtggtcaaacgttacacgaaaatagtaaatatcccaaatagtaaatatcccttatattagaggacggagagagtatttgtttgaaaatggattaatatgattattgaaaagagctttcctagattttttttttagaaaaacacaatgtttagcaatttgagaagtgcacacgaaaaacaagggagtagaggttgagagaaacacagccaaggcccagttctttttatcaacttcaaacttcaactttcgttttccgttagcacgctctttaaattgttaaatgttgtgttttttttttaaaaaaaactttttaggtaaaagttgtttaaaaaaatcaaataaatatattttataattttataataattaatacttaattaatcatgagctttttcgttttgcgtgcaccgaaaatatcactactatcaatttacagaacgaaccggtcctaaggattgttatacatgcggatcaatctacatcatcattgtctacatccccacctacaactaagtgcaaatttgtcacatttttgtctgctcctatttattttgttgcttttaagcatttaagggcacatgagtttttttatctctatatttttctaccccatatttatcgttttggataaggatacagtcttaaaaaaactttaattactattttttattataatataaatataaataaatatatgattttattaaaaatactttttaagattaatctatgcatatgatctccttaattctaagacaaatattttaggaattattcataatgaaatatattaaagtttgatatcgacctggttcaaaacaataagtattatcaacctagaaaatcattgaatggtataataaatatcagattaatacattctcatgtccaaaagacaccctcattcacccagtggtacttttacaacttttactgccatactttttttaccgtaaaaaagtgaggaggctcccatggtatattgaaaatggacatttagagggttttttacaagaaaatatggtagaaccagttcgtaagaaatatagcaaatgtaatgtagttgttgtcttaaaaagaatattaatttaacttgtgcacagcacactccgaattattttgcatttcaactaaattccttactgtcggctgaacattcatagtctaacttgcatgatgacaagcagggtagggttgtaggttgtgtggaccaagttgtaaaggtgagggttcacggagccttgctgaggatgagtgacgagtgtaacatccatgacaaaaggaatgaagttacaacgtgaggaaatgttgacatgagtgacataaggctcactattaaaactacacgtgatttgaatttcacattttgccaatccattctagtaactgaccatggcttgtgaaaacttttttttaagtgaaagcggcaaaagatttgccgaatatattagaagatcagaatatataagatacataagtgcgattgcaaatttagcccaaatacgacaactcaaaagggatgtgaaaacttttaagtaaaaggtactctttatttgaggaagaagtttgaatcaccatatgaatttattgcaacggtctgaattacctctttaaattataaaaccagacattctatactttgaactttctaaaccggataaataattaccctaataactcaatttgaagcggttttgattctacctagcatacacatgatagtccagtcagccaaaaaaataatagaaataagtgggctcgacctatcaatgctacatcttatactcccctcttctccattcttccacatcctccttccccttccatctatcaaacaaagacacacacacacactctctctctctctcccctcaacatgagcatgatttggcggctaacgttctccattacttggtgaaggataatagagaggaagacagtgacggcctccatgagatggcagaggaagacaacatcctgcaaagctccgacctccacttgtttccacaccttggcatcatttggggtaactgtagcgatggcagcagcgtccctaggcataggaggcggaacatgacctcctcaactccaccttcaccatgagtacatcatcctctttggcacacatgccaggcggctattgcatgcggagttcgacggaaatcagtgtgagaggagctagttgagagaaggtagtgagaccggtggatcttggtcacaccaaccgacaagagggggaggcaatggcagtcccatcttgacaaaccttatcttgctcccaacctcaccgttctctccttggcaaacaacttcttctttggcgagcttgcaatggagagatcctagggaggggggtaagagagggattgacttgagagggggcgaggagggacaaaaagggatggcaggtggacctatggatttattctatttttatggtgaccggattacaacgttgtcgccacgtgtgtcagctcatgttaaaaccgcacaaatagtgcttaggggttattcgtccagtttgagacgttcagggtgtaaaatgtctggttatgtcattcatggaataattcggactatcgccttaagttcagaggtaatttggaccttttcctttattaaaacagttgactaaaaaatgattaaaattttctttataaaatatacgtatactttggcaaaactaacaaaagaactacaaattaaaacttgtgtaccacagcactgcaaactggaggccaaatttactacaaaactacgtatttaagctcttttgaattataggaaaaacatattcagtagtggctttatgacaaaactacaaatcttaaagcttatcttatcacaaactatagaagttatggattttaagcctatattagaataacaatgtttggatgaagcacataaaatctatagttccatgataaattatatgctaaatatgtggtttaatgatttataaatttaaaatatgtaggttttagatgaaacacataaaatatgtggtttaataatttgatcaaaatatctgtagttcacggaatttaaattgaccaatactaacatctaagaaatgagtttcccatcttcaatttgcagctatgtgagcagtccccgcctactatacgagcctacccagtgcccctcaatcagctggtcggctggtcgcacacaccacgttccttctcccacctccgccatgccttcccgccttctccagcaactgccgcctccgccgccgcctcctcccctcaaccgccgccaccatcacctcctcctcgccgcctccgccgccgccgccacagccacagcgctgctgctgctcctgctcctgctgctcgtcgcgctctacctccggagccgccgcgcccgccgccgcagccccacgctgccgttctcgccgccgccggcccccgcgcgcccgctccgccgctactcccgccgcgcgctccgccgcgccaccggcgggttccacccgtcccgcctcctcgggcgcggcgccgcctccccggtgtacctcgccaccttccccgacgccgtcgcttcgcccgaccgtggaaagaccgatgcctcggttccccccggcaaacggaaggccttgccaaacccccttttcccctttcgggcccgggttttccggggcccattttgggtccccccccccccgggaaaaggaggttttctcccgggccccccgcggctcgtctccctgctcgggtactccggccccggcggcggcgctgacgaccgcccgctcctcctcgtcttcgaatacctgccgcacggctcgctccaggccgcgctgttcggcgacgcccgcgacgggaggttcctcgactggccccggcggctcgccgtcatccgcgacgtggcgcgcgcgctcgcgttcctccacgccgaatgccagccgccggtcgtgcacggcgacctcaagcccagcaacgtgctcctcgatgccgacttccgcgccaagctcgccgacttcggcctcgcgcgcttcaagacccccgacgccatcgccgcctccggcgctggcgcggatgacttcatgagccaagaactcggcgaggccggggaactcttctccaccgcctgtgccgccgccgccggcggcggcgtcaaggcggacgcgaaggacgagtccggcccggccgccgcgtgggggaaggagtggtggtggaagcaggacggcagcggcgagctcgactcccgggactacgtcgccgagtggatcggcagccaaatctgtccggcgagaaacccggactgggccgacgacaacgacggcgacgccaacgataacaacaagaactcaccctccggcacggacgagcacgccgtggcagcctcgccggaggacaagaaggacgccgactgcaacggcaatgctggcggcggcggcgacaagaaaccagaggcgaccaagatgagggagtggtggaaggaggagttcttcgaggagatgagcaagaagggcggcagcttcgacaagcgtcgcggcggcggcggtggcgggggcgggaagccgtggctccggtcgatcagcatgaacaccggcaacggcaatgccaacggcgacggcggcaacaacatcgaggcgacgagcggcctggacatcagcagcttcaggaggaaccggaagcggagccggcggcgtgggcggtccgtgggcagcggcgacatgcacagcggcgacttcctcagccgggagctgagcacgacgacgagcatgcgcggcacggtgtgctacgtggcgccggagtgcggcggcgggccgtgcgagcacggcgccgagctgctcgagaaggccgacatctacagcttcggcgtgctcgccctggtcatcctgtccggcaggcggccgctgcacatcctctcgtcgccgatgaagctggagaaggccaacctggtgagctggtgccggcagctcgcgcgcgccggcaacgtgctcgagctaatggacgagaggctggacggcggctacgacaaggaccaggccacgctctgcgtgcagctcgcgctgctctgcctgcagcggcagccggagcaacggccggacagcacggacatcgtcaagatcctcgccggcgagatggacctgccgccgccgccggtggactactcgccgtcgccgcgcgtccggccgttcccgcggtcgtcgcgtcgcgcgcagccgcccgatgccaccgagtgattggtaactctgctcacttaaaaaatttgatccttggggatcaatctacaagttgccatgccctgtgttcttgcaggagatttaacaaaatttgtcgaattttgctaatctactagtattgtttttttgtacatagcaatagcagcaattcgtcttcccctaattgagcaatggattctttggatgtcaattctaacaattgatcttgcatcttgcaaaaacttagcaatagatttttaggatttagtttctgatttctttgtcagtttcaacatatttagcagaacagtactagtatttttgttgattgttatgtttgtacatgggagatccaaatccatcttatcatggaattctttgcctgtcaatttcttgatgtatcttgtttgcaaggatcactaaacatttttgtgtgatttaattgatttttctctcgtaatttcttcatgtgcctgatcttaataaatgaaaccttggtctctatcaaaggtggagaaaaacaaacgaacaaggtagtgagcaatcaagttgatcagatattttttcagtgctacatccaaattgcacagaaaaggaagaacatttgcgtactccttgtgtgttacgatacctaacatataggtcaaatacgatgcgtctctatcaatcttcagccaaaaaaataacaataatgatttgtagcatagaagtcaaccctttgtacatgaaaaacctttatgaaaaccaaaggtttggattgcttcccctcgcgacaaaattgaattctccaaaattctctaccggataagttggtttatgttcacaagcaaccgatcctggagaaatactacaattagtacatttttgctttattctcaatctatttgctgcagcaaatggagtttcctgtacaataagcggccagtctgcagattcaaaatcaggatactttcatagtctcaaaatgatcaaaaggggtgacttcttcctacaagtttcaaaaagctcattttgccaggcatccatggttggtgttttcagtcaattttcaccaaccacacatcaaacatggttggtgttttgttcttttactattccttccataaaggttttgcttacttttcctcaaggagataactacaacccaggaaaaatattcagtaaatttactccatacacgtgtgaaaactattcctgatgaagtgaagtgaatcttcttggtaccaactctgatcacttgttgtctgaagaaggaaaggcaaaaggattccctgtagaatttcagaaatcaaaatcaaaacaactccctcttctcctttcctagcatgtttcgtgggacgattatgcgtatgttttgttcatattccttagagcccacccgagttgctatgaacaaaattcattcatacgctttgtcgtcttgcgccttttgaggacttttttcacagttcattccttcttgagactttcatagctcccacaaattccatttcagtgggatggtccaaaagtgccattttgccctccaacaccatctagatggccctgaatcagcttcagcctttgattgattactgctgttggagatggtgtttggtgattgttgtatggtgagtccgtgggttttgcatgcactcaaaatgctgccacaatgttcttgctgtggtactcccactgccactgcccacatgacctttccagctcccagtgctcttcatttccttttagtttatggccttcatttgtttgattagggtgtgagatgtccctccctgcactagactaatgaaattgcatatctgttccttcagtttggcaaggcaacaatcctttgttactactggtcaatggttttagtggatgctttgccttgtgacatcatctactcttcaagttgttgtcttaactgaagaatcctcatggctatatgttaaccaatgaagatagcaaagatcttgttctaaaatgctgaagttactgctgatgctttttgtactagctagtagaaaatctctgtcaggaagcactgttttcaccatcttaaacactgtgcatactggtcagttcttctaggagactgacactggacaaatagaatggtcaaattttgttaaaagacaaaagcacccagactgcatgacctggctttgtgcatgatggatcaagttgacctgtaagactgaaaagtcttttttacagtcaatttaatttgcaggccatgaaaagaaggaaaaggttgcatacttacatggtccctgatctaccatgccaagaaatgtttgagctgtgagcctgtgatagactacccttttgtccattatcttgtttataaaactcatgttttgtcacattttggatcctaccatcctagcaagtcattaaagataattaatggtcttttagggtcaaaaagtttgttaaaagtgcaattctagatctgaaaaaattaaggttcaagatagatactgcaaatcttggtgggtatattagcatttctgaagggatggattggatactgaagatatgagtgctatttgcaaagtgttaagaatgtgatgttcatatatgattagataaaatgcagaggggaaaagagagtaaaagtgaaacattctactgctatccgctagaccagctgacaaaagccagctactagtttcttttgtgacaactgaaattccacacatcctaatagcagctccaacgagaggataaaatcgaaccttgcaaaaaacaaaaaaaatcgaatgtgagtgaaaaaaaggggttcatgacagaagtcgaacacaaccgaatagaaaaaaaaattcatcgggttgtgcgagagggaggcatatgcgggtgaggctgagattttctttatgcgtgggtctcacactctcactgggtctatctctaaactgcagcgattgaaccgtaattttgttagattgcatggaccgaactactcgcaacaacgctagagatgccctaagaaactgaaacctaaataaaactcaatttactaattcagatatccaagaggggcactacaagatttcagtgtttctgtttggaaatatattatatcaaaataagttattgtacggttttctatgacactacaatttactatgcgatgaaattactatacaatttatatcaacaaacgttatatacccaaaattgtactttggagatcatgtcaatgtccaaaatacaactaatatttgactaaatggagtaccaaatgcagtactttgttttgagatatcacatttctaactgctactactaatataaagaaaagaaaattcattgtccatatattctccactctcatgtccctatcaacttatcaaggcgtttctcaaagaaattgatctatgagtcgtacgtaattccattattggatttgtctttcttgttaagtctttcccgcgtgcgtcatttaccttttaaacatgatatcctcatccatgtcactgaattgactcactgaatttctcaccttatttttctttgccttcacaaaacaaaaaaaaacatttcttttttctcaacaacattagctagagtcttcctgggtgatttttttactccctttaattaaattccgacaggtcttctgccgtcgttcccttaaaaaaacattagctagagccaggttgcttctacttcatatggggtcatatggggtcccacacgaattcatgcgatagtgctaattccctctagctaggcagctcacgtctgttgcagatatgctggataattattggaacaaaatattttttttctcagctagtagttaagatatacgatgtgccagcccatgaacacgggttttctgctcatccaaggccatgggccacagggacatgacgtcaccgtatgtatgtgttgtttactgcatttttttttccaaaacacaatacataggccgtgtttagttctcccaaattcccaactttccatcacatcacatcacatcgaaaactttcctatacatataaactatcaactttttctccaaactaccaactttctctaaactttctaacttttccaccatctaaacacagccataagcatgttcatataaacggtgctaaatgcgagcatactactgctataaacgcctacacacactctatccctataaacaggggcggagctagaacaaaacgaagggggttccacttacttgctttactctggtttgaatcaaatttagcttgatacggtgtgacatcccagcctagggtttaataggattaatataatactcatatcaacaagttgcagcttcttttccgaaagccgatttccaaagaactccaaggttaagcatgcttggcctagagcaatttgggatgggtgaccgaccgggaattctgtggccaagaggggacgttcctggcctggggttagtcgacggggacgtcttcccggtgcgcacgagtgaggtggcggacgtggccaagagggccacttcctggtgcgcacgagtgaggtggcctggggttaatcgacgggggacgtggcgaagaggggacgttcctggcctggggttaatcgacggggacgtctttccggtgcgcacgagtgaggacaaagtgtgcagaaaagacacgtgttggtctgtgagggcagtctatgacttatgaaagctgccagatgtaagcgggcccggcctgggagagccgggacattacatacgggtgcctaaatttaaactgacggggtatatatacagtgaaaatagataaactatagctaaattttttttgaaccgggttcctaggcacccctagctatactagctccgcccctgcctataaacacattcgaatactagatctgcatatcttaacattcacgaagtgttcatatacgactcgttgtcgatgaaaacattgcatataacttgagaaaataattagtcataaatacgagcacctcgtgccaaatctagcacttaaactcgggtgaacatgttccaaaaccaaaaaacctaacctaagtagctgagcaaggctcacttgcataaatttgatccggtgaaaaccatcaaataattaaaaacccgtgaaaactagacctaaaagttttaagaaaaaaaatcataacactccaccaaattccaaatccaaaataaactttattttgaagggacaaaacaaacaaatattgaaaaaaacaatgaaagtcccacgttctggagcagttgtcaaatccacgttctagtttcactgtttttttcaagggctttatccaaattcttatgtcagcttctcgttcctccaatattgcgcactaagggtatctacaatgcaagctactcttaaagtgtccatactaactaaggacactagtagggaaactcagctcgtaatggaggacactcctagatgggctcctcaaaatctgaagcaactaatagagacactcaaacccacaatgggtatcccagtccacaaagccccatatttatttttccaaccctacccataatctctctctcgccccctctttttttcaccacgcacgggcgcctctccatctcaccgccgcactcacctctccctctcgccgccgctgccgctcgcctctcccgtcaccggcgaccgcgaggacgacgaggagggccgcctctcccgtcgccggcattcaccgccgcccctctttctccctctctcccgtcgccatcatcgccatccacctcggcctcctccgtcgcgccatcgtcgccatccaccccagctctctctcttcggcggtggccgcgagaacgacgaggaggaccgccgcggccgccggagcttcatcggcaagggcgacgaggatagccgcggatccaccacctccgccttggatccgtcgctgccgctgctcgccgccgctcgccgctctccccacccctctctctctctctcgtcgctgctatttcaggccacagctcaagacctccgtcgacagctaaggcgagcccgggcgatggctactgcggcgcggtggccccgtcgtggatccgtcgtcgtggcgcgtggttggcctctctctttcttcggtggccggcgagggtagaagcggaaaaacaggaggaggcaacggtgtccttgggctactccctagccacgccccgcccagcgcgcctcctcgctccccccccagctgaggcgctcgtagagccgtgtccctcagctgggggacggcaaagcgacggagcggagacagccatgagcagggacacgctcggggatacgcattggtgatggcctaagggtatgtttggcacgtgcatagctccagctcaggtgaaactagaacccaatcaaatagtttgagtttagaaatttgagccctgccaaatagatcctctaagtgggttttgtttggcaaggttttgtttgtcatgtagaggcccgcaccccgctctatcccttagtttattctttagatcaccttagcttgctccgctttcttttgagtgaagctaaaccgtttggtttggatatagctctggaagaggaactgtagccctgccacgcaggcccaaaattgtcatatgtaacccacatatgaccaaatccaccttggatttggttagggcagtaatccagttcgaaccgttttagagattgttcggtattgcgttagagggaataaattggcctaaagcacaaattgaggagcaaattagactttttacttttatgagagggataaatccaaattacatccttattgggtttgttaaaaaaatatacttctcaaccatgaaaccaagcatttaacatttgtacttaaataccggtgaggctaatacaatccaatttttatgagcttgacatctaagcaatatatttttgagtaatttcagtcaaaattacagaaaaaaaaaacacacgagaatttttgtttgtggaataggttttatggtctaggggtttcacagaaccccacctttctcaagtaaatttgatatatatgaaacaataatatcaaaaagagtaaattaattacactctcaggacataaacttggtggatgtaaatagctacaacaattataaattgcttattctcaaacaataacttgtcatgagaacccaagccaaaattatccatgcaaagcaaaattgatttaacatgcacatactaatgtgtaattatattacatataagattttagacctacagaatgtgtaattattattcgtaggatatttttaagatttacatgactaaaagggaaaaaatgctaaaaatgtcagaccatgaaaactaattatatttgttcagaaaaaccgagaaatgccattgacaaatacaaaaatctaataaatatcatcaacgagtgcgagttctataaaataccattttacaagcactactataaaatatcaaataggtgtcgccactataggtgccagtagtactaaaaccggcacctatagaccttttcctacctccactagttgaaattacaaaaaaaccggcacctttaagtaattattggtgtcggttctaaataaaaaccggcacatattatattctgtatcggttttttt

SEQ ID NO: 9935 - DNA, 103444 bp, Oryza sativa
agcgccgcgccggcttcgtggcgcgccccggcgacgtcgtgctcgcgacgctgcccaaggccgggaccacgtggctcaaggccctcgcgttcgccaccatggcgcgcggcttgttcccgccggcgagccccgaccacccgctccgccgcctcaactcgcacgactgcgtgcctaccgtggagagtggcctgttcgcgtgtgggcgggagggtgtgctggacaagctgccgtcgccgaggctcttgaacacgcacctgccactctcgctgctgccttcttcaataaccgacaatgatgattgtaagatcgtatatgtttgcaggtaccttctttttcctactccctccagttttggatttgtttacactgcacaaataatcatcagtgcccgttccaaagacctcaaccaattggtcagcacctatgtccagggtgcataggtgccggatctggaaccggcacctatagttttcaccgaataaaaaaaatcccggccaccgccaccccacacctcaccaccttcaccaccgtagccactgccgttggctttctccatcattggcgctgttgtcggatggagagaagaaggcagcagagaggagaggagatgaaaagctgttgccgttggtgcgtctagaggaggagaaggcccggaggaggatctggaggaggtgaaggctgggaggagaaaacccaccatcacctcgccgctcctcaaggtgacgagaaccacccaacggtgttgagaagcgaagaagacggagaggagcggcatacttgagagagagatagacggagaggggataaggttgtgacttgcagtgcgtcagtggacttttttttaataggtgccattttttaaaagaacaggcgcctatagtgctggttttaaaagaaccggcatctatactagtataggtatcggttcttttaaaaaaacacctatagtattggtatcggttgttttctagaaccaatacctataatataagtatagatgccggtttatctagaaaccaacatatacagtattggtatcggatttttccttgaaccgacacctatagtgtttaaaggtacaggttatatttttttcattgcgcgcagggtggaaaaggggggcataggtgccggttttaaataaatcggcacctatatgccagtccttattagggtttttgcagcaatgttactcttcttcaatttggtaaaattcatagaaaaatatagcaacattttcaacatagaataaatacaatgtctgatgtttctcatatcatgtcattaacttttgttataacatttgaccattcgtgttatttaaaaatttactgtaaatatatgctaaactataagtcaaaccaaaagtttctttgataataaaacaaatcacatcaaaataaataacatgtatataattttttaaataagacaaatagtcaaatatcatgctaaaagtcgacggtattatctattaaaaatatcttatgaaagccacctagaaagatgttgggatgcatgtcattgacaagccaaaaacttgtaccggtccacatgtcaatagcccgcgataaaatattttcgagatggaacattggtatatttcgaaaaaaatatttaacatatatatattagtttctactaaatatttaatatattaaacaagatactataatacaaagcaaaagtttatccctaattacatactacttgtcataccctgggcatatgataaaaaaaagactaactaattagttgctgcataatctctttgcctctagagccaacgtttatggccgacccctgtcggagcacactctagggcccggtcagccggtgccatggcgctagtggtcggcccataccagagtgcgtgcttggggaatggggacgaccgggtcctcatgtgaggactctggctgcaccttctcctccacctctacaggtgcctcctcctcccagctggttgatgccctagacttcacctcatgcgatggccccacgactagtcgattacccatctcatacaaggaagatgaacaagacatgacataggtggacacaggggcggagctacatacagctaggaggtgcctagaaacccggttcaaaaatttttttacttatagtttatctattttcaccatataaatactctattagttcaaagttaggcacccgtattaagctaaatttgattcaaaccagggtaaagcaagcaagaggaaccctcctttattttattttgtgctagctccgaccctaggtgggcgtgggcatttaacggcacaacctgaaaaattgcatgatatgagcagggtattaactgcatcacacatgtaaataaaccaatgttttcataggtagagttataagacagttgcctgaaaaaaacatgttaccttgggagggcgcttaaggtagtcgcccatggtattttgtttacataacggtcgtggacctcccctaccatggtaaacataaagcaggtgattcgtatcttcgtccacctctggaattaaggtaggggacatgcaaaaattattttcctactagtgcgatccaacgttcatgatttttggatgacgtggatcaatgcatgccgtgcttttggttttcactattagaaaagtttaagagttaattgcatctcttgaattaaaatttgttgctgacatgctaatttgcagagatgagaaggacagagcagtctccacatggcacttcatcaagcgtatcaaacgtattggatcagatgtgccattctccgaggtgtacaagtctatctgcgagggcacttctgcctgtgggcctgtctgggatcacatcctcggctactggaacgcaagcaaaaaagagccaagtagggtactcttcctaacatatgaacagatgctccaagatccgatgggcacaattaggcaattagcagagttccttgggcagccgatttctgatgccgaagaagaaacgggtgttgttgcagagatcgtagagctttgcagcctagagagcatgaagaaacaaaagatcaacagggaaggataccagggtgtcggcattacgttctcgaacgatgcctacttcagaaagggagtggcaggagattggctgaaccatatgaccctcgagatgggacaacacctggactcaatccttaacgagaagtttgatgggtcagggttcactatttgatgctttctctatgtttcttgagaggttgtttgaataatctgcttcgggaaaacatctagttttcctataagccacctttagcatgctatgtggtaatgtggaatttctcgtgtggactttcaacaaagaataagcgtataaggagaaccagttctcactgtatggagaattatgtaacactagtcgttgttgacccttgcattgcacgggtatcattatttacattgtagacatatgttaaacctttaaattgaaattgcaggagtggctgaaaagttagttgaaattttaaagatggtattttgactaatttgtatggctgtggcatcgcccatgtccctcgtgcgccattgccaccgctctcggaggcaaggcataatgcatgtcatgccctgaagttttcctttttctggtcttaattcatttaataaatcgctaaaagaaattgtttaagtttaaccttgagctaaccctaattaataattttatttaataaatggaaatagcttggtgggatttttcttgagttccctatgctttaatacaccaattgaatttttagtggaattttttggcaagaagacaatcacgattaggatacctaaagccttgcggtggtatggagtcgctaaccaccccaacctagcaaaaaaactagatcaagatgggtttcgatatattaaccggccagcggagtcgatttagatggaactaaagatgaatacatgtttcatgggcgaatagaaggtctatgggacaaacctgcaaagatatttcgcactctcacagcgaatgcggacgattcataacgcaaatagataaagatggacaaaactaagctaaactaggcgaaaagtagatgcaatatcgaaaaaaatgattcaattggctatattgtgttgaaagtagattgcttccaatagaaccggccttggcccttatatagaggttggtcggatcaagcctcacccgttacatcgtatggtaaagcctagtctgaaattttgtgattttcacaaaaagtagagggcttttatataagtactaagaatggggcacatctcacgttccaatgagattacatctcttgaaaagttaattactatccaactccctccattaaaaaaataaggtccaactatatttttaaatttttttataatataagacgtgcatacatgagtgtaattaactagcacctcttctttactaaggccccctttgatttaaaggaaattcataggaattttagaggattttattcctgtaggaatttttcctatatagccctgtgaatcaagggaatggatcttatggaattctatgaaattcgtatagaatgcataataccatgcaaattttggaggaattctaacataaggtagaaccttgtggaaactttcctttcagtttttatctctcctctaattcctgcgttttacccgtggtccaatcaaatggttatttctatgttttgcaatcctctattttacacttacatttctatcaaaatcctacatttttcctattcctatgttttctcaattttacgattcaagggggcccttaaaattattatttacttcactttcaaaatctctaattatattggttgcatgcattgtatcttttaaggtgttccaaatgaggaggtgttccaaatgaggaggcgataattgttgttcttttatttgggttaaaggtggttgtggcttatattttggattagaaggagtattgtataagttgtgacaaatctctaattttattttttctcataagagcggcgtgggtggagggaaggggcggtgctggaggagggcgtcggcggcggcacggccggaggggaggtgcggcttccctccctctccctcagatctactctccctccgctgctggccgcgacgacaacgccgatgacgacgccgcttggatccggggaggggaggggaggcagcagcgagaggagctgaggcggcagcggcgacggcgtggctcccctccctctcctctccctccgcggccagccgcaatgacattcgctgcgacgacgacgatgacaatgactccacctagatctgggaaggggaggggagctttggcggtggcgcgcggccagaggggaggtgcggctccccctccctctcctctcccgcagctctactccttcgtgcccggccgtgacaacgacgactaccgcgactacgacgataacaacaacgacgacgccgccgttgccgcctggatcctgggaggggaggggaggctggcggcgccgccgacgggttagggtggtggcggcggatttttttttattcgctaaaaatattttcgcaggagggtggttctactgcctgcgaaaatagatgcagcctgcaaaaatggttttcgctgggccgcctgtgaaaatcatctattttcacatgcctttgcgtgtaggtggtcctttttccgtttggaaaagcgattttctagcggtgtgtgtttcagtgttttaaaagattgaaacattttcgatttagttggtgaaacattttttttaattagtgaaacagcacgctatttttgacaaactaatcggtgcccgatttataggtgctccgaaaaggaccggcccttaggagaaatacagttgtacaacttctgatcttccgacgaacatacaggcacgtacgcacgcaggccagccggtggcgacacgtcgccgtggtcatcatcggccggccggagcggtatgtaaaacaaaagcggcgcgccggcgatcgctagctcacggcatggcggcggcagggacgaagggaagcaggcccttgtcctggaggctgacgacggtgtcgtacaggcactggctcgccggcatgacggcgacaccgagctccgccagcttgcggctgctgaaccggcacccctcggccgtctcgccggcgtcgcccttgcacctggtgggcaccgggtaccccgggaagagggcggccaggatgcggcacacctcgccgcggtgcagcgtgcggccggcgcagaggtagcggccgcgcgcggcgggggactcgtaggcgcgcgcgtgcgcgtccgcgacgtcgcggacgtgcacgtacgcctgcgccgcgtcggcgtaggtgcgcgccgagccgtccaggtacttgagcacgtgccacgtgctggcgttcaccccgcgctgcagcagcgggccgagcaccagcgacgggttgacgacgacgaggtccagccgccgctccttggcgagctcccacgccgcctgctccgccaccgtcttggcgtagcagtaccagtttccggtgtccctgcagtggtcgaggtcgctccagcacgtctcgtccacctcctcgccgccgccgccgcccatgtacacggcgccgatcgacgacgtcatcaccacgcggcggacgccgcccgcgtccgccgccgcggtgatcacgttcctcgccccgctcaccgccggctcgatcatcttctcctgcgagcatatgcattccggtcagtctctcttagactgtcgaacacgtacggcgacgtcgtctcgtcgtcgccggcggccggctggtgcaggtgatgagtcacgtaccgggtcgtcggtgatgggggaggcggtgtggaagacgccctcgcagccggcgaacgcggcggcgaggctctccttgtcgagcagctccgcccggacgagggtcagccgctccgcggcaccggccagcgccatgagatgcgcgttcttggcagcgtcatctgcagcaattaattagaagtaattcattagttaatgagttagctaaagaaactagaattaattagctagcgctgactaatcacatcattagtgattaattttgctaccctttctgttgctaccagggttctcgatcgagcgcggtgtgtcagccagccatatgggccggccgtgttcttcgctaattacttaattataagattaatcgatcgagggtcaaacggttgagatatattaatatcgggatttgcaaaattaggagattgtgatagttgatcgttgcctctttatttctcagcatccccgatatattgctgcaacggcatgtgtatgtacgctgttttgctcataagatctggagtatgtttttttatcatgtgtttcaacatgaaggtcctgttcgacatatcctgatctaagattttcagagttggatatttataactctacaaatccaaatacataattatattggtaacatttgaataaattattttaatctcattttaaataaaatataatttttaaaccactatgatttaacataaaaaaattaaacccagctagcgtggatctggaacaccaaacaaactgcaaaaatacttttatataatacacacataattacgtattaatctacatggatttcttaaaaactaccgataacaatatatatacataccagggttccgaacggtgccgcggacggcgtagcccttctcgaggaggagcttgacgagccacgacgcgatgaacccgccggcgccggtgacgcagacggtgcgccctccgccggagaccgccgcggcgccactgccgccgttcgccgtcgtcttctcgacacccatgctagctagaacctagtgttaattataatttgctaggaagaagagaaagctagagcttattagcgctgcaaattaagctactaactatatactatatgtctctctttgcaacaagttcagtgtgtgctgaagtagtgaagtgatcgaaacaaacgatgagagagggggtataaatagtgctggccgggggtatatggcggatgcacgcgtgatggccgcccgggggtttggtgtggccacatgcgtgtcacgttgtggcgtcttcttggggttaacatggcgcagatagcgtgtatctatgagagaatctcttcttcgctaatattctatgctggttttccttgtactatttgtttttgttttgaccataacttgggaatcatctgttaactggaaacttcgttttagggtgtgcattcctcgtttatgtcctgccttacttctcgaagaggaaaggcgtgtttaatttgctgttcaggggaatctgcagtttttagttttcctaaaaggaggcattgaaagttgttcagcttctggataacaactcgcaagtcgcctgtacttttacatggacggtgcataagtgtaattttgtaaacattctttatttgatgtagtgtataataagaagaagtattttaaatggagaaatgaaaacttttagttctatcatgatattagagtctctcggccacagtgccgtctctcttcgtgtgacactggtgattggcacatgagctgtctctctttctctccctagaccccgatccccgcttcccactcgcacattctctctctctcttcacgcgccaatgtcatcatggctattcactcactctctcagaaagatgagaacttcttgcgagatgcgtagaggtgagatccgcgtgcaacaacttctctggcactcgtaatgttggtgtcggtggtggcgctagctatagggtgggccgttgggctcacaacacatgccatgacaagagcgacatgcagctacgcggtgaggtgatgttacagccgtgttaggccctacaccatggatgggatgcgatagacctcttgctcaccctcaccgttggtgcacttctctcccctatactaagaagctggcgagatctcctactgtagcccatgagataaggctgttggggaggatagagccgtggaggatgtcattgaacccattggtcctaagatggaggagggcagatgagggctcatgtcactttgtcatccctctctcaccctgatggctcgtccccacttcattagagctagatttgggctcccaaggcttgctcgtgacccagggcagtggcttgtgggagggcgaagatggcggcagtttgcggcgggcaaaaatgcattttttcttccaaattcttttctcttccttttttgaaacttgcacgatgttgtttggatttttcttttcattttactctcaagtaattccgtacttttctttgattgaagaacaagaagaaattgaaaggggatttatcttcagattacaatgggacatatagttgggaagcatctagaatttaacttattattttctggatttcatttatatttttatccccttatttgattttatcaggtaatgctacaggtgtcttcaaccttttttatcattagtttagctttaatattgttttgtttactcctaggtcacttggatcaaaccaaatttgaaggctctatatttctctagattttaattttttattcttttccatgagcttgaagtattttgagtgatgactcctaaaagcaacacgcgtcaacaatttatatattgagcatccctataaaccaattcaacttgcagcaatcctgccagctttagatggtataagataccctacattctcccacaggcgtattatgtttcagccatgtgtgaacggcgtccatgataatttcaacctgtgtacgtacacgggatttgccacacattttccacgaacacttgcaaggccaatgcaagtggactaaattcaaagaccaagcaacaatgtgaactgaatctcatgcatcaaattagaacattaattgtggccggcgacgatcgagtcaaacataaggcacgtatataattaatatgtacggagtattaggtatcaaatgaacgtctcttttttttaaaaaaaaaattagtactcctcgcagctaattaataaggccccagagattattaatcttaatattctaatcgtcttcacacatgcaccttccctaacatgcactgttactctgcattgatgatatccatgtgaatattaagatcactgcattgaggaataggacgacgtgagagaatagattaattaataagattccgagttcaatctatttgttaaatttgcagattaattaattttaagtggtttcacatcagatgacctgagtcatgtatgaatatcgatcgtatgtcatgcaagcggtagttgcatttgcagctaattaatagcctaatagcactactaaaaaccctagtcactcagaaccggcacatattagcctttcccatcccccgacctctaggcggctttaaaacccgcatatatgatgcagtactgatttattgaaaaaacgataccaataataataatataggtgtcaattttttttaaaaaatgtgacactgatatgtaataaaaccaaagtgtagtagttttgaaaaaacaacacttttaggatggagccaaaccgaggccgagcatgtagtgggaaaaatagaaaaagaaagccactaaggtctgatttagttccccaatttttttcccaaaaacgttacatcgaatctttgacacatgtatggagcattaaatatagataaaaataaaaactaattgcacagtttgcatggaaaatcgcgagacaaatcttttgagccaaattagtccatgattagccataagtgctacaataatccacttgtgctaatgacggcttaattaggctcaaaagattcatctcgtggttttcaggcgagttatgaaattagttttttcattcatgtccgaaaaccccttccaacatccggtcaaacatcggatgtgatacctaaaaattttcttttcgcgaactaaacacatcctaataagtcccccgtccattgtttcctccgcttcttatcctttcccaatctctctcatcttccatctccccctccggtcccaatctctcgtcaccttttcctatcttcccacccacacctggttagtggcacaacaaggcctttcttctccctgccatgacggccatcagatccagccgatgggatgagcagaaggagtctcctaggctgctccacttcttcctcttcactgtcgttgttccgcctctattacttcccccacgtgtgcaatgttgatgagatctgctcaggagggaccgagggagggaaaggtggaagagcatggagatacggtcaccacgtgcttggggctctagaacagcaaggtcaggttgctccatgcactaatacaaaagacattttctcaaacggtcaaaatcaatttttccacgccgttgagccagccgtttgcatcaaaaggtctttaaaattagcgatttttccatgcgggtgtttatgcggaccgcatgcaaagataaaaaatcacaaaaaaaaaacaaaccctagcgcccccctctcccgccatcactcgctcattcgtctgcatcggccaagcccaccgttgctgctcccgccatcgccggcgccagatccgctgccgcagcgcctccctctctagatctgccgacgcaatggggagcggagcagccaccggatccggccgcccttgtgttgatagaaaacacgaggcctgggagatctgcttaactccagtgcaggtccaaaactcgtctttggatgtatgagcgtgtcagttgatttgatcctgcaatcaacaagaaacaaagacaaagaaaccgtgattaaattcataaatgatagccgatcggctagatgccgatgacatatcatttatctttgagccgatgtcatgtgtaaatcgatcggcaattgtttaagtaaacaaatcagaactaaatctactcgatcggctgtagatatcaatgatatataatccttatatcgatatatacttgaatcaagtgattgggatagatcgatcaccttgccgagacagtataaatcacctagatcgaaatatatattaataatgagattatatatatattcatagcatagccgatcagatagatctagcgtgtatcggctaatactgcgatactactttatattaagatattaaagcaaatagaatatactaaacagaaatctaatatacttaaatgcaacaagatcttaacataaagggcagatctaacatgttaattgagcatgtagaacaaaagcaattggatcagataagatcggctgaaactccgatactaccctaatcggcaaccagtaggtaggctagagattgaaattctaagcacgacttaatagatcaaactcaactgatacagcattaagtataaaaagaagaacaatatctagacaatcaagccgctggatgtttcatagagtggtggatatctcatataatctaagccaacgtcgttatttaacctaatcggctgccttctggtagcagatgttagccgattgtaggttaaatgacgatattgtcaaggattatgcaagatatatgataacttgacagattacataaacaagattagagtatcataaagatggaagcgctaatctcgagaacacaagccgccataacaagttttacctcttgttgaagatcgaaactgatgcagctcaacccgaaagcaataactcatcgaaataaaacgaaagcaaaaagggtggcgatgcgccgaaattgtattgaacgtgtgtatgtttttattacatagggctcggggtctatttatacccgagaaatacaagatatgtccatattggacacgactcttatctctaacaaactctaagataccataagtctttgcggcagacttttgcccacattttatctctaaggaatttacataaaatatcctaattaatagatacaattgccttcccaggactctatccatgcgtgacaatcatcttgaagcacatcaactcgaacccaatgttgcacacgggtcgtattgtcggaatcggctgtatcacttaaccagtccaactcagacttagccgatcccagtcgtagccgatccggactccagccgattcttactctgtttccgaaaaaacccttatcttcgattccgcttcgatttcatcttcatctccgatgctgatattaccaaatttggtcgtaacacatgccccccaagtccgggatatttggtaatgttccggatttaccgtgtatagactccgagcaagtttcgcactctgccgttttcccgattgttactctagtgcttcaaatactaaccgttatccctgagaaatctcacaccgtgacttccgttttccccgcttaagcgaaactttaccctctctctctccggcgattcctccgacgcgcaaggcgatccccaggcgacttcatctccggccagatctccgcctgcgacgatgtcgacctccgccagcccatctgccgcaccatcagccgaatacgctgaggtaagttaccatcggctagatcccctttttcatcattggatcggttttctctcgcctcatactgctttcttttctcggttactctgaacttgtagcatctctccaatttagtcgcaattccaagcttgtcgcatgaaaaccactactttctcggcccaatcggcaaccccgaccccactgagttcatcatcggtgagaccaataggattccttttagactgtccaatccagatctaggtcattggaagaacacctttaaatcttggccgtctctagaaaaaacatcacccgagaaaagttggattacatggttcaagcgcatgtcggctagcaaaagagttcactgggatgaaatcggaatcggccaagcacttgacctaaccatagcaaactcagccaaggatgaacctctaatggcagctgcctcttacttctggtccaacaccatcaacgccttcttattcaaccaaggaccgatgaccctaactctcatagacatcattatgatcatgggtctggatgtcacctcaacggctaaccccatgaatctgaacatgaagaaccaatacgacttcaaaaccaagagtatacgaggttggttaggctatgtagcagcatacatgagccagggttctgtcaccctcgagaacatgtggcctttttgctaatgtggctagaaaaattcctcttttatggatcaagctgtggccctacaaccaactggcagttcatagccgaagccttggaagcaaagaaacaatttcctttaggcaaaatcctcctcggctacttgtaccaaatgctgaataatgcttcggctaagttagctgtcggctcagtagttggagcaggtggaccatggtggctgctgcagacttggttgaatctaatagtcatgaaagtcgttaatcggccatccgtcacagaagctgaatttccgagattagagccgattatagaagatgacgaagaacgcactcatcgccgatgtatgtcatatagagtatacgcatccacaccggccgatgctggagcaaagttatcagccgatctgctcaaagattggttctgcagtttctatgaaggctttcaaaaagatgctcgagtttggtttccctatgaagattcagcagacctcgagctcccatcagatttcagattcaaagacattaatcatgaaagattccaaacatccagagaagtcttcatagctgcaatcagtccatgcattcttccagtcggcatccatcaaggaagaaacatccaagcctcttatgaattctatcacccaatgagttcagctagacagcttggaatgggccaactcccaatcggcttattctttgctgacaagatccaatgccgaggagaaatttcatcaaccttgatgatggatcggctgctcagccttccaggaccccctctgggcagcattgaaaacatagagctagcaatgttcaggagcaaaaactttgatagatggtggggtgaatggaagttgcatctattctaccaactagcttcaatgtacatgacaaacctctttccagatgttgtccctcaggtaagtctttgactttacttgatttcatttgaataactgcttagccgatttaccttaactaatctcttctttgatttgtagacaacagaatcctcccctcctcgtcaaagcaacagtggcagggacatcacctacaccccaggcttaattcctaatggaggtgggccatctcctcctgtcatcggctatgatgcccccaagacttcagctcttcttcaagagctcatcagagaaccagccgatgccggcaagaaaaggaaaaccagatcatcagctgtagatacttcagccctggctccaaagaagaagatcaaaaagaaagctaaaccagctgatgatctgcctgccctagatccatccattgaacaagctctggataaagaagaaatcggagaagatgttgatcaagccgcagccgaagtaagcgatactgaaagaacaccatcggcttcacctaagcagacccctccaactccttctgctccaactccttttacaagagtaagcaaccttctctaaccacttttgtaatcatcttactttatagccgattgctcacatacctggtaattgcagaaaaggaaggctgctgtgaagaagaaatcggctccaatggcatctaaaccagctccaccggtacaatagccttaattctttcattagttaatctcagccgattttatataacacttgtctattttcagcctccttcctctccttctcctcctattcaacaatcatcaagcgatcggaccccatcggctgtagggagtcattacatagaagaagaagttcaactaactgctccgactatcccagtaaatttcttataaccaacatatgcagatcggttatgcctatttgatctctaactctctttaaatcatcactgcaggtcttagccgatcttttctcttttgatatcagagattatcttgatgaagagacagaggttgacactactagcaaagctctagctcctttctctgatgacgtaaagaaaactcttgaagacatctctcatcagctagagacatcgtcactagacagcctagtagtcgactgtggatcaattaggactcatcttcatgaggtccaaactcaaatcctagatgagttagccgatatccttactccagctgtttatcttgaacaacatcaatttaagctggaaaaggccaagctgagattagccgaacatcgagagcgcaaagacattgaagcaacaatccaggctaatcggcaacttgttcatgaagaaaaagccaaactcgatcaattatctgaagtcccgatcaaatccaatattgaccggcttgaagctcgcaagattgaactcttagcataacttcaagaatgcaatgccaaactggatttagagcacaagaagttagccgatctcccacaatctatcgaagaacaaagagcaaagttaaaatcggctatcaagaatgttgctgatatgaccaaatctctgaaggtcattcctggaaccgatgctcaagatgcccaagccatagaagaagtacaacaaattaggcagagagctatatcggctatccagcaatacttatctcaattttgccgattaatatgacatataagctttgctcaaaaatttttgcaaaaaatttttttgcactgtattgtcttctgtattgtgatagacatatatgcccccccagttttacaatgtcaagaacattgataaaaatatgaaacaactaagggcaatataacaatatcggccattgtacatcggcaactctcaaccgattacaacaaaacaactaagggcgatataacaatatcggccatctcaaggcgatgcaaacgcaccggctatcatgtatcagcaatattagccgatcatgcatcaacccaaacacttgggtaatatttcttcaaatacttgccattaagcgctcgcccaaaaacttctccatcgagtccttgcaacaggtatgctcctttagacacaaccttatggatttggaacggcccttcccaatttggtgaccacttgctgaatttgcaatcccgagttccaatcggcaaaaccaatttccacacaagctcaccgtccgaaaaagtcttaggtaccactttcttattataatgccgagcaacacgttccttatccctagtaactcttgcaagtgctcataattgcgactgaaccaagtcctccggttcatcggccataagattatagtactcttcggctgtcaaatcattttgcaactctgttcttcttgagccgatttgaacttcccatggtaaaacagtttcatgtccataaacaagcttataaggaggaacttggattgatccatgacaagccatccgataagaccacaatgcttcggctaaacgggtatgccactgctgaggataatcagaaattttccttttaatcaacctgatcaaacttttgttagatgcctcggcttgcccattagcttgtgcataatacggtgaaaaattcaataatttgatacccatactatcggcaaactgaacaaactcataagacacaaagattgaaccttgatcagttgtaatagtctgaggaataccaaatcggtagattatatgttcttggacaaactgtattgcatctccagaatcagccttcttcaaaggaatcgcctctacccatttggtgaaataatcagttgccactaatataaacatatgccctttactcgatggtggattaatcatgccgattatatcaatgccccatcctctgaatggccatggtttaatgataggattcatagccgacgctggcactctctgaattgcaccaaatttctgacaatcttgacagcccctataatatctgaaacaatcttctaacatcgttggccaaaaataccccgtacgccaaagtaaccacttcatcttatgagccgattgatgagtaccacaaattccctcatgaacttcgccgattgcaactttagcttgatcagcgctcaaacacttaagcaatactccatcaatcgttcgataataaagctcatcattcaataaaacatatttcaacgccttatatcttaacttcctagaagccgactgagatggatttcgtaaatattgatgcacatcatatctctaatcatcggccgttatggcagcaacttcaatctgaacatctttgatcatcggcttatatcctgatgccccttgagctagatcattggcctcaatattctgctctcgagatacatgcttcaaagtcactagccgaaacttcttcatcagttcttggcacttctcattataaactatcaacgtatcattcttgcactcatattctcctgccaactgactgataaccaacaaagaatctcccatgatttcaatagcatcggcttcgacctccttgagcaattgcaaccctttaagaactgcttcatactcagcttgattcgtcgcataaggtttaatactataagcaaactcaaagcatgccccccgaggcgaaattataactaagccgataccacaaccatgagcacaaaccgatccatcaaaaaataaagtctagggcacaatctcaactgagccgatcgaatcatcatgatagtcaactatgaaatcggctatagcttgccctttgactgccttcggcgactcataccgaagattgaattcagttaaagaaaatatccattttccaacccttcctttcaaaattggagccgacaacatgtacttaacaacatcggtcttacatatgatagtgcattcattggacaacaggtaatgccttaaccttgtacatgaaaaatataggcacaaacataaattttccacagaagaatacctagtctctgcatccaagagcctacgacttaaataaaacacaactctttcttttccttcaagctcttgaatcaaaaccgagccgattgacttctcaccggccgacaaatataaccgaaaaggtactcctttctgtggagaaatcaaaactggaggagaactcaaatattccttaatattatccaaagctttttgctgctctgccccccaagtaaactgctgatcggcctttaattgtaataatcgcgtaaaaggctttaatcttccagataaattagaaataaaccttctaacgaaattaatcttgccgatcatctcttgcaattctgttttatcctccggaggcttaatcttcttgatcgcactgatacttctttgggtaatctcaattcccctctcatgaacaagaaatcccaagaactgaccagccgacacaccaaaagcacattttgtcggattcatcttcaagccatacttcctggttctctcaaaaaccttcctcaaatcggctatgtggtcctctatctctttagacttaacaaccacatcatcaatgtagacctcaaccaaccagccgattaaatcatggtatatataattcatagctctttgatacattgctccagcacttttcaagccgaaagtcattacaacccactcaaacaatccgattgcaccgggacacctaaaagctgtcttatgaatgtcttcttcagtcataaaaatttgattgtatccagcatttccatccataaaactcaaaatcttatgccctgatgcagcatcaaccagttgatcgactactggcattggatattcgtcctttggggtagctttattcaaatctctaaaatcaatgcataccctaaccttgccgtttttcttggtaacaggaactatactagaaatccactaagcatatcggcaaggacgaataaaaccagcatcatataagcgttgaatctcagccttaacaggttcaagcatatcggctttgcatcttctcggcggttgctgatgtggtctaaccccgggtttgataggtagccgatgttcaacaatcgatcggctgagtcctggcatttcataatattcccaagcaaagcaatctctaaattcttttaagagctctatcaacttagttctgaattctacacataaatttttactaataaatgtcggtcttggccgatcgcctggacctatatcaatttcctccagatcatcggccgacataaaaccttgaccttgtttgtcatcaagatcatctactgtatccttggtgtagacgttcgaaccctctacgacgccctcaaaataatagcttgggttctccatcttcaattggctgtatatcagaatcatatacttttaaaaaatctccatcccagacctttccagataaaaaatcaaggccatccatctcccaaagagctaaattagcactagcaacattgactgacttgtcagccggcacgatctctaccttgtcgccttgccattgaatcaagcattggtgcatggttgaaggaatacaacaattagcatgaatccaatcccttccaagcaacaagctataagaacccttcccatcgatgacaaagaatgttatagggattgttttactgccgactgtcagctccacgttcaaaacccctttggtttctgatggattgccaccaaagtctttaagcaccatgttcgttttaatgaggtcttcagcgttcctacccaatttcctgaacgtagcataaggcatcaagtttactgcagccccaccatcgataatcatcttagacatcggcttcccattgacataaccgtttatatacaatggtttaagatgccgattctctgtcccctcaggctttttgaacattgctcgctccggtgacaaaaccaacttagccgattcctcttctacctcgtctacatcggcctgatcaatcccgaattcggctggcaatgtaaagaccatgttaattggtgccgttacaatactcttcccttttgccaacctttttgcctcttcggctacaacatcatcggctataggaacctgattcttaacacgtcattcctgtcttggctttgctttctttagccgatagttaatttcctgttcaacctcttgaagacgctccctgttcctcaacctttgaacccttctcttctgattcttcgtgaaaataccagaaggacaccattgatttgtcctaactatctcatcctcctgaccatgaccttgattcactgggcccaatctttgatgaacagacactctttcctgcctcagccgattactcctattatatgaccggcttgagctcccaatgatatcactacacccagggcagttttcaatggacggtaacctcatcccttcattccagcagaatctaaagaactcacaaccccaatgaggatcaaaaccatcatcgtgttcttcataatgcttctcctgctgcttgtcatacttcctctgatatttgttgattatcttagccgaactcacttgaaaaccctttgcacagaccctatcggctgattggccagctgtatgtaccatattaatagaaaaaggattaccatcgaccttcattggtttcttcgaatcatcaaacttgatttttcctccctcaatagccgtttggatttgctgcctgaagaccttgcagtcattagtcgtatgagacccagaattatgccacttacaatacttcttcttgcccaactcttcagccgatggaactttcctcttttcctgaggtctttacccattggcatggtataacctttttgctcctgacccactcggctgccgctatttcggaatcatcatcctcatcatccgatcttctgtgtaagatgtgacaagctttcgaaatcttcagatgagaatttttccctgatcggagcaatcatcccttgaaacgccaaatcggctaactgggcatcagtcaaattcaagctgtaacatttattcctcatttccctgaacctttgaatatactcatgcaccggctcatcatgcttttgcttgattgacgtgagatcagacagcttcatcacgtgaatcccactatagaaataactatgaaactgcttctctaaatcggcgcaactgttaatcaacccatgtggcagagaagaaaaccaagtaaaagccgacccagctaatgacaaccggagtaacctaaccctcaaagcatctactgtcgatgcctcaccacactgagctaagaatcggctgatgtgttcataagtcgatgtagtatcctgtcctaagaactttgagaagtctagtactttaaaccggttaggtaaaggaactctttcaaaccattcaggataaggttgtcggtacaaattcccagtctcatttggtttaagcccaaattgctccctcattacatcagctatcacatcggcccatggtcgctgctgaggtgatccttgaggttgttgtggtgtaggctcaaactggttgtagaactaaggctgaaccgatcctgcctgttggtactgaacttggggtgatggaggctgatattgataactcaaattgccccctggtaattatgaaggttcggccgaataccacgcgccaaatgctcaggaataacttgaggcaccaccgaaccatccggttgcacatgatgaaccaagtgttccgggaccacctgatttgcagggtactgcacaggctgaccaccaggcattgcaaacctagccgacgcattcattggggcttgttgctgaatcggctgaacgacctgctgtctcaacggtgtctactgaattggctgtaaagccggttgccttggtggcgtctgctgaactggttgcacggcctgctgaattggggatgcttgttgaataggctacacaacctgttgcctggacggtttttgttgaatcggctgctgctgagccgaattaatagcattttgaggaggtagaaacatagatgcaacctggtcttgtgttaactgagtcacattcggtccaggatgctgtgattgctctcttaccaataattggggattgattaattgacctggagccgatgacggtgctgcaggtgctggagccgatgctggtaccgtcgattgagctggaggagttccccgggtaagtggatgaacatcggtaatcaaagtccgataatttggaaaagtacccccttgcaaatagactgggcctgcagcctgatgttcagctattgaaccatcggctaccgatttcatcatatttgacaaagtattagttaatactccagattgattgatcaaagcaatatacacagcatagtcgacccgatcttgaaagttattgaaaaaatcttggaatgcattgtcattctgattaagattccccccttgcaatccctgagtgccgtcaccttgaactccatgtactccatgagagtagtcaccctggctctcctgagtcgacccatctgtaacacttttgtcactcggctgggctgatccatctggaacttgtttcttttctccctctttagacgaaccgatcccaagatcctcaggaaccaccttcaccttgtacttctgaacaaatgtgtcgttgcgagtttgcatgaacgagcttaaaaattgatcccgtgcttgctgcatcattgcattgaagtctttcttctgttcgggagtgagcttctctggatcaatgggcacaacgtttccttcatggacgtcagtcaaaccgaacttctgagtcttttccttaactttacccgggctgcccgacgacggagacagtggtggtttctcagccatgaaggaggctgccttctgacttctaatcggtcccaccaggcgtgccaaaagcatgttgatagaaaacatgaggcctgggagatctgcttaactccagtgcaggtccaaaactcgcctttggatgtatgagcgtgccagttgatttgatcctgcaaacaacaagaaacaaagacagagaaaccatgattaaattcataaatgatagccgatcggctagatgacgatgacatatcatttatctttgagccgatgtcatgtgtaaatcgatcggcaattgttaagtaaacaaatcagaactaaatctactcaatcggctgtagatatcaatgatatataatccttatatcgatatatacttgaatcaagtgattgggatagatcggtcaccttgccgagacagtataaatcacctagatcgaaatatatattaataatgagattatatatatatattcatagcatagccgatcagatagatgtagcgtgtatcggctaatactgcgatactactttatattaagatattaaagcaaatagaatatactaaacaaaaatctaatatacttaaatgcaacaagatcttaacaagatggaagcgctaatctcgagaacacaagccgccataacaagttttacctcttgttgaagatcgaagccgatgcagctcaacctgaaagcaataactcgtcgagataaaatgaaagcaaaaagggtggcgatgcgccgaaattgtattgaacgtgtgtatgtttttattacatagggctcggggtctatttatacccgagaaatacaagatatgtccatattggacacgactcttatctctaacaaactctaagataccataagtctttgcggcagacttttgcccacattttatctctaaggaatttagataaaatatcctaattaatggatacaattgccttctcaggactctatccatgcgtggcaatcatcttgaagcacatcaactcgaacccaatgtcacacacgggtcgtattgtcggaatcggctgtatcacttaaccagtccaactcagacttagccgatcccagtcgtagccgatccaaactccagccgattcttactctgtttccgaaaatacccttatcttctattccgctttgatttcatcttcatctccgatgctgatattaccaaatttggttgttaacaccttgccactcaccgtcgcagacgacgcagctgcacccgagatggatctggtcgtcccgaggatggcaccgccggatctaccgcccttgtcgtgcgcccaccgcgacacccaagggacacctcctcgtcggcggcgccacctgtcatcagaggagaggagatgagagagagaggagaggagagaaacagagaaaggagagaaaaatatagagggagagaaagaaggttgaaaaaaattaaagtggtgagggaaagagagaggaggggataaaaaatgaggagttatttttgcatgcaaatcacataagaggagctatccattatctcttaactttacgattcaataacatgcatgtctagattaatctaggataaaagtactgcgaatttggataccatgtctaaatatgtagtcttagaacatatggtgtgtcagggttacggataaggtataccctctacccttagatatacgtcatgtatcgatatggtatatctgcgtgtatacggacgttctctgtacacgctaaggaaattcatcacggagtccatagatgggaggattcctactcggatagaactgggtcatcactgtattatgtagggtccgatgtctccaagtcctacttggaggccaactgacctgcggtataaaagggaccccccgggaggacccaaggcatcgaatcgtaccgccaacacatcgaccacagcctacatgagccaaatcgcctggtgatctagtcgaaccaactcgactatgatctcgtcggtatcatcgagttccactattccctttgtaatatgtgatttatgtcatataatctcatatcaactagattagggctattacctaccaaggggcctgaaccagtataatccctgtttttgttgcttgatatcgtattacgtagatcctcgtaccagcgtaccccaataccctctatatccggtctacgggtatcccccgttgacagtggcgcgccaggtaggggcctttggtgctcaaggttctactactatgtcatcaagcttcgtcgacaacagcgtcaaccctggcttcaaccaaggagtttctacttcaacaatgctggtgtggactcaagtcggtgaaatcgtcttcccggtttacacctcggtgccgatctcgactggtccatcaatggccggaagtgagaacgccgtggttacaaccctggacgactccatgtcgaaggatcctcccgctgaagtagagaacggaacgtcgacaacatccaagcccgagaaggatcctagtgcggccaaaatcttgtccttccgacaagaatcacgagccgacaaggacaacttccgaggtgacagggtcctagtgtcctatccacaaaaccaggaaacacaccttgcaagcttgctgggtttttctcaacgtacaagctgagattcgtgcctgcaaagagcgtgggattcagcgtacttcttcaacccgtgatgtctattgtcctattcacaagacaaagaatcacgacctctcaagctgcaaggtccttctcagcgccatgaagacgtcgcctcctaaggtccagcagttacaaatctctcttagggatgaggacaaggaataaggagcgacgcttgtctcagatcgattcgttggggtaatcgacattgatccccatgagccgtcagtcctacacttgctcgaagaatagggctcatcgtcaacgagtacaccacgcgatgtatttgctatcgatgggaccagcacgtcagcgcgtgctaatgtagaagcggagaatcaagtggttacgccggcccagcatatcagggccatcaacacaatactgagggaaaccccttatgatcccgttctgaacgatgatcttgcacagtggacagaatgactacacgaatcagtggccaacctcagcaacgcgttcgaggaggccgctgccagagcacagctagaacaaccgacagctggcggcgccgatggcgaaccacctgagcagcggacatcacctcaatgagccactcctccacctcgtggtaccggcaatctaaatgaccatctgaatggtcgccgagaagcacgacgcgtgcaagacaacgagaaccgttcccgacatcgcatctcttcacgatgtcacgagaacgaagagcgaggagacgctcgggcgaataccgagaccgtgataactgccacgatcacgatgatcacgaacagcagatgccgggcgatactggttgaggacgtcgccataacgatgacgacggtggagatcggtgccgggacaataacggggggcgacgacaggattctcgagatcccgaacttcatcctcgtaatcgtacaccggaaccaagtgactcatcatcatcgtcatcatcctcttcatcctcatcgtcagatagacatccacgaaggacatacgatcgctgacaacccaccgcccccagcgtcgggtgtagagctttcagtcgttcgctgcgtgatgtccgatggcctgagagattctaaccgggagcagaagtacgatgggagtaccgacccagaagaattccttcaggtctactccatggtactctacgctgccggagcagacgacaacgtgttggcgaattatttgccgactgcattgaaaggttctgcgcgttcatggctgatacacctctcgccctactcgatttcttcatgggcagatctgtggtagcagttcgttgctaacttcctagtaacttacaagcgccacgcgatcgaagacgacctacacgcgttgacacagaacccgggcgaatccttgagggactatgttcggtgctttaatgagtgcagaaatacaatccctgaaatcaccgacgcttctgtgatccgcgctttcaagtccggtgtcagagatcgctatactacccaggagttggcaacaaggcgcatcacaactactcgaagaatatttgagattgtcgatcgatgcgctcacgtggacgacgcactaagacgcaagaacgacaagccgaaggcagggggagagaagaaaccagccaaggaagcacctgaatcaagcaagaagaaaagtcacaagagtgggaaaaggaaagcccaagcggaagtcctcgcgtcagaatacgcgacaacgaggcatggacaatggcgttcgacggcacactcaacagccaaggagcaggggcaggattcatcttgacatcaccttcgggagatcagggcaaccaacaacttcagggcaaccaaccaacaccttcaggagatcaggggcacgcaattcaccttaacttcagggcaaccaacaacactgccgaatacgaaggactactcgctgggataagagcagcagccgcacctggagtcaagcgtttgatcgtaaaaggggattccaaactagttgcaaaccaggtgcacaaagactacaagtgttctaaccccgagttgtccaagtatctcgcagaagtcaggaagttggaaaaatgatttgatgggatcgaggtccgacacatataccgcaaggacaacatcgaaccagatgatctagcacggcgtgcgtccagatgggagccactcgaacccggcacctttctagacgtcctgacaaagccatcagtgaaacaggcaaacgacgaagatagcccagtcatccccgacgtcagctcgggggctatagaggcagagcgcgccgtcgccgacatcgagaccacggacgactagcggaccccactcattaaattcataagcagcgacgagttgcccgaggacgatgcagaagccgagaaaataacccgtcaagcaaaaatctactgtatgatcggcgacgatctatataagaaggcgccaagcggggtacttctcaaatgtgtctcgtccgacgacggcaaacatctcctccttgacatacatgaagggatctgcgggtcacacgccgccagtcgcacattggtcggaaaagctttttgacaagggtttttttgggcgaccgcccttaaagatgtttgcgaaatggttcagcggtgtgaagcctgtcaatttcacagtaaacacacaaagctaccagcacaagcgcagaccatccctcttacttggccgttctcgtgctgggggctcgacatactcggaccattcccatgaggacagggcggctacaggttcctattcgtggcaatcgacaaattcactaagtggattgaagcgacacccacgggggaaatcaaggccgacaacgtcatcaaattcatcaaagggatattctacagatatggattgcctcaccgcatcataacggacaacggctcccagttcatcagtatcgacttccaggattactgcatcaggctgggagtcaagatctgcttcgcctcggtttcttcccctcagagcaatagactggtcgagagggcaaacggcatatcactacaaggaatcaagacccgtgtctacgacaggctcatgtcacacggcaagaagtgggttgaagaactcccctcggtactatactatgggccgtacgtactacactgacaacgtccaacaaggagacacatttcttcctcgtgtacggctcagaggccatgctccccaccgagctacgacatcagagtacacgactacagaagtactccgatgaggatcaggaggagcagcgaaacgatgatgtcaatctactcgaagaacatcgagaacgagttgccgtcagagcagctagctaccaacaggcccttcaccgataccccgagaagcgcatcagagcacgcacgctttcaatcggtgactacgtcctccgacgggttcaaagccaagcagggcgaaacaaactctcacccaaatgggaaggaccgtacacgatcacgcaagtcttgcggccaggtgcattcaagattgtagacagcgatggtcgcgagttggtaaattcttggaacattgatcaattacgtaaattctatgtataaatcaatagtattcatacttgtaagacatcttacagcttctataaagtttattttcaggtaaagattacaatcaaagtgttccttcctgacgatcccttaccacgatgacacctagcgttgaaacctatcctactgtccctttacgccgtcttgacaaggcctccgaggaacctaagggaacttcggctggggacgcccagagccgataaagccttgtcggatcctgtagagacaaaagaccatgtaagatctggtcgtgtaagagttctcaccgtgcgtattaaccaagccgtgtaatcggaaattaggttttccaacttcacggctgggggctaggatcagtgcttgttcaaccaaggcaggtcaaaggtccaagagccttatcttctaggggctagggagagtgtatgactcaagtgagaagacactcgtacacaccgcatccagagtaaggaaacttagtaagatatatttcttttcaatttcacaagtacttcttacagttcgtaaaaattccaaaatatattacatgcctccctgagatatttgtcacaggatataaagactaccaggaaggccagcaccagtccatggactgaaagactttctccgcaagcggcgccatcgactttgccaggttatctatctctgcgagagtcctccgagaacgtgaaaaccctccgtggaggaactcgagatgcagctgcggacggcgatctcgcatacaagccagcacatgccctcaagcatatcggctcgatcgacggcactcctgcttcagggcctcgtcgatacgcttgccgatgccttcgagctgagcgcaggccctattcaaccacgagatatatccggctgccgactcctcgggatccccgcgaggtactcggagttccctgtagactccggccatggccgtgcaacagctcctgaggtacgagttgaaccacacttcgcgacctcggagtgcttccacggaccggtccttcttcacttccaccatagtcctctcgagttcggccacctcgaacttcgtcctccagtattggatgcgacgatctcggtcggccagtgcactctcgaggtctgctcagcatggaaacgactaagtcaagctgttcttctctctcgagaacacagcaaattaagtcaatcccgacagaagagcaaaggagatgaaaacaaaaaaaaaaaaccaacctaaggaagtcgtcgccatgcccgctttcatgggcaagttctaatctatgtcgacctgcagcacatatggctcgagcgcaagtgccggaacgattacaaacaactcaggctgtctgcgctgctggacatcctcgacatcgacatctctacaacgacaataaagtactcgggatcaaaatgctaaagaaaacgaaggtgatgactgcacacacaaaggcagttggaaccaacaagagttttacaagcacgactaattaaggagtacaggggaactgaaatcctactcttcaaaaaggggaagaacagactcccccagatcaccgacttcttccatcacgcccttacgcgcgtcattagcagccccctgatccaagataatctagaggtcaagttcagggtgcgccaaccttacgcattcgaggacgtggcacgccccggtgtagatcccgttggacgtctcctccccgatcctggccacatgcttggaggggatctcctccatcgccgtcaccagttccgcgagcgaagtcgtcagcgaaaactcatcgggattcaccgggatggtggtcgtaacaccgcactccccgacgagctggtgcaggccggtgtaggtaatccgcagggagccacggatctccgacaagttgttctcgagctccgacatgcagtgctcgagcccctgccgctgccgctcgttgccgaccaccagctctctcatcttctggaggtcctcacggacctccgccaggtcacgcgccagcttgtcggcgcgttcgttcaccgacgacgccgctgccgccttcgcctcctcaatctcgcgccctatgccgcgagcaccggcctggaggatgcgctccatctcgatttggagctccccccagatgaggatgtcagcgggcgggcctcgagcgggcacaaggccgcctgcagggccgctgggcgtcacctcacgactcttgggcacgaccatgacctttgtcgaagccgctgcaggagacgcactggagttctctccagacccgtcttgcgccgccttcgcccgtgccgccctgtgaaggattgccgtaattgccatcaagacgggctgccagagttcgatgaattaaaaaacctcaaatttgtctacttacttctcgccaagtgtcaccagcctctaccgtcgctgaggcgggggagacgcatccgaggcctgagtaaaacgagtacggtgtgaggacaatatcttccgactacacaataaatgaccaaaggtgcttaccgatggggtgggcgccttccgacggttcttcggaatgttgccgccactggtcatggcagcggcagcagcagtagcaacatcgaatgcctcctgggcgacgccctccttcaacgaagctgccgcctagtggtccacgagcagcccgaagatgtcagtcagagggagagcctacactacatgaagtcacaatgcgatcctagaagaaaaagataaaagggtcgtcaaatacactcacgttgattgcagtttcacgctcggctgtccctttctcgcaaagggggacatggacgttgctcgccgttgtggggccgctgatcatcacttgaccgacgcggctctccacggtttcgctgttcaaacctgtagatcgagaaccagaattcgataagtcaagaggaacatgcacataaggaatggaatccgaaatacaagaaaaataccccgaggagaaacccgggtcgcgtcctccggcctagaataatcaaaggctggatgggctcgagcctggagcggctggatccgcctaccaatgaagtcggcagtgacttcataccccgacaaccctcacactcggaggtcatcgatgatatcgatgaaggactgaagggagggggttaaggcgggtttgacggtccaagacgaaatcttgtctggttgttcctcagggacaacaaagactggatccgaattctctatctgaaaatagaaccacctcgcccgccatttgctatgagaaaaggggcactaaaaggggatgtatcgcgacttcaggccatcccgaagtcggaaaccgacacatccggacacctttttaggttccatccagcgcaactcgtagtagaaacgaaagagatcaagaaacggctctaccccaatgtaggcctcacaaagatgggaaaaaatactgaggaaggcgatggaattggggttcaaatggagcaaagaaagaccgtagaaattcaagacgagaagaagaaactcggaaggcggaggaagaaaaccacaaagaatatagtcctaaaccgcaaccatgcggcccaagacaggttcgggttcaaccatactaggacaggtatatacctcctagttctctctccatggtcccgcgaccggggagagcgtcgtcctcctgcagcttcttcagggacgcgccggtggaagtggacttgtcgagatccatagccgccggagatcgctgaagaagggactgagatgagcaagctagggtttttgcgggagcggagaagacgaggagcgcttggaggctggaaagtttttcacaacaggcggacttcaaaatggatcctcaaaactcccttaaatagacgcactaccgacagtatgaattccaaggaaaggagagagatggccgccggaaatttctagccccgttacgcgtggcagttttcggacttcaatttaaattcacttatgaccgttgaacttcgcacggggttgtcgattactccatgtctctacggttctcacaccgagatcgaccagtagagaacgacaataaccccgacatcagaagtcgcgatcggtcacatgagttcatttaagcagaagtcgggggctactgtcagggttacggataaggtataccctctacccttggatatacgtcatgtatcgatatggtatatctgcgtgtatacggacgttctctgtacacgctaaggaaattcatcacggagtccacagatgggaggattcctactcagatagaactgggtcatcactgtatcgtgtagggtccgatgtctccaagtcctacttggagaccaactgacctgcggtataaaagggatcccccgggaggacctaaggcatcgaatcctaccgccaacacatcgaccacagcctatgaaaccggagcctacaggagccaaatcgctgggtgatctagtcgaaccaactcgactacgatctcgtcggtatcatcaagttccactattccctttgtaatatgtgatttctgtcatataattccatatcaactggattagggctattaactactaaggggcctgaaccagtataatccctgtttttgttgcttgatgtcgtattacgtagattctcgtactagcgtaccttaataccctctatatccggtctacgggtatcccccgtcgacatggtgtatattatggaggcacctacaaatccctattttcttttgcaaaaatcgggcactgtttcaccaagtagatcggaattgtttcactaagtagatcgaaaatttttaatattttaaaaaaactgaaacacaaccaaatcaccttgtgaaacattttgctacaacgtacgaaacaatggttttcaaaaaaaatcgggcgttgtttcaccctatataaaaataatatttcagcaaatagtgaaagaatgtttccattcactgcaacatttgatctatacatagtgaaatattacgagtatacttgctgaaacattactagatgaacaaaaaataaaacggatttccttaatacaacgtttccgtaatatgcggatgatttgttgtaacggcgtgtgtggtggggtgcgcgtgtgtgtgtgggagggggggggacagcgcagaggcgcgggcggcggcgggcgcccgatcgctgccgttttcagtatattatctcatattaggttaaatatatagtattatctaatttctacatgccatctaagatctgagagacagacttaattaaaattagaataatgcattaacaatgttagtgtatgtaccgagttgcgtccacttgtacgtgccaacccatcgtgtcttgcactttggaatgcaggaatttcacaggaaatagttcggttcgtccaaattaaatttccctgaaattaatttctccaatccgaatatatagggcctaattatatatgctgaacgagatgaaccggccggtaatggcgctggtcagcagtaacagattggtaagatctgttggaatgcgcagcccatcaatctctgcgatttttttttccttctccagcttctcacgtggccgatcgacgatgacgtacgcgtatacgcctgcatacaatgcatgacgagattttcaccagaaggagagcctagcttagctagcagctagatagctagattatcgatctactggagtagctaggacggcgacggccggccaccatgtgcgtacgtgcgttgtgtctcccgcggacagaccggtaaaaacgacggtagagtgagtgatgagtgatcgttgaggttgacgagccgagtggggtcgtaagtacattttacccactccaatcatttatttaagagtaaattttactttggaccatatttattgaccaaaattttacattgggttagggctagactcatgttttcgcttaacaccacgtataattaccgttctttgaactttggacctgattttatagttaccatcacacgagttgttatctaggtgcttagcattttacaagaaacaatgatatggaaatttttgccatgcaaatatgcttagcacaagaacaatgatgtaacatgttacaggatatcctatcagattaatgggacttcattactactacatatgaacattcacaacccttatactatagacaaaattggagaaatattgagtttaagaactatttttttagaaaagatattacatgttttacaaacccaactgtagtgttagtacaaattgttgaattctaagttttctaacacaaaaaagaaatgagatcagctctacgatcattatactatgtgtaatttgtgaaacccggtccaaagtgcaaatgatggtaactatatatggtgttaagtgaaaatataagtctaattctagtccaatgtgaaaatttggtaaataaaggttgaccaaagtgaaatttactctttatttaaagagagaatatcttatataccactagtctaatcccttttatgccattaaaaattagcttttcccctatataccattgttcaaaatttgcacatcctctcatgccactcccgtatgttgaccgttaactctaagtaaaaaagatacatttgcccttctgaatataggatatgtctaacaactcagaagggcaaatacgtttttcttacttgagagttaacggtcaacacacggaaatggcatgagaaggtgcgtaaattttcagtgacatataggagaagagctaatttttagtggcatccctaatcccaatatatcataaatcttttactcctaaactgtaggaaacagtacaacttagatcccatggcagtatatacccccattttctcctattttcgctaactaggaaggtagcccgcgcatacgcgcgggcatgcaccgtacgtaggataaatttgagaaacttataaaggcggtataccagcgaattaatatctgcaatgttttaaaattatgtttttttcccatgaattttcttcgttagaattgcatgacgaatttaattgttatttataaaattatctattggagattaggattggtatcttacggtataaaaaatggtacctaagacatatgactcttgaggttccacagggaaagagagaaaacttaagttataaaagacattacatatacaaccatatataattaatggctctacccattttttagaaaaaaatgataattaatttattatttgacggcaaacattgattggtcatagctatggataattcctcataggaaattgtgattccatagtgaaagagaaaaaacttaagttataaaagacattacatacacaaaccatatataattaatggctctactgatttatatagaaaaattggtaattaatttattaaacataatatatgaccctcgagtttagaccattatttgtaaccattggatatgtagaagatctaacatattgtgtagagtccaactaagcaaattattcgtcttccctcaccatggatggtagacatgttaattcgtgtctccggcagcatgctcacatcatcatacttagaagaaaaaaaagtgcccttcatgtatatacatgtaactacctcatgcccctcttttcattaaagaaaaaaagttctatacccatgcatgcacaccgggatgcaccggttagccctccaatttgttcactccatggacggtatgttcctttgttctagtgattagataatttaataagtacaaataagtatttgaaatcaatttttattagtaaaatatccataaggactgatctgtagacaccctctgttcttcttcttttcttggtgtattagttggatttaagcaacgtgatataggtattttgggatataagttaatgtccaacttccaaaggattaaggtttcccaaccctcagcaccgaacacagcataagatcgtacatttatccttaaaagaagatcatatattttatcagggcattggaattaagtaaatagcatccacatatatgtcgagagatataattaagttggttgtgagtcaataggtccattgatgctataattaaggttaaggttagcggtttataagttattttgattttattaaaaaactaagttggatattttgatttgtaatgagaacatttaggattttttgcgtatggatgtgggtccaaaatataataattttattagcaattaaatatggttggtatagatattaaactattgatttaattaaaaaaacacaatggaattaaatatggttggtatagatattaaactattgatttaattaaaaaaacacaatggttcaaacagatcataaattgaatatataatttaaaatttacagctattgaagattctttatttatttataaaacataccaagatcaatatgtatgagatatattatttatacctatatttgcaagtgtatgcaatctttgaaagtatgataaaattaacttactaatatagaagatattatatacccttaagccttaacttaattaccatcgaaaaaagggaggcgagcaaggaaaaaatcacacagactcttatcatgcgtatggatggaagcatgtatatgtgttgggcggactcgtaccgccagattgatattaagttttttactaaagataaatctaatggtatctgatggtaaaaaaaatattaggtccatcagattaaataaaaccaatggttagatgttctcctttttccatagattttctacgaattaattagagcgttaggtgtcatctttgcactgtttcttggaatctcacgtggcagtttaggagctttttaggatgtttaatggacttttatataatagatagatatatctacgtgggtttgtgaaatttactccataatatatatttccatttttaatattttgtttttatttggttgcattgcaaagaaaaatagtatatattcaaagttaggaaagcgtttttcttatataaagatttgataggttcaccggtttaaaccatctatatacctaaatctaatggttttaatgtttgtttatatttggttttcatgcaaagcacaacgttctatggtaaaatttagggaagtgtttcttttatatatagattaatgggttcaccggtttaaataatcgttaaaatatttttttagggacaatggttaaaatagttggttcaccgaaaggttagatgttttattataatattttttcatgttaaaattttcatctagaaataggaagagaaggattggaagaggggagaaagcatggcattgtattacgtacatacatacttactgaggagagaaggggtgggttgtgggatatttttttttataaagataaatataatagttgaaaatagtgagtctagcaatttattaaacaaatagcggatccaccgatttattagaacgccacgtagcggtttagaaacgttttgtaggatgccacatggtaatttaggagcgttcgtaggaagtttaatgaacttttagtatataatagaagatttttctttctaactaataaagcgtaaaaaatatgagaaggaagagttaatctaggaagagggtggtgtaataataataataatacatgaggtatattattattattttcatatatagtaggtagttgtatatgagatataagtacgtacgctgggtggggttaggtttgggtggttaactttttctataagataaatttaatggttgtaaataatgggtccatcaaatataatgaaatcaacggttatatattggagtggcatgtggcggcttaagagcgtttctaggatgccacgtggcgacttaggagtgttcatagaaagttttatggacttttagttaatatacagatctaataacgacgtaaaataatgtgtccatcgattctagtgaaaaccaatggttggacgtttctctaatttaagagtggcacacaacggttagaaacatttatatgatatttaatggattttaacgcgtttgatgtctatttgtgggggtattcttttctataaagataggttcaattttaattaggattggaaaaagaaaagaaaggaacaaacgaaaaaaaaaagtactaaacagaggtggtggggccggtgggaggtttttggtttttaaaatagatctaacgatgtaaaataatgggtccaccgatttaaatgaaaattgatggtcagatttctctattatattagagtgccacgtggcaatatgagagcgttttgagggagccacatggcagcttgagagcgtttatagggagtttaatggacttttagtatataatagatagatagatagatagataatagatagatgaggcatatgtacgggtccacttatcagcatgatgagtcaccaatgccattctggatgaacaacgcgtggacagcccagcgatcgaacggctccaggagcaacgtaacgagaatgcgagctcggctccaagcgcagaaacggggcttcccgtaggcttaatttgaatcgcgtcggcttgcatcttcctcctctccggtgtatgcacagatacgcgatactggtatgacgatacagggatacggaaatttgcaaaatcatgaatttgtcgatacggtgagtatatatattttgcaaaaatagattatgttttagaaaaaaaaagtaagccatatagtcaatgttttagacaggtttcaaagaccaaacctttctatacttctcaaacatgaattctacagtagttgaaggatggagtatgctgccatggtaagcttggatcatttcatcataaaatcaccataagatctgaaaaaaataactgagtgaaagactaaaaaggtggacggcaacaatgctacagcagtaggcagctccaggccagtggctctcgagaagggactatatattaaaagaaaagagaaaatccatgaaatgccattgacaagcaccctaatcctaaaaatacatcgataaaggcaacttccaaaaatgccattacacaaccctctttctcctaaaaataccatcaccgtcaactccacaccgtcataaccgttatttttttaataataaccattttgcccacagtgcaaaatatacctagttttcactgtcaaagaaagaaaatgaaatttctaaccctaaccctactgctaccaatcccgatccctatccagcgctctccccagcgccgtctcggcgacggcggctcggcggcggtccccggcggtagccctggcaccgctatgccggcggtccacgggggcggcgcggcagggcgcggcgaggaggtccacggcagcggcagtgcggcagggcgcggcgaggaggtccacgatggcgtggcagtcacaggatgcggcgcgggggccgtagacgccggcgaggagagacttgcaggtgtcggcgaggaggtcgaggagaggcccgcagctgctgaggttgtcgtggaggaagatactgcagtcctagcaggtggcgcaactctctgatgttgatttttttcccttttgcttgatttcatttgaagactttgtgttacattatgtgaatcaaattcagttggtggctttgtagatggattgaactagggtgaaggggagcatgaacatgggttgtgatggtaagtactgggaaccctttgttttgtgaaaattcatgttgatcacaattggtactttgtgtgttgattgccctgatgttttagctcagattgatagcaaaaatttctgaaattattggtagtcctgggtgtggtggtctctctgctctgtctcggcactgaaatttgatttcagtgaatttaattatgtaatttgattgatagcaaaataatgatgttggtgaatttataagctaacagaaataaaaattgttctgagcaaacaatgcaaaatgatgttgtgtgagcaaatggttgcctaggggtaagattgtcttttcatgcaacttaacggaaagatgctaacaacagtttgacagtgatagcatttttgggagaaagaggcttgtacaatgacattttggtaagttgcctttgtcgatggcatttatgtgattagggtgcttgtcgatggcatttcatggattttctcattaaaaaaggccgcaagtttttaaggcaaaaactttcaaatctaactatatataattttaatttcattatatctatactataactataatataacttatatataagtattaaataatatatgcaactttatatctaacatatatagagattataatgtagttacagtatagttaaactgtagttacaatataactatagtgtaattatatcgtagttccactacaactatactatagttccactgaaaggttcttttttccaaaaaattgcgacagttagggcttgtttgatagagctccaactcctaaatttagctccaggagttgggtctggaatggagttatggagctgcctaaacctagcttcatctctctagtttattttgtgaaagagcgccatccagcttcgctcccatttttaagtggagctgaaactgtttggctgagctccagctccagaagagatggagctagagctggagctgtgccaaacagtgccaaacagaccctcctctcggggatgcaagcagcggctcctgcgttacaggctgtggtgggcttcctaacgagggtttggttgcgcaccatatcgaacgaagtatcaatgctgtatcgaggccgtatcgctaatttttttattttattttcgctaaagaattagcgatacttcatcgataccatatcaaatgcgtatcccgcatatcgccgtatcggagatatagctgaaaactgcagtatatgtgcatcatgcaccacagcggatatgatgcgtcgagcctcaggctacggtggacaggtctgccagctcttgcttttgggcgtgggtgtggcgcggtcgggggcgctggagtcagtggtgatggcggtgtaggcggaagaaaattgctccctccgttattgacgtttttaatttgatcaaagtcaaacttaaaacagtttgactatgtttatagatagatatagtaatatttataatattaaattagttttatcaaatcaataattgaatatattttcataataaatttgtcttgggttgaaaatattactttttttctataaaattagtcaaacttaaacttaaagtagtttgactttgagcaaagtcaaaacgtgctgtaacctgaaacgaaggaagtacataagtcctgcacttatccgaaggacttcgtccccttatgtgacacgtgtccactacaaatctcaaagcacactgaccctctcttccctctaatctaatacccattgctcttcctccgctcggtgagaagtacgaacttcagagccggccatggaaatttttttatttttagacatttttttaatttattaatagaccattctcaaaagtattttcagatctgaaccttttagccacaccagcttgcctggcgtggccaaacaacgctgtgataaaccttgagctccactcgatacgctcaatggtattgtttgccccgatcttttggtgagttgagataactacaatgacgacccgactacaatcgtactagacgttgcgttgcgccttagcgaccgatacacctcttcgtgggttgttgatcttaccagcgcaaatcaatcttattcctgcaagcaaatcaaagaatcaagcaagaacaagataaaagcaatctgaattgcaaataggaattaggtacaaatgataatttggggttccgaagacaagcacatgaacggtctagctgacacgtgcactgcaagcaagtagcaatggctaaactttaatcaaataaaacccaagaaaccctgaaaggtacctgtgctatttatggaggtgggagggtgacctagtggtccctagggtcgtgctccatgtggtcaaggcacacccccacatggccccacttgggccggagtcccaaataaagttagaagcccaaagacctatggcaggtgatgcagcacattgtttctttatttgtggattactgggatagaatttggaactgaggctggatccgttggaaagaggactccgaaagctttccatcaaatactcatcagccggaaatggaggtcgtatgcagatttggcggccatttaaagtcagcagtatagcaggtggccgaatcggattccagtactaggaggactatcttgatattttcttcatccatgatgtgagcaacggtatccataatagccatggtcacatcacgctgccacgccaaaaggttcagttttcaaaaatactttttggattggtctattaataaaattaaaaaaatcttagaaaaaaattcctggccatgctagcttgttaaaaaaatacgaaaaagtacgaattaacccccccgaactatcgcggtcgtccgaattaccccctgaaccacaaaactggatattcttcacccccaactatgcaaaccggacgaattacccccctcgacccaatccgcggtggttttggcctacgtggcatacacgtggcactccagtcagcattttattttattcttaatggtgggacccacatgtcagacccatttctctcttcccctatctctttatttctctctcttcgtcggtcacgacggtcagcggcagcggcgcgcacgccggcggccgacacgcatggcgcagcgcggggaagggcgatgggcggcggcacgggggcgggttggcggtcggcgcgcggggaggtggaggggatgggggagaggcgggcgccggcgagtcgacgagctcggccggctcaggtggcagcggcagcggcagcgacagcgtccgcggcgggacgtggagcaaggcagcggcggcgacctctttccccaccgtcaggctggcgcggagctcggacacgccggcactacggtggccgcccccttgcccccgcgccaccgtccaccgcagttgccgcactgccgtcaacgcgtagctgatgaccccgtccaccgtggtgttgtaccgtagcccatgcgcccacaggacctcgtgcgctgcctccaccgcagttgccgccgccgccgctgccgctgccccgccccgacctgacgagcgggaacggcctcgtcctcctcttctcccccactcctcctctcccctctcctccctcctgacggcggtggagggctcggccaacagggcaaggtggattaggggcgcaactgtgcggatctgacggcagtggggaggtgcggtggctgtcgcccgtgcggatccgacgacggccgtccccccgtgtggcgctggcggatctggtcgtgggaacggcctcctcctccgccgtcgctgcctccctcttccgcctctcttgctcctcctccgccgtcgctgccttcctctcccccatcccctccacctccccgcgtgccgcttgcgcgccaaccgccggcccgccccgcgccgccgcccatcgcccttccccgcgccgcgccatgcgtgccggccgccggccgtgcgcgcgctgccgctgaccgtcgtgaccgacgaagagagagagaaagagagagaggaagagaaaacgaagggtctgacatgtgggtctcaccattaaaaataaaataaaatactgactggattgccacctgcacgccacataggccaaaaccaccgcggattgggtcgagagggttaagtcgtccggtttgcatagttgggggtaaagaatgttcggatttgtggttcaggggagtaattcggacgaccgcgatagttcgcggggagggggggtaattcgtatttttttaaaaaaaaaacatacgtaggtatctgggtttcgtgttctgttattttctgttaattagtactctccccagtttttgcattagagtctgtttgagtcagctcacgacttgcaagatgtgcggtcctgatcagcgttgtggagtacttcgtcgtgttcgttcttctctctcgcgtcctagctcgttcagtttgcaggtttcgctacagtacaatggctactttcgctaacaatgcctctctcggcgagctgccgagctcgtacaccaggtacatgtacccgctcatggcgcagaagccgtacttggagcttgacgatgttcccgtagcggacgcgcgtcagcaccagctcgttcaattctccaagctcttctcactgatgtcccagcagtcgccggtttactacacgtcgagccgcggcttaacggcgatagagcgccatggtttggaattttcgaaatttcggcccccaacagcaaggtcaaaatcttcctgaaattttcggtgtttgccaaacatttgtaaatttggttaaaatttgtttaaattctgtcaaaatatgttaaaagttaaaaaaattcagccaaaaaaaatccaaaattactgaaattttggtgattttgggtttttggtccccactagtagaaacacaagtttcaaaatcgcaaaccctgtagagcgcccgtcgatcggccagtacgttcggcgttgtacacgctcacgaagctcccttgccgatgcagaacgcgtcgttgaagtgctccggccgtgccgccagaatgtcgcgcatataaggagaacgtcatgtccttgctccatatcgaaacctgcaccgccatcgagctcccgcgcgctcgccgacatgcgacatctccgccttttctaacgacgacgaccgacggctcgatcgcctcgcttaccggggcaccacggatgcaaaccatagagaccatgtggtagcatgcagcagctccaacactaccgctgggctgctgcacgcggctgtcagaaggggaaggagctcgcgaggaggcggtgtgtagggatgaaagcaagctgatcgatccgcaaacctagtttaaataaatggtaatccgcgggtttctacatcttgacccggcttgccacacttagagatgcaagtaggtcaatccataaatctatttatagttcaaattaataggtaacctgcgatcaaatacgcgggttacccactaattttgtttataagcgggttctattaatagtgaaatttggtaagccccgaagtcattatcggtctagagtcagtatcggcttcagagttctagaatcggccgatggaaattattaagtcgccaatagtcggattcttactgtattcagttaagtaaattaatccattaaagaaggttaagtaaattaaacaattaaaggaagtttatccagaaaagaccgagttcaaggaggatgcagcatggtagtttatctattaattaggaagagtttgttagtttcctttttatctttaggaaagtatgtttagtgtccgataagaactttatgtttttcttttatctttaggaaaatttctttcttacccaacaaagctattgtgttcgtcgacttagttcgcgccaacacagtttcggcacaatcagccgagcactgattgttcatcaacatattcgcaagttgatccgcttacaccaactgacaggttgaggcatgtgtggaggggcaggggttggtagggggcaaagaggctgtcagcgtcgacgaggacctcgctgctcctacccaacttgccgtggttaccaacgagatagagaagaagagatgagagagagagaggggggtagagaaggatgttaatgacgtgtgtgcctcatatcacgtgacgtaggtaccacgtcaatcaaatccagcctcaatagtgctttaggatttcttttccaccagcattgcgagttgagaggtgaagatttttcattgcggtttagggatgacaattaaactcagcggaaaaatgaggatggcaactagacttcctttccttctcttgttgctagacatgtatgtatgcttgtgaaggcagaccagagaaatggaggcccacacccgagattgatggtagcaggcctgaagagctggcgtggattctcgactattatatctcggcccattctatcttggaccagaagagaaataacagattgtgttgcaaaatttgctcaagtaaattttgtttttgtgggtacaaaacccggtcatgactcatgagacgtgtcagcttgagatgcttgtacatgccaaataatatttgtcacccaaacaataggttcattttcgacaagtaaaaaaataattttaaggagcggtctagatctatgggtttgacacacgttcacccttagatcggacgactcagatcaccctctttgtcacagccaaatattttcattttcacatccacctcacagcgatgttactatattggtaactaagctgcttatatctttgccgacatctgcagctccctcactcgcatggccggttttgctggattatggcccgaaaatggtgcggaatttggcaatgttggtcggtacgattcataaggaccatggcatagtataacaaggttgtacacgcactaatgtactatgtacctatacatttgtgcagttaatatgtacaactcattgtaatgaagctgcaggatgcgcggtcccctgttacccgatctgaacaagacatccttatatatatagctgcaaatatgggtggtagtaataagtggtggatgaatcgcatttgggatagtcatctccatttagggctcaattggaaaaaaaaaagaggaattatgaaggatttgtatcctatggaacattttcctattgagttctttggaacaaaggattcaggcctacaaatttccattgaaaatcctatggaatattgcaagaaaacaagcataaggtgttagctcgtactttcctttttccgatacctctaaggctcctttggacgtatgaattgaaaatcatacgaataagaaaaacataagaatagaaagtcacgatatatgcaattcatagcattgaaaatacatggaatatgtcaaacaggttgtttggatactccacatgaaattcacattttaggaaaaattccctatgaaaattcttttttttttagaattacacagaacaacgcagacactcacaacgcacgtgcactcacccctatgaacgcacgcacgcaaaccctatccctataagcatcttcgaagactaggccggcaaattcttgagagattaatgaagtcaccataagcgcctcgctgtcgacgggtacatcgcctaccacttaaattataatgccgttaaaatcctggaaaattcactcccatggggagtcgaacccaggacctcagatgctactgaggctcatgtaaccactacgttataggccctttcgccctatgaaaattctattgttccaacaaggagccctaagtacctatgctttttgcgtgtgtcatccaaacgacggttttataactaacctgtgttcctatttgctgcaggaattgaataatgggcatgtcatcctattaaattttccccaatattatggaattaacaatgacatttaggttcacgtacgttgtataggaaaactagatggaacgcgattccctcacgctgggtcacggtacgtattaaatagggtagaaacagcctctaccgtgacgattacaaagggataacaacatatggttacaagagataaggataaaaagataacaacagaaacaggataactaaacttatctatatttcaacaccccacctcaatcacaacttagcccaagttgagattgtgtctaaactgtgctaaactcggcgccggcagggatttagtgaaaccatcagctagcttatctgttgtagatataaatcgtatatcaagtagcttcttcgcaacttgctctctcacaaaatgataataaatctcaatgtgctttgtccttgcatgaaagactggattagctgataaataagtagctcccaaattatcacaccacaattgtgctaccgaaggtcttgcaattctcaattcatccaaaattttccttaaccacataacttctgccgtagcattagctaaggctttatactctgcttcagtactagatctagaaaccgtagcctgttttctagcactccaagaaattaagttaggacccaagaaaactgcaaaacctcctgtagatcttctatcatcagaacaaccagcccagtcagcatcagaaaaagcactaataagcatagaatcagacttaccaaatctaagtccaaattccacagtcccttttatataccttaaaattcgttttactgctgaccaatgcactgtagtaggactatgtagaaattgacagaccttgtttactgagaatgataagtctggtctagtcagagtgagatactgcaaagcccctacaatgcttctataatgactagcatcattttgtcccaagaaatctccatcttcaatagacaatttttcagtagtagataaaggtgtactagctggtttgcaaatagacattccagctctcttgagaatatcagaagcgtacctggcttgtgatagcacaagtccctgactcactttcttgacctcaattccaagaaagtagtgtagatctccaagatctttcaatgcaaaatccttctccaagtccttaagtaaggctgcaacagcttctgaagaagaactggcaacaatgatatcatcaacatacacaagaataaatatagtgcaaccacccttgttataaaagaacaaggaggtgtcagcctttgaagaaataaatccaagttcttgcaatttcgtacttaagcgagagtaccatgcccttggtgcctgtttcaagccatacaaggctttgtctaacttacacaaataattaggctggcctttgttctcaaaacctggaggttgtctcatatatacttcctcttctaaatatccatgcagaaagccattttgaacatcaagttgtctcaaactccaaccttttgagactgcaatagacagaattaggcgaaccgttgcagctttaacaactggactaaaagtgtcctcataatcaataccatacctctgcttgaacccttttgcaactaatctagccttatacatgtctattgacccatcagcttttcttttaatcttatacacccacttgcaatctattatatttttaccttgggttggtggaactagatgccaagttttattactcataagagcatagtattcttgttccatggcaagcctccaattactatttgccatagcctctcggagattttctggctcaccagtagttgtaagacatccatacctaacagtcccatctgtataccgcttgggtttagaaatacctttctgtagtctcgtgactggtctcgtctgatcacttgcctgtgttgtctgctgctccggttcagacagctctgacgctgctgatgatagcaatgtgacttggtcagcatgtgtgccatgcactgctccaccactcggtgcactagtactaggtgatgaagagattggtgcagcatcactgtctgactgcagctctactgacacgtcacgtagcactggtgaaccatcatcatttcctgcgccagctgcaccaatagaaaactgagactgcacaggaccatgcataaaatcatgtggcataaaatcatgcgtttcctccagtaaaatgctttcttctctgctggcgctacccggcgacccggtttctgcttcgctgcttccagtagctgaaccaccaatctgagcaactcctgttcttaaagaattctcaccaatttgattagaaaaattaggaggacaattaaccaacggttggtgcactatttcacccccatgatcagattgagtggtaggagagaaactatcgggaagaaggaggagttcaatacgaagcctagtgccagcattcggatgaagagtagcgaatggatacacagtttcatcgaacacaacatcgcgagagatataaacccgaccggaagcaacatccaagcatttaaaccccttatgaaggaggctatatccaaggaaaacacactgtttagatcgaaaggatagcttatgagcttgataaggacgaagattcggccagcaagcgcaaccaaaggtgcgaagggcagagtaatcaggtttgatgccaaagagatgttctaaaggtgtctcaaagttgattacccggctaggaactcggttaatgagataggcagctgtaacaaaggcttcatcccaaaacttgaggggcattgaggcatgggataggagagttaggcctatttcaatgatatgccggtgtttccgttcagctgagccgttctgttggtgtgtgtgtgggcaagagacaagatgtgctatgccaatctgagaaaagaagctattgagtctttgatattcaccaccccaatcggtttgcatagctttgattttagtattaaatgaatgttcaacaagggtctgaaattcacgaaatttggagaaaacttcagacttgtgtttgagcaaatagacccatgtaaacttactaaaatcatcaatgaaacttacataatagttcttattgcccacagaggagggagctggtccccaaacatccaaaaaaactagctctaaaggagctttagacacactaacagacttaggaaaaggtaattgatgacttttaccctgctaacaagcattacaaacttgattctgagtactctcagaagacacgggtaatttatttgagctaaggactcgatcaatgatagctgacgatgggtggccaagccaattatgccacaacgtcggggaaaccttgaaagcgccaaggacttgctgagcttgtttattgtgaagcgtagatgacggaagtgggcataggccggctctacatctgccgcggagcagcgacatctttgttgcctgatccttgatcaaaaagaaggtaggatgaagttcaatgaaggcatggttgtcaagcatcaagcgataggcagaaattagattttcctttgtattaggaacatgaagaacattattcaaataaagcttgcgagtgggagtgtgaataatggtgcgactaacatggttaatgtccatacctgagccgcttgtcgtgtgcacttgatcgttgccggcatatttgtccttcaccgtcagcttgtaaagttcactggtaatgtggtcagtggcacctgagttgatgtaccagtttgtgtcaaccccgtaggacaaggctgcgacattggcactcttgtcttccccagtgaaagaggcatcaaacctcttccagcttttgtgcacggtgtggccgatcttgctgcagagttggcatgtcggacgattgttgttgttgaaggagccaccgtcacctctgccactgccgcggccaccaccgccacggccgaaaccaccgcgaccaccgcggttggcatctccattgcgttcgccgcctctgccgccgccgccgcaccctcctcgcgacacagcattggcggaggactgagagcctccttgaaggagaccaagacgctgctcgaaactcagcagttgcgcatagacttcaccaaaggaaacagactcagtgcgtcccgtaatcgaggacacaacaggattataatcaaaatccaaatcagcaaggatatgggagatcagatcatcatcatcaagggcttttccagcagatgccatctcgtctgcaagccctttcatctttccaacatactcggcaatactatggttacctttcatagtagatgacagagccatgcgcgtgttgatgatacgtgcacgggactgcgagttgaagatctcctcgatggcatcccaaacgtctgctgcgttggtgaaggttgccacctgagcgaggatatcccttgacagagacgtcaacaagtagctgagaacttgttgttcttgcgcctgccattggagaagcgccggatttgccaccttctcggtggtctccttcccgccttgtccttcgtggcaaggatgattattgctggtggtggttggatcgagcgatccaggaaccccgccatctgcgctcctcgcagggtggcgagaacttgcgccttccaaagaacatggttggccttggtcagcttctcagtcaccgcctgaccatggagagagggagccgccaaggacgacgtcgccatggcgagatgagctagattgatctggagggagagggctctgataccatataagaaaactagatggaacgcgattccctcacgctgggtcgcggtacgtgttaaatagggtagaaacagcctctaccttggcgattacaaagggataacaacatatagttacaagagataaggataaagagataacaacagaaacatgataactaaacttatctatatttcaacacgttagtgcacaacaggttttaaatttgacaattaaattacattttatgatttttaagggccaagttagtaatgcacaacaagatatagagaccaggtaaaataatacctttctcaaaaaaataaaaaaagttagtaatgcatttgggagtaaatgatttttcgggaataaaagtatcatcatatatattttaggtaatccgttgtgaaacaaaccacaccatcacaaggcacactacccacttattctatcttactataaagttgatgtccactaagggtgtgtttagtccacgtcaaaattagaagtttgattgaaattggaacgatgtgacggaaaagttgaaagtttgtgtgtgtaggaaagttttgatatgatgaaaaagttggaagtttgaagaaaaaattaggaactaaaccagacctaactactaaagctcaacatgcaagtgtgtcacgtcatcaccaactagcaattattttctagagtattttaattcacatacaagtatgccacatcattacccactagcaattattatctagaatattttaaatatcatgcgagcatgacatataatttacaattttgttatattttgagaacttaatatgcaagcaatgtcaaaccattatctctacgtcattttcatattatttaaacatatatatctaccatttctataattaatatgtattcatccaaatatcccgcagcaaagcacgggatatcaactagtactaatgaaagctagatgaatacatttgactaaaacaatgtatttacgtgggttttacttttaacacaagaaaaataagaattccaattgtgtgattcaacttttaactcagtaatcaacttccaataaatgattttgacttttcaacaaagaaaaagaaagaatttcaattcaaagatatgtaacaagctatggtcgtggcaacaagccaattaattgcttctaggagcaagctcgctattgtacaggatcgaccagatgttattttgatttgatcttttattttgagtaatctattttttctattgattcagttggtatctgatgaaaattttctgctccaaatttgaaatttttactcctcaaaaccgtctagagtgaagtgcactgctaagttgtttttcttcttaaagtcacttttttggaaaattcttggtgtatatatttgttaactaaccatatgaaggtcaaaagatgataccgggttaggtatagaattttcgctgtttggcgaacacctctatgttagagcagctataaccagtttcaggggaagaccttgcgttgcgttgtggcaaatggcaagccgccataccttagtttctagcatggacaaccctgaacagtgacgacggagccaaggaggaagagagctccgctgtaaaactatcatttgactgccctgactacgagtataggacgtaggcatgtactagtgcattgcagttgccagtttagggccttttaactgactaggtagtctctgacgttaagccacaacgatcagtttccttccatttttctttggttctgaactttatggttaaactactagtctatttaatatgtacaagctaatatactaattaagtgctgttgactacatatgctgggtttctatttgaggatttgagcaaaagtatcattactgattttgagacagtagcagcaaactttttgagaatatattgagtgaatttcattttggacccctttttattaccctagttgcacaatggacaagggatttaacaaaattttcacttaacaccagctagacttgccaaaaacatagcagtagtttggaccagggtattgctctagctgctacggtgctagtgctaccatggctatttctataatccatgggaggaaacatttgcttaagttagggacggaggcatcgattgtttcgctttagttgcagttgcctgaaccatggctatttggctattaataatcatgtcatctgtttgtctatagttgggctggtgtgcgaggatcaaatcagagtagcacatcagattgcaggccaccgtcggtgagcttgagatcgagcatcaccatcctcccattccgtgcttgagaagttgagattgagacctgtacgtgtcggcccacacttgaacccaagcaccgtcgggcgctgactatctcagcctgaagaccaaccctttgcgttgcctccctctctgctgactatctcggcctaaagacccgccttttgcgttgcctccctactcgagctccatcaccagcacctctagtgctgttggctgttcgctcgagctcgagctccttcaatgctgtcgatccatgctcgctgctcctccctccatcgatgctgtcgatccatgctctgctggtcctccctccagattcgatgaccgtgaccggagttccgcgctgcttccgtactctttcctctaagattgggccgccggagttctggacgagacaatcgcccccctactcctgctccactttagatcatgtcacgggagcggtcaccacctcctctgacagcgaggcagatagggggagggacacttgcattggagatgggctgccggacttggagaagatgagggggtggtctagagtgaaaccaatggtagaaatatgtggtccaaagtaaaaaccattgctaggacctagtccaaattgcaacaatggtaaaaatatgtggtccaaactataatttactcgaatatattggaaaattaaaacattggtccagtggctcgccttcaacctccacctataatgatatattccaacaataccacttctctagttctcctaactagaaatcagtcatttctatcattttacttcataattggatagttagatgtgcgcattgcccctttttacatatacattatacattaatgttttttcatgtcattaatttttagatacatgtcacagtattggtgtattacgaatcggtatttgtgtctaataagttcacccacctataattttgtgctgggtcagccactgaccagttctattaactacttttcttataactcttgtagaacatgcagttgttattagccaagccaacagcatgtggtttgggaaaccaaacatggcatacccaacaactactctagactcatggatatgcatcatatgcaattaggatgttgtgcaaacatgcatgtgcctaacccctctctatcgatatcatcttttaactagaaatatgttttaaaaaaactctaaaaattaaagctgcagagtagaggcaagaaaaaaaaactaagtagttgtaaattttagatcactttcgtattaaatgtattttgttatgtattttcatgcttaagatgaaagtataaatctagtgtacatcctggcactacaacaaaaccactgttttaagacgtttcacttaagttattctattagtaaaattaaaatagggacgatgtttgagacgctttattagttgaggacatagtttaagacgctttacaggttagcataaaattaaatcgtttagagaggaatattgagacgttttgaaacgtctcgtgtgtagaaatgagttttgagacgtttttattatatccgtgtcatcattattagataatatataattatttatatagagaaagaagaaaataaacacattgttactaatcgtcatcatcaaataccattataaaaaattagagtatctgctacaggacgcttgtttgcagagttgcaatataaaaaaaactatttatttaccttcaagattgttcacgttaatgacttggttagtgcatgaactttgcaacctgcaggtgctgtgttcgagcccagatgaaagcattaatatcaaatatattaagatgtgcgtggctatataaaagcgtctctatattttgtagagatgcaatttatacgtctctagcaacgtcttaaataatataggtacgctttaaaaagcgtctccataattttgagatggtgtaaacagagacgatcctacgatgctttataaaagcgtctcagttatctgtgggagacgaaataaaatgtctctatcttacaaataaaatgtctccgttgggttgttttgttgtagtgtgggaactagattcacataagtatgagttaagaatatttgagatgttgtacatctttagccatttttgtcaaatctcctgaatgtgtaatatatctggtcgtcgccatcgagtggtttgacggccacatctcaggctaaagttgactggcagcctaaaggcccagcaaagtctccaatattcttctctcgaaacgtcggatatttcattatgtttgtttgatgacttgaattattcacttcatccctcaaatataatggaaggtcaatataaattaaattataaaattaaaattttaccagaataaatttcattatataaaaataaaaaaaattggttggggcttataaactgaatgtacacctatggaaaaattagaacgagactcaacgttctaaactaaagaatttagataaagttgaaaagaacaaagaaaacaattgaacaaacctttcgtcgtttttaactaaatactcactccatttttatgttacttctcattttaactttgtcctaagtcaaatattttctagatttgactatcaatttattaaaattcatatagtttaacaacatactccctccgttcaaaaaaaaaagacaaccctcctaggaggggacgaatggagtatttgtattttctaagtcttgcaaatgaagttaagtttggtcttttttttcataagggttttttttttgaactcaggattttggggtgctactcagatcactgcaaccacaacactaaatgccctttcacagttaagtttggtctagaaaataatgttgcatgagtaaatattatgtctagaaattgaagattttctttcccaaattgtttcttttccctcaaacaatatttcattgggttcatacttcggttaactaaactatgacttatcattggacagcatgtttggctaccaagaacataatttggattggtggttgttggtatttcttacgaccacagataaatccgcaagcgcacggaatatcgctgtaacacttcaccttcgggtgaccccaaaaggatatcgaactcagggaacgtgtgtaatctacctaaggctaagacaatccaaggacaacaattataggtaggctaggtaggctagagaggactttctatgtgttttaattatctatgctaagcaaggtaattccctatctgttgctttggacaccgacccctgctggtctgccagcgtggttccggctatagctctatgatgtatccgaacgtggaggattactaggacgggattcagggctgtcaccacctgccgcctacctctgacaaatccgtcggatatacaacaaacaaaggtaatctctaacctagacaccacgtctaagttattaattactactctaatacttgtacaggaacttccttctctatccagagtcctagtactagagcacttaatacgaatactaaacaatgaacccgcaaagatggaaatatatcttactcagactaagtaattaaataacataagaaaggaatatgaatgcttactttatagaagaagttctctgaacccggagcagagtgtaccgacagctccggtactcctccagaattcctcctaggaagctacactcgtcgagaaagaagtcggatgagcgtcaaacttccgggcactcctccagagcttcccctcactctctacctatttctaatgtacaaatgatacaatagagcctcttataattcaactcaaagttgtgtgtgttggaatgagagtgaagacctccatatataggctccaaatgacggttaggggtatgggaaatgaccaaaacaccctgcaaccgccataggggaggaatccaagctgtccacgttaagccagatggcgggaggcgctaggattggttcggccgaaccaaaaatccctcctcccagcctttcctttgcccggtatgtagcttattgggcccccaacatcttgcacaatgttttggcccaattctaagtggttttggttgacatatggtcctccaatccgtgtaaacgcgtcctgaatgcgcagagatgcattttgtcacatgacggatgtgttttctcctcaaaatacctgcatacacatatttcaccaacactagtggaaatgattagtaacaaaccctaccactaagttggataccatattttatttcattatatgcaagtattgacggtcaaatattatgatttaaggaccgtcaacagtggttatcggtgacaccatgttaacgaccaaatttggtaagatgtgaacgaggttcaacattaggatcgaggcggattcgatgaagagatcgattcgaagaacagagtatgcatcggctgtgaaggtatcagctggagtgtacatcagctgggatggatcgaacagaggatagccgatacagccgattacgatgaagacagtttcgaggcttcttttagaatcgttcaaagtgcttcacagggattgccatgatagagataaagctctcagtttgggcaattgtatctattaattaggatattttatgtaatttctttagagatatgttttggcaaaagtttgctgcaaagacttatggtatcttagagtttgttagagataagtgtcgtgtccggcaaggacatattttgtatctcgggtataaatagagcccgaactcatgtaatcaaacaacagacgttcaatacaatctcagcgcatcgccacccttttactttcgtttactttcgacaagttcttactttcgggttgagctgcatcggtttcgattttcaactagaggtaaagcttgttatggcggcttgtgttctcgggattagtgcttccatctttatgatactcttatcttgtttatgtaattcgtcaagttatcatatattctatataatctttgacaatatcgttatttaaccttcaatcggccagcatctatcatcagaaggcaaccgattaggttaattaccaatgctgatttagattatataggatatccaccaccctatgaaatattcaacggcttgattgtctagatattgtccttcttttcatacttatagctgcatcagttgagtttgaccttataagtcgtgattagaatctaaatctctagcctgcttttggttgctgattagggtttcatcggggtttcagccgatcttacctgatttaactattttatatctcatatgcttgattgatataattaaatctgccctttatgttaagattttgttgcgtttaggtatattaagcttcccgtttgatatatttttgcttgctttaatatctcaatatagagtgatatcggagtactagccgatacatgctagatctgtctgatcggctatgctatgaatgcttataatcttcttgttaatatatattttgatctaagtaatttatactaaaaaacgacatggcgaccgatctatcccaatcacttgatttaagtatatatcgacgaaagcattatataccattgatatctacaaccgattgaatagatttagttctttcttgcctatttatgactgtcgatcgactcaaacatgacatcagctcaaagataaatgatacgtcattggggactggccgatcggctatcgtttatagatttaaccgctattttcctgtctttatttcttgttgattgcaggatcaaatcaactggcacgctcacaaacctaaaggcaagattttttggacctgcgctggagttaagcagatctcccaggcctcgtgtttttcgcatcaacacaccaacaatttacagattgctgtgtaggatcgaatcacaacaactaagccaaccagagggggggtcaatggttggtatacccaaaaaccgaaacttttagcggaaataaaagttaccctcaaattcgacggatcgcggcctaaccgaagtgtatgcgccagtctgaccgcctgatgaacgtcggtctgaccgagattaaactccgatcgaaccgccgagatcgcctgccgctccctgtcgccaccgccggtctgaccgccgtgtgcccaccggtcggaccgccgcgatgccgccagtctgaccactagtgcgccgccggttagaccgtcgaaacccgatgaaacacaaatcgaagaactcttaaaatagatgacgactttattgattctctctgtgtttacaaagtgcaccaacaacactccttacaaaaatttcgactaaactcgaaaccctaactcaactatcaactcaattgctctcaaaagcgataccgggaagtctcacgctccctctctatttatacccaaggtaggcagcctaaagccacgaaccaaactcatactagaactcctaatcaccctaggaaaccctctagtaccagaaacaaactttacataaccaatcataccaaatttggactccttccaaattcaactccacatcacatacgcacacaatacctccatcgtatgccatatggaatcttcaccaaccacgtgtattaaactctagccttagtatcccgcatgatctctgaccatcatggacgtcgtcttatccccaagccgacttccggtccatcaccgcaaaaactctcccggtatctcgagtcacctacacatagaacaaacaaagaaaccatattccgagaccaagctatccccaaattgactcattgttagcaaacaacagtattacatacgcatagtatccatctagaagccataattatgaaacaattacggatatccaaacaaacaacccaaaaccgaaaccgacacagagtcggcatgtcagaccgcgggttgtaccggtctgaccgcgtgatacacgccggtctgaccggcagcacatgtccggtctgaccggtccaacaaacagttgtacctgtagatcacctgtgaaatccaatcatatccaaaaccacttcgcaaataaattctaaataacaaaaccaataatctccaatgctaattgttcatcacagaataataataacacttttgattttacatgctgctctggtagagaggttcgatcagctagtcgagtgcaagcttccttttgttcagctgtcgcgtttctaccttctttcttcttttttatgctttctctcgggtatctcgttcctgttatcgttgacaggcattttcaagctttattgtccaccatgttcgaggatcaaggttccattccttacttttctgcaagtagctggttagcatagcttggttaatcgctctggcaaacactaacttaatacttcgttcgttctccaataattgacaatgatactatttaagtttaagctttaatctcttgtctttttcttgaaaatttatagaacttgaaaatatgttatattggtaaaatgtgcaacgccataaatattactattatacaactatcatcatcataatataattatctaaatatttttgtcaaagtgaggaggtggacgtagtcaacagcgtcaattattcgataacggtgaagtactgtcaaaaaaacacaccaccttaatattataaaattggaagtctatttcacctcaattgttaattaaaactatacaacgcaagggtttgagccaattttacattggtcactcagttttcaaaaaaaaaaaaaaaaacattggtcactccatcactgtagagagatgtacaaagaatgaaccgtacgtgtactacagtagggttatgtggcgaccgaatggtgcattagagagcggtgaatcttagaacatcaaccatttgcgtgatgatactttataaccagtggactccactgtatctctacgtgactacgtgggtcaaaccatttcctctaaaatatgtacctgtggtctttaaggccttgtaatcatttaatttagtttgttgcttatatgatgatttattttgggtctgcacccatctcaccgtctcaattcattcttctcttatccttactcaagtttgtaacaaatgttccatctgtaccatttatatacaatttgacttcaacctcaacttgttttgggataaaaagaaacacattattttactttcataaaactcacacagtaaagcctggcctcaatacaatcatttgtactattcattatacttatattatttaccatatttctttcgatagttactctcaatgtgtatgcccgcatacgggtgagagagggtgagcacccccccaaaaaaaaagttaggtgcctattttttaaagaaaaaaaatcaagatataacatgttttaggactttctcttattttcagccataagttttatattttctccaattctcctcctattatttagttggaatgagcttgtttttgtctgctccaattgtttgattataattatggtcatatttaaaaaactgtacctcaatttagatctgatttgttatgtactttggttaatattgatagtctaaagtgaaattcattcttctctctctttttattttctaaaaatgtgaggcctcactatttttttagcacatattaggtgggctctgtgtattaggtttgagttttaaatttatacctacagatgaaaattaaagggtacatcataaaattttcccggacttctttaatgctgatttggtccctaaaacagcaggactgcacgtgtaaggaggatttgacgtacgtaacgcgtcgccgatacagaggtagtatggtacttgtatatgtagcgttttgtttctagttaggtgagaatccactataggatatactactatgccaaaataaaataaaaaaaaagctctaactacgaatcaagacatatatatatatatacagcagttcaagtttttagttataattgaattttttttaacagagagggtatatcattatgtagttaattatgttgttagttggtatatattactaatacttcctctgggagtactttctctgtcccacttttaagtctagtcgtggatttttgtgttcaatatttaaccgtccgtcttatttgaaatatttataaaaaaaattaaaaaatagtcacatataaaataatatttatattttatcatctaataacaataaaaaatactaatcatattttttaaaataaaatggacgatcaaacatatggcacaaacaacgtaaaactgtattcattttgggacagagtagtatatacagtgtataaaacgcgttagcaacactggtcattaggcttgacttcctccgagatcgatccatatatttattcctccataattaatccataacatatccggtcttacttggcagcacatgtgcatgtgtttacttttttttatgagttggcagcagtctgttattttttttccccttctgcgtaatgcttatagacatgagtatgagctgggcttggaccgggccgggccaggccggtctagggtgacaaaaatcccagtgaagcctatcggaccgatgacttttatatgagaaaaacaacaaaaataaatatattataagtagcggttggttttattcggtttgatttggtgctgcatgcttagccagtgttcgataggaaagtaactcattaatgcatgattaagtaattattagcttaaaaactttaaaaataatgtaacatgatttttttaaagtattttttatttttaattttgcaaaaacacaacatttagaaagtaagaaagcgtgcatgtaaaaaacgaagtagtagaagttatattatttatccattcttctaagatataatttgtcaaaaaactttctttgactatattttacttacttagatcacttattataaattactcccttcatcccaaaatataaccattttagcatagtgacaagtcaaacaattttaactttaactattaatagaaaaaattttaaaagatcaatcatgtaaaattgatgttactagatttattattaaaaaaaactatcataatatgcaaccctttttatttaaaacatcttacttttatatagatattattggttaaagttgcatctcagagaccatgtcagagtccaaaaatgcttatattttgagatagagggagtaacattattatgtttataacatataatatttattctctataatcaagtggatagttcatcaacttttatcctcaaataattaaaaatagtgatactttaatttagtgctgccacaaagcaaagaaccggaaaataacattagactttgttccgcactacactttcttaacttctactctctcatttttccatgtgtacacttttcaaaccactaaatggtgcgtttttcataaagtttttctatagaaaagttatttttgaaatttatcttaatttattttttattttatctaataattaattaatcatccactaatttactactctattttgcgtgctgtttaccaaccccaaatgaactcatctttaggttctcattgatgtaagtggcacatgccacatattttagctagtctacacattatgctatacgagattatctaattcaataataaatgcgatgacaccgtgtagagattctctttatgttttttttgttgttttcctaataatgaaaaaaatagagcatgttcacttgtgcactcatttttgcttttgtgaaaaaaaaaggatgtttgtggtcgacataattatatgttgtgtctttcagatagatagtgagtttgtttctcttgttgtttacgttctctcatacggtacacaaggagaacaaagttacaatcatatccacaaaaggatgatgacgcatcatttcccccgttgttatttagtgtagaaacatggttgcgtacactgttttgggtatagagggttggattttaatccattttctaaataaatatttttatgagtccttttggaacatagcattaagtatttattaaacgatttggttcaaaatagaataaaaatactagttggtccaaaataaaagattcattgaaacaagtatttttaaaaatacactcatgtcctatttggggtgaatatgactaaaatacttgtagctggttgtcagtataagcccattatttatacatagaaagtacttgctaaaattaattttagggtaacattcgatataaaccctctattataaaaatggatagataagatcaaatatagtcactaactcgcattaatagtaccggtagcattatcaacaatatccatccaaaacatgaaaggaggatagtgatatagttcttcctatttggtttcctacccagcaaaaacggaagcagatcctctgacttaactgcacatgcagttgaggcactgacatgtgggtcccactttactatggcccacatgtcagtgactcaaccgcacagtagttaaatcagaggaaccctttccagcaaaaacatactcactcccccatcagcaccacaccactgctcaaactactccacttgctcctgcacactggccagccatacttgtgcagttgtgcccacaaaaaaaaaccctttgcaacactgctccactccatcactagtgctgcaccaccaccatcatcataaccaccaaacccccatatttcctagatccacattcaatcctttccccagcatttcctcccttttgttttttgatgcaaattcccctccttttcttttaaaccaaaatccctcttctcttttcttttttaagcaaaatccacctcctcttttttttaagcatcataaccaccaaacccatatttcctatatccacattcaatccttcccccagcatttcctcccttttgttttggatgcaaattcccctcctctttttttttaaaaaaaaagaaaagcaaaatccctctcctcttttcttttttaagcaaaatctccctcctctttttattttatatttgaaacaaaatccctctcctcctccccaatttactcccctatttactccctccacctccctccatttatgacctctcttccctccacctcctcctcctcctctcttctcccctttcacactctagccatactctctccaccgcattagctcgccattgccaaccagaggagagagagaggtggtgggcagcggccacttgcctcttccgagctgtctcccatgacaccaccgccgccgccggtgtcgcttgctccgtgccaacaaccggtcgagcagctggtgggtggttcttgctagcacgcgcggcgcgagcgccaagatctcaccgtacgcgtgcagcgccgcggcgggcggccatgggtgctcgggtggtgctgttcttggccgtggccgtggtggcggcggtggcgcaggagccgaacacggacgcctacttcgtgtcgaggttcttcgccaagatggggcgggcggcgccggcgtcgggcgcggcggtgtgcgggtggcccggggtggcgtgcgacggcgaggggcgggtggtggagttctcggccgccgggatggggctggagggcgccgtcccggaggacaccgtcgggaagctggcgcggctgcggtcgcttgacctcagcggcaaccgcctcgccgcgctccccaacgacctgtgggaggtgggcgcctcgctgctggagctcaacctctcccgcaacgccatccgcggggacctcccgaacaacatcgtcaacttcgccgccctccaggtgctcgacgtctcccacaacgccttctccggcgcgctgcccccggcgctcggctccatcgccgcgctccgggtgctcgacgccagccacaacctgttccagggccagctcctcggcaccgtcatctctggctggaccaacctctcctccatggatctctccggcaatgcgctggacggcgacttgccggacctctcgccgctactgtcactgtcctacctcaacctgtccgggaacaggctccggggctccgtcatcggagcgttccatgagcagatgaaggtgatagacctcagcaacaacagcttctcggggctaaactttagcagtggatatgcaggctcatctttggcatacctcgatttatcaggcaatgagcttaccggggaattcagtgttggcaacaggtttcagaacctgaagcatttgaatcttgcattcaaccagttgtccgtggcaaatttgctggtgtccatgggtgagatctctggattggagtttgtcaatttgtcgagcaccgggttgcatgggcaaattcctagggagttgtcttcccaattgtctagattgaaggtgctcgatttgtcgcggaacaatatcagtggagtagtgccagacttgagctcgattcgcctgcaggtgctggacttgtcggtgaacaacctcactggggagatccctgtggcattagtgaagaagttggtgtccatggagcggttcaacttctcatacaacaacctcaccgtttgcgcctccgagctctctcccgaggcgtttgccgctgcctttgctaggtccaggaatgattgtccgattgccgtgaatcctgaccgtatccagagaagtgggggcaaacgcaaggggatgaagttggcgttggccattgtgctttcgctcttcttctcggttcttggtctgctctgcgtggcagttgcatgtcggcggcggaggaagaggggtgatgtgctgcctgctgtcaagcaggtgtcattcaaggaggaaccagggatttcaggcccatttgcattccagaccgactcgacaacatgggttgccgatgtgaaggtcgcaacatctgtcccagttgtcatctttgagaagcccttgctgagtttcactttcgccgatctcttggcggcgacgtcaaattttgataggggaactctgctggcagaggggagatttgggccggtgtacaggggatttctccctggtggaattcaggttgctgtgaaggtgttggtccatggttcggcaatggctgaccaagatgctgcaagagagcttgagcggctgggacggatcaaacatcctaatttggttcctttgactggttactgcttagcaggggagcagagaatcgccatctacgagtacatggagaacggcaatctgcacaacctacttcatgacttgcctctaggagtccagaccactgaggattggagcactgacacatgggaagacaacaatggcggtgttgccaccgaaaacatcacaccagagggtaccgcgacatggatgttccggcacaagattgcattaggcgccgcgagggcactggcattcctgcaccatggctgcatccctcagatcgtccaccgtgacgtgaaggcgagcagcatctacttcgactgtgggatggagcctaggctgtctgacttcgggctgtcaatgatcgccgggaccagcacggacaacaacctgctgcaccattccccgggctacgccccaccggagttctccgactcggagaacgccatggcgacagcaaagtccgatgtctacagcttcggcgtcgtgctgttcgagctgatcactggcaagaagccactgggggacgactaccccggccagaaggaagccagcctggtgaactgggctagggcgatggtgaaggcaaacctcgggccgggcatcatcgacccaaagatccgcgacaccgggctggagaggcagatggaggaggccctgaggatcgcctacctctgcaccgccgagctcccctccaagaggccggccatgcagcagatcgttggcctgctcaaggacattgagcctaaggtagcagagcaggactgaaataatattactagtgtttttggggtattgaaaagcaagtgtaggcagtgagctccttagttgttttggcatagtggagcttcactgcattgccatgccctgctctcctctgctgggatatatctttttcttcttttttgtttcttttttgttcttccacttgttgagatgttgcaatacagctttgctacacctgctccttactaacaatgttactactaccattgagtcatgacacatggaagatagctctctctcatcaatgtgcttgttttgcaagagaaatggcaattaagcagcagcagcagtcctggtactttgctgtctctgcccactgttattgaacaatgtagtatacttaagcaaacatggaacacctttaatactgcttcctagtactacatgttcaaataagctgtcaaaaattaacaaaaagaaagacagcaatactactccctcattcattgacatgattgcagctgcaaaaccctgcactgtcctgaaagtgtgctaataatcacctgtttagaagattaaagtgtgttccataccatcattatgttccaacttttttccagtttttatcacccctgctgcacctgcactgccattgcatggcagatggctcttctttactcagctcctttgctagtagtgcttttttttcaccttttttatttttttttcttaataattttggctcttcttctccgggttacgctatctctaagtattaattatgctctcggccatgcctggctgccagtgtgatagccttttgagaggccatcactgaagagaaaattaaaaaaaaaaatcacacacaaatcaaatcgctttcttgaccaaccctgcatcgaaatcgctatcaagcatgcgctccactcctgatcattgtgctttttctgcttgtgtagagcacaagtgagtgactgatccaggcacaaacccacaacttttcagctaaaattcggacaaatttagtgccggaaattgctcgaaaatctcgtctgatgtggtctgaccggtgttgtactagtgttacctggctacaagcaaggagattagggttttttttttttttgcaacaaaaggaagagtaaccgcgtggctgatctcctgtcaacatcataaacctaggcattttgcgcggattagcgtcgtgatttatggggagatgtagtgtccgtccatcctaattaagtgcaatcatgggaagagtatgactagaacagtagtaaaagggcaattatccttaaaaaaagttagtaaaagggcaggcaggaaggcaggaactggccaaattgtgattagttaagccatcaggatcagatcaaagctactcttcgctgggtatagagttgttcaattaattaaaagtggtctcagtagtgtgcttttgtggccaactaaccagtactagtacatatggtacattgcatgttttttgtatcatactacctgtttggcacaacttgcaaattgtttttctttttctttcaccatgagaggtgagagctacttccaacacaatgtgctttcgtgtccaagctgttttggcacaccgcttgtccgtatttgtcactgtcaaccatgaattaattactgttatttatactagtcttgcctttgattattatgacaagaatggatcaaagtggttaggtaactagctaggtactaatccttgtttacaatttccccaggtaccataatccagggagagttgttcaaaaatttctggtggcctaggaactgaacttaatattttggacgtgttcaagccaattgttttaaattttcctttgtccgattcatttttaattacatggagaagatgcgtacacacaacacccggccgccaactcgaagcagccacgagggtaggatggacattttacagtcactttatctgtttaccaaaaagtaattattatagtattaatggatatgattatagtgtagtaatactaatggatatgatgttccattacaaatttgacagatcaggactgtactcctagggtaaataacggaccttgatggtcctttatggctaatgacaaccttgatctctgtcactgacaaactaattaattctacccttaattaattaatttcaaatttcaaattcggagtcattgtcactacgcaaaatgtacgtatactcacaaggtatctggagagcaaggttgtacatggtccagttgttagaatctctgcccctcaggatcccaacatctcaaatcatggcctcctgctacactccaaacatgtcaagacaaaacatgagaataacaagacgatcaaaaggaattaagcatgtctatgtgccggccaaaatctccacagaatttaattaattcaaaaggcaacactggtaaccaccaaattgaaatgtctagttcatagcaaatgagatatgcgtggccattaatttgattctcaactaacccctaggacgcatttcaaatcaatccatatagatagtaatgataatttcattgtactattatctgtacttacaaacgcatctaaccgtgaatataattcgttcctacattgccgcaacgactacggattcattaataaattaggtaatagtaggagatgataggtagacctggtccatacggtagtacaaattatttagttattaattcagatctacaaaagtgactgcttggatagatgttactacaagaaatgaattggtagatgaagctaattcacatacaggttaggtctatttacaatgtatatatttactacttgagtttcattaaattacagctcaaattctgaataaattgtaaaattctagcatcaaacatggacatccaactcctacctctctgatatatgattttttttcttttttaaaaaaataaaaacacagcacaaatacaggcgcttatacccactcttttttatgagcacattttaaagacagaccggtatactttaaaaatgacaaatgctcacttcgcctcatctatgatcactaggctaaggtcaaaaccaactcacttgtgtttttaccaaacataaacttaacgtgtactcatacatattcttttcttttctacttttgcaaatcgatactttacttgattatgctttggcacacacccaagtgcatcagtaatcataccaatgggacaatataattccttgattaacaacactaacaaacttgatggctacacatgctattatgaaagcgggacaaaaggtgtaaatagatttgtactcactagccagtatgaattttttgtgtgcaaatatgttgatataatgtgcactttataaagtaatggcgtgcattgcatatccgttctcagtgattagcctaagatgaaaaaaaaataggaggcacctttagtgtctttttttacttaaatttggttaaaaatatattggagtggtgggaatttttttatgtcatatgggaattaaattgatttattactgtgctcgattattgtttattttcgccatgcgtcgcctccctggcacagtcctcatgtgggcaggctcgagctgcatgcaccgtgcactgccatgtgtcacctcctgagaagtccttgcatgcgtagaccttagctgccccgcgcacgatcacattttggattctaagcgtcctcataatcggcccttagccgcgagcctgcagcccatagccaagcttttagtcccaagcaatccagaattccaggacgattagtgttttccagctaatcccttcatcccataatataaaaggttttagctaaacaatccgtcctttctacatggttcttgttatgtggaactccgtagcagagaggaatgggctggcgccttgtgtctcctagcctaggtgtaattttataagggtattggagcatgtacactatatctgtgaggttgacacctatgttccaaattagccttgttatacaagtgcccgataataaaaattgttgatgaacgtgaggatcacccgtagtaactagccacagaggatgagtccgaaccgacaccgtgctaggccttgacatgcaggtcagcagctccattaatctaaatggcgcttacaagggtaagaaaatggctgtgaccatagcataataagggggcaaaaaaaatactatagcatttgtgggggggaacatttgatggtgcaatggcgcggatgagtaatttatgcctgtccggctcggttggtgtgaatgtctgaaatctttgacctgctgctccttgagtgggcacgtctgcaggactgacaatttgctgccaaaacagagataatgcgtgactattctttcctcgtacggatgattattttctcctgtaagcagcgtatatttaggatctgtttggcttggacacgtttggaatgcaattttatggctatggtttgtaagttgagaacacgtaacccatggaaaaaaactaattttgagacgggactttatttttcgttttacttacaccctgtttagtttccaaacaaaacttttcatcttgtcacatcaaatgtttgggcacatgcataaagtattaaatataaaaaaaatttaattatccagattgcgtgtaaattgcgagacgaatcattatgcctaattgcgccatgatttgacaatgtggtgctacagtaaacatttgctaatgacgaattaattaggcttaataaattcgtctcgcggtttacaggcggaatctgtaatttgttttgttattagactacgtttaaactttaaatgtatgtctgtatatccgatgtgacacgtagaaacttttcacccctgaactaaacatggccttaagtgaattgcagtttctactactctcttcatcctaaaatattttttaagataatctttatcataaaatatagctaattgaaatttaaatgttatctcaaatatatatctagggtatataaaaggtgattttactccactgctaccatagggcccatcacctcaccgaccctcaacaccagcaacccctcccatacattaataagtattttattctcatcggtaccctctaccatgcattaataagtattttagacatttctttccaatccttaatatctctaaaatgcccctctgctatatttgggatagagagagtgcctttattactaaagctttatttgaaccatcctttaatatatatatatccactttatactatgtaagattattttttttgtactttagattatcctattcttttttctagtcatatctacactctcctctagcaaaaggtggcctatgcataagaggaggaagattgctgttgtatgagcatgtgctcgagaaaagatccagtatggtcaaaagtacaacaaatgaaaaataacctattccaatatgaaaaaaaaaatagctaaaagtgtagttcaagatgaaattttggtaataaaatgtaaagaaaatacaattaactcattttacttttgatattcctaataagccaacagtaacaacaataaaagaaaagagtgaatcgcatattgggccacatcttattaccagagtgtcaagttgggttaggggtaagccaatattgtcactttgcactaggtatttttgcacaagttttatattggagtggtgtttcctaattctcttctttatttgcttcattgagttgaggccgatatctattagctcgagcgtggtgcaccaatgccactgatattgtcccatgctcgagagtgatcagatagcatcagcgatgggctgtttgatttgggggaagacgagagggtggtgtaaggtgaaacaaatggcaatattatgtggtccaaagtgaaaaccttggctaagacctagtccaacccacgacaatggtcaaaatatatggcctaaactgtaatttactcaaaattatgttccctgaaactcaaagttggttgagcattataagcagtagctcaaacaagtaagtttacctatataaagtttgatatagtttaaagatttactcatagtgtttttacagtgagttaattataaatttttcacgacatgtttaacagcaatccaagtattgtgtcaaatactttgtacttacagaaaagaattatccatgcacataaatcacgtcctcaaatactttagaagctagataggttgttagggacttagggttaaggtttagttgaagctgtccataaagggagtattttatctcttatatacggcattatggctgagtcaatgaattatacctttttttctaaaatataagtatttttaaagatacatcaaaagaaggtagtggtggcgcggtattgaatcagccaccctacctacttccattataaatttcacaagttaccccttcaactttttaatattaaaaaaatatcaaacgtaaatgggtagccacatataaaattagattaagatgaatattcgctataaaaaagggtaacacattaatatattttttttatccatagcaaagagaagatatttaactagtagtcagaaaagaaatatttatagtttacagtagagggagtacataaaatccatgcatgtttatttaggaaccaaccgaaggtaaaaatttaaaatttaagcttaaatttctagctgatttatggggttttatcgtagtttatttgcattttcttttaaactacgaataatgctaatacaaaagttttactcataaatgattcttagttactttgtatttttatggcttatcagtcgtagtagtagtaccaatcagacacatgagattgcctatatatataggtttacctagccagttgtgagctatgcacaacaagttgaagtgcttatattgaaaaggaaaaagtacgaattacccctctaactatcgcggtcgtccaattcacccccctaaactcgagaaccggatatttaacaccccaaactcttaagaccggacaaattacccccctaacatggttcgaagcggttttcagtctacgtggcacacacgtggcgatacagtcagcaaaaacaaataaaaaaacagtggggcccacttgtcagctttttttctctcctccttctctgcctctctctcagtgagcagagagagcacgcggctacggcgaacacaacgcgctctgccttcgcctccaccgccgaccgcgcgaactcgctgcctccatcgccggtcgcccgagcttgctctgcgttcgctagcggacgtggttggacggccacgatgccgacgaccaggacgacggaccgttcgccgcctccaccgcgtcaacgagagaagcagagaagggaagggggaaacttgccggcttccccgacgacctctgcctcaccggctcacatggcgtgttgtgcgacgacgacgacgacgcgtcccacgtcatcggcatctcgctcggctacgtttccgacttctccgtcaacccgagcagcgtagcgccctccgcctccgcctccgccacgctcctcacgtccggcctcctcccgcctccttcccgcgcctacacagcctcttcgtctacgcgcggccgctcccgccgctcaagtggcggctccctcccacgctccaggacctcgtgctcgtcaacaaccccgcgctctccggccgcctcgccatctccgtcgcctgcctcccgctcctctgcaaacgtggtggtggagggcggagcttggtggcgagtggcggtgcgcatggctaggtcactccggccggcggcgagtagcggtgggcgcgatggccggggagggatgtgtggctccggttgaccgcgatgacggtcgatggggacgacgtggatgggtagcgaactcgtcaccgtagcgcaccacctccaatgccctcctcagcgccgcccaccatgccctccgtgccacgtgcgccgcttggctgcctgcctgagaaagagagagagagagagggggggaggccgtggatcccgttgacctctctccgccgcctccaacaccctcctggcctccttagcgccgcccgttgctgccgcgccctccccgcgttccgccgccggcccacgcgcgccaaccgcctatccgccccagcacaccgccgcccgccgcccatcgccggcccccgcgcgacaactgcccatccacccccgagcgtcgccgctcgccgtgcatatatgctctgagcccgagagagagagaggaaaaggaagaggaagaggggaagataagatatgacaggtgggtcccactatttttaaaaaataaaatgctgactggattgccacgtgtacgccacgtaggacaaaaccgctctagattcggttgagggggggtaatttgtccggtattgaaagttcagggtgagcaatgtttggttttcgagtttaggggcgtaaatcggacgaccatgatagttcaggggggtagttcgtactttttcctattgaaaatgaatatagttataacattgtaaggtttacatttttagcctggtctgatctgtttggatgtgtgctcaaggatgcactgatgagcttttcgcatgcttgtgtgatgcagtgtgtacagtatgtgcatatcttctggtttgttaaaaaaagaagtgctggtgaccacataattgggtgtttaatatagtccaaattttactgcttaaccaataaaactagatcccaacatatcagttataattttgtcaaaaagtagaatgtgattaagcagaaacaaccagacaagcactgaaattattttttctggaacactgttgaagcaacagatatatattaatttgtcatatcttttctccatcaaattagttgcgaaaatcaacagaacttttaggtttgacaatgcaacaattaattgtggtgaagattatcccatgcatgaagccatgaagggaaaacaatgtaatagagcacctaaattatgtgttattagcaatagctgccggtagatttccaggtaattaataattaaataaaaccaggctactaactctatatgataaaaataaggtagagctgtgcacatggcaagtactaataaagttgtactgacaaggatttggtgctacgaaatctagctggaggtgctacttaaaatagtaccacaccagatctcagctccttttgttattcgtataaacatttaatagcacaaataacacaaggaaatgcaacaactatgtgaccccttttggatcattgatatgagatcagcatagaaacttaattctttttttccgtttgatcagcatagaaactcccagatgcagacggatattaattaattgtagttgagattgataatggtgattgaatcaacatcatgcagctcagcaaacatccggcctctgtttccttatttttcttggcgaaatttaaattcaagatttgttcttctgatgctacaattttcttagttttagaatatcagagaatgcaaactgaggatgcatatataactgcattatgagaaccggagatgattagggcaccggcatcattcgtctttttaactagatagaatagtatatatgatacttttagttatcattatagaataaatttcacttcgggatatcttttatcatcaatatttcgctctaaaccaccctttaaccaatactttgaatcggataattttgtctttgttttattttggatcaccccgactcttttctcaaacatgagtacgccagctcctattcgtcaataaattccctcagtcgtatatgctcgtttctttgacgtatgacaaattgaatatggatggataaaattaagagttgatggtggtccaaagtaccacaagtgtaaaattactcggtccaaagtgaaaacgttagttggtgatccaaaatgaaataatgataataaaaggtgactcaaagtaaaattgactctttctactataattaaaaagagctagttttcatataaactgtggccccgttaaaacacatgaatttcacaaaaattcaaccttattttcagcagagtactggtcaaatctctacttcttaaaacggaatagcagtgatgataagtggtaaatctaccaccaaccctaccaactcgtttagtttgcggaaagaaatctatactccaaaatatagtagtggtaataatgagtgataaatctacaccatcacctcttacgattttgaaaagaaaaaaatagcagcgtggagagctagagcgccttgccaacttcactaattccctactttcttgaaaaataaaaggataatgtgagtccagagggccaacgtgccagtaaaaaaatatacataaattaaaaatggtatataagaaagagagaaataacaggttaatgacccgttgcaacaaattcaaggacaatatgctaataaaaaatatgttaaaaagtttgatgccagtcccactaatcacagtagcattagtcaaatatttccgactgtaggtagtatatactcgctccttcaaaaaaaaaatcaagttatggagtttgaattttgtccgataaaaaaccaaattctaccctcccacctattctcatcatgtaaaacgagaagttttattccttcaatacaatttacctacctattactcttactacttttttcaatgtttaaggacagtcattctcactctccactaatttttactctctactaatttctcctatgatgctaggaatggactttgtgggacggaaggagtactatggtgtcctaaatcagtccggtttctcataatgcagctaaccttagttaattagcattctgatattctaaaactagaaaattgtagcatcatcagaacgtacagatcttgaaattaaatttcgcgaacaattttctgcaggagttagatttttttttttgtctctgaacgacacagtacaaaacaattcattgactggcgcaagacacgaaaggtgatgaagtcctagagaaatatgcagggtaaaaaaaaagtactctgacaggagcgaaatcgacgagatgcacagagatccgacaaagcttgggagatcgatgtatatatgtttctttcacgatgcatcgtttcaggttattatcgtattggaagctttggaacagaagctgtaaattacggagaacgaggtcaacgaggtacactcctgtcttaatttgttgggcaacacaaatgcttcttgtttgtttggacttgatttgaatacaaaccagtaatataacaatgaactgttttgtattatgtcggtatcagttaattattgtgcttggacctcgagttagcactagtaattatcataatatttacaatcgaacaacctttatatttatttagtttgacccatgtggtcgtgtacaatcattaattttgtttcgaagcttaggttttaaaaatgattaatttggaccatataccaaggggcaagagccctttgaaaataaagaagttgagaatgcaaatgaattccaaaaatattacaaatgatggaataacatgtattgttcttttcttttgctcgagggatgactagcttgttcagtctaggggcggatccatggcccgacgatccaggtagttgttggatagtctcacattggttgtggaagggtaatggacctaatatataagtgagggagtctcttacctcattagctagcttttggggtgagaaaggctatttacgatattaaatttggtatcagagcctgactaggtcaacatttctgactcgagagacaaagtgtgtgaagctctaatggaccgtaggtgcctgagggacctgagggaccgtagggcgtgaatggttaagagacactaatgtgtgaatggggtgattgttgaatagtctcactattggttgtggaaggacaaataatgacttaatatataagtgggggacccttcacctcattggctagcttgactgtggggataacggtgaaggggcagtgaacggctgagagacaccaatgtgtgagggggagtttgttgaatagtcctatattggttgtggaagggcaagtgacctaatatataagtgaggagcccctcacctcattggctaactttttgagtgggaaataccatttacgatcctacaagaccggcggtaccatggcttttagaccggcaacaccattgcagttagaccgacagcgatgacagtaggaggtggtgacgcgactggttgggccggccgatctacaccggtcagaccaacagtacagggacggtcagaccggcgcataacctgcggttagaccgatctccaccgacttgaggataacttttaattctgctaaaagttccagtttttgggtacttcaatcattcaccctcatttggtggcttggttcttactattcgatcctatagtagtcgcttgggctcgccgacggattgcaccggatagctactaactctatagttcatatctaaaatctttttacacatgtgcttaaccaggctcttaaagatttctacatccaccgccggttcagtccttcatgacttccaaaccaaatagattgaggaaaatataagctttctatttactagcttcaaaagttgtgatcggaggtggttcacaacaaacaattcaataatttaggagagaacgcttctacaaaatcatggagagagttaaaatatgacttgttagattgagcctacgacatgacacctaaaaaatagttcagcgagatttactacgtgcaaaatgataaatcgggaaaaaaatccacattttttccctcagctatatggccttggtaatttttgtttctcaactataaacccggttgctatctatcctttaactcaacagttaacatttcattctttgccttgaaaaaggtagtttctgatgacgtgacatatcctagttaacaaattaaaataaaaaataataatatgtaggatatatgggtataggaggaaatggaggcgaggatgatatgcttgttctatattttgttattattttttattactgatcgatactcttttcatcctataaaaaaccaatctagtaccggataaaaacattctattactataattctagactaatgtatgtctataattctggactaaggaatgtctagatttatagtattaggatgtgtcatatccgataattgattttctaggtacgaaggaagtatgatagtgtcgacactctttatccatgtaagttcattgtagaggttaccttaccaaccacattagcttgaaccaagggatgtaatatgaaccatttaagagttgttggactaatagtgaaaaatggtttggttgtcgaggcaccaaaagctagactaaggatgcgttagaaatagcttattagcctagcttatttgctgtacgtaaaatgagaaagagaactagcgtataactaattaagtagtattaactatttataaattttaaaatgtatttatttgattttttaaataaacttctacataatttttttacgaagagtgcacgtttagctatttaaaagtgtgctcatgaaaaaacgatgaagtcgcacagcggaattgctgattcaaactcagccattaaatgccatagttaagtaagtcttgatttatctctttcaaaaatatccaaattcgtcagcaaaataattcttacttgaatttcatccaacaaactctttaattacgaatcctttttctcctagcttactactgtcatttaaattatacattatgctcattgtattgctacaaaatcttcagcaatgctgaaaaaaaatactttacttttctcgacacttaaggcttgacacatccaatgatccaaacgattttaagatatctttaggagtactattcgttatcttgagaagataagtaaatacatatacataaaattattcataaaaaaccaaatttcaaaactaaaaatcgctttgcggccccatcgtaagccaaacgacatatttacaaacgaaaaataatttgtgaataaaacttttatatacgtattcttagcgatctaaaaggaaagattgaaaaataaattttgataaaaaaaaccctaaaatcaactctaagtttaaggttaaaaaatctaaattttggcaaataagcataagcacaagaaaaaaagagcccttggattataaaaagaggggggtggctagctcgcgcgcacacgcgaggacgttaaggtgcgcgcatacggaccttcgctttagtagcgcttagcgcttttctcgaaagaaaacaatgcgcatgacgctacggtaaagtaaagtgattaacgaaaatgctacagtaatttatcaataaaaaaataaaaacaattgattttgaaattttgagttaaaagttttcaaatattgacttgaaaattttaaaaataagatttgaaagtttttgaattttgagttgaaagtttttgaattttgagttgaaagttttcgattttaatatgaaaagttttcaattttgagttgaaaatttttaaattttgagttgaaagttttcagatctcgagttaaaagtttcaaacctgagtcgaaacttttcaaatctgagtcaaaagttttcaaatctcaagttgaaagttttcaaatcggagttgaaagttttcaaatctgagttgaaagttttcaaatctaagttgaaaattttcaaaatttgacttcaaaatttaaatcttaagtcaaaagttttcaaatgtaatttaaaaattttctatctattagtaaaaaatctcaaagaaaaactttcattaattactatcattatccttaaacaattagttacgttaaacgcgcgctatgaaaaaaagaatctcgatcagcgctggcggcaccacgcatacgggccgtgtgggccggaagtgctcgcccacggcgcgtacgcgcgaattaggaatcctatcttactataaagttatcccccactaactccttaagcttaacatgcaaagatgccacatcatcatccactaacaagatgccacattatcatccactaattaacaagatgccacatcatcatccactaacaatcatcacatttaaacatcatgcaaacaagctatatctttatagtttttataatttaagagcgtttcaaatacaaatatgttaaattatcatccaacataattcacataatatttcaatgtatatctttattatgttttatgatatcctatatacctatatagttcatcctcacttagttagtgtttaaatgattaatctatggtctaaattattttttccttttattcttttaactaagttatatcacatcaattgtttttagcctttagatgattaatctacgatacaaactatctctctacttttcttctttcataaagtcacaccaccttactatttatgtttgaatcaccattctacatactatttaaattatccttaagcttaacatgcaaagatgccacatcatcatccactaacaatcatcacatttaaacatcatgcaaacatgctatatctttatagtttttatattttaagagcttttcaaatataaatatgttaaattattatccaacataattcacataatatttcaatgtatatctttattatgttttatgatatcctatatacttatatagttcatccttacttagttagtgtttaaatgattaatctatggtccaaattatttttccttttattcttctaactaagtcatatcacatcaattgtttttagcctttagatgattaatctacggtacaaactatctccctacttttcttttttcataaagtcataccaccttactatttatgtttgaatcaccattctacatactatttaaatttaaattatcataaaccacattaatttacttaatctgatgttatctagctatcttacatgttattattttattgttatcatactaaatttccgcagcaatgcgcggggtttcacctattcgtgtgaaaagagtgtcaaccactcctatctgcaatctcccaactccgtgggccaaggcctggcccatccaaacgagccttttgtgggccttctcgcagtccagccgggcagccggctaggcccgaatcgacgcgggcccaccaggtcgggcaaccaacggtgggggcccaccgccatccgaccgtttcgacggcttccccgtccgtaaccgctaacgccgttacgtctccgtttccgctccgtcaccccgtttcaccgctctccggacctccggtcaatcgcagtcaaaaggctccccgctcccccgtccccttccccctctcgccctctcctacccaacttctcgaactctccaaaccctagctttttcctcctccccctcctccgcgaatcttccatgcccgacggctatccggcggcgccgcccgggatggagcgccctgccccggaggcggcggctgcggcggcggagccccctggggcgaaggcggaggaggaggaggaggggccgaaggatgtgggggtgaagggtacggggaaggagaaggagacagagaaggttgaggccgagaaggagatggaggggaaggggaaggggaaggagtcgatggaggtggaggaggggaaggagaaggagggtaaggggaaggcgaaggagaaggagaaggagacgaaggtgaaggtgaaggaggagggtggggaagagaaggagaaggggaaggttgaggtggtggaggcaaagcggcggccggctggtgttggcgcggagacacccatcctagcggtgccgatggtggccgtgccatgcttcttggcgtctcctgcatttgcggtgagtggtgccatttctctttgtcactaactaggggcattttgttttaaggcgagggagagatccatgggcggagaatattagggttttgatgggttgggttcacctcggtcaggttatccgtggcatgttagtgatgattttattctggtcactagttagcccatcataactgcagctaaattgtagcgtgatgccatttctatgatacgaatcgctagaaatgggcaggtttgcaatgccgtatcccctctgtctgtttgtgatagattttgggaggccacctgcattggatttaggatattcttgatactctctatctgaagcaagcttagttgatggtaactgtgggaaattatgcactgctattgtggggggatatggtgtaacgttgttttattgaaaaataacttcctacatataattgaacaacatttacaagactgatttccattatatatatatatatatatatatattttttttttcatcatactgcctaatataatgctgtgtgatgtaatggaacatgaaattccattgaattggcataagtttacatgttaaggtatgattgaacaaattaatattgtactagtagctattctgtttatttaacactatgttatgctatctgcatgctatcttgttagtctttagttgaacacagataataaaacttgaatatagtccaatgagaatcccgtcaaatcccgtcaaacttgaatatagtccatatcaacaaagttcagattatctctcttttaactcgacatatgttctgtattttactttggtggttttcttacatgtgtgcaaataatcattatggaaactagggtcacttttcaatgagccatcaagcagctttggcgagtgtgacggctcaggcacaaatacaattgcagtcaccaaccacaccatattcagaagggctgcccagtccatttcctataacacctaaagctgtaatgcccctgcagcgatcaccttcaggaactgaagggagtgttcgcagatcagtgttagagaagtcagcctcatttcagtcaagaccacacaatcatgtgtctgtaaacatggttggtgatggcttcaactggaggaagtatggtcagaagcaagtgaaaagtagtgaaaattccaggagttactatagatgtaccaactctaattgcttggctaaaaagaaggtcgagcattgtcctgatggccgcgtggtggaaatcatttacagaggaacacataatcatgaaccgccacaaaagaccagatttgtgaaagagagagtggctcatattactgcttcctctggagatgatgaaaccttgggacttgtgaacaatgaaattatagaatccccgtcaccgggatgtaaattagagccgggtgctgtctctgaagcttctgaacagcagcttttttgctcaagtgattgtgaaggtgatgctggtaacaaatcagaagatgatcatcctagcacagagcctcagccaaaacgaaggtgaattgtagtactaggctaatttattcatattttgtcattgagttgtccctaactttgttttctacatcttattgttctatcagcagaataattgaaactagcacacctttgactccagttctcagaactgttagagagcaaaagattattgtacaggctggaaagacgagtgatgggtatagatggcgcaaatatggacagaaaattgttaagggaaatccaaaccctaggtatgaattggtatctcgtccaattgatcattcatgctgcatctttttcgttaatttgaatgttgcttctgtttttattatttgagtaccctccaattcaagtacaacagtctagagcaaatttataaattgttcactttgccttcaaataggattaattgcctaaacccacttgccatattgattgtcttgttatttctgaggatcttagcacatattcctccactgaggagtcatacctatttttcacttgctagttttttttggttattatctcctgtgatatgttattattgttattggttttttttctttttgttgttatatagtatattattagtactactagtagaggcatgcgaagaaatttgagaaaatagaaggaaggaaaaaagagaaggaaaaagaaaaggaagaggagaaaaatggaaataataatgcaaagagttaattgcatattggaccggctttctttatcatggttgcaacttgagcaagaaatgctattgttttcactttgggctagtaatttttacaaaatgttgcacttaggacctagtgttcttcttccagctctgctccctcactctctctaccttcagtttgagattcacatgcctggctgtagttggttccggtagagatggagctcaagctccgccagtacagtatatgctcgagctctactcagccttcgccacccctgccacacccacattcattcgtgctcaagatttgatgtgcattgttgattaagtgccctagccccaatcaagctagtgcagccatagatgaacttaggctagaatgggcctattgactagttggtggagcagaagtgtggagtgataaacacatggtgttagaatttcccaccgtgtcaccgtgattcattggatatgcgcttgagctcaagctagagctccgtcgtgcgccgtgtcgagctcaagccggagactaccacacactcaagctcaggcgctaacgtaggtcaagcacgtggatgggaccaaaacagaggaagaagaagagaagagtggtgagcttgaaccaaaacaggggagagagaagagaagaggagatccagaggaagaagaagaccggtccaatatgaaagtttttgcaaagatttcttgttccaacttgcaacaatggtcaataagagtggcccagtatgcaatttactaacgcaaaatacatttccccccttcctgctgcactgtagcgggaagggggttaaatgcattttgctgccacggtgtgctgcagagagccaaatgcaaaatgcttgccagcgtggagggcctcattgcctagtcctacattttggtgtgatgcacgattgcacacgtgcaccaaacaagggcattttggtcataacttccaaacaaatctcacctagttctatatcctacctccatacttgatctcgctagtgtcagtgtcatgcactgagttatcacaacaatgcccagtgcaccagagtgaccattctattgatggaaaaacagtgcgccgccagatctgatcctgtaaaatgtgatcctatatactgctctgcttccaatctatcatctccactcggccctgttcgtttctcctactagtagaggataaaattttggattatcgtggcacgcttttcaaactactaaacgatgcgtttcgtgcgaaaattttctatatgaaagttgttctaaaatatcagattagtccatttttgaagtttgtaataattaaaacttaattaatcacatgttattaccacctcgttttgcgtaaaacacttaatctctatcttcatcttcatcttcaggagattcaaacaccacctgaatgttgttgacaccagtcacaatttcacgctcaccttcatcactttacctgtgttttcataaatagatagccttcatatattttgtgtgttatgaagcattatctttctggacaaattttgctacagccatgctgcaatgaattctacttgcatagcgcaactagttgcacaaatatagtagttacaagataatgaaggtacaggttaataccacttttatctatttacttaagaaattactgtaaaatctctatgcaacaaaacctcgttaagcttgcataaatcaatttaggtctaatgctcacatgaaataaaattgattttttttttggtccttgcatcctattttccaagcttgtcaattctattccagaggtcattctggtttgctcttggatggaacattctgataacagctgatacatgtgtactgtttaataaaataacataagtttattattccaatcatacgtgtttaattgtggatatataatattccaatgaatataagtttaagaatgcatttatattataatttagattttagaagcaagtttaagtgatgcggttattaggttgtgtatttagagtgcttttgagctgaggctggagtgaagatggaatgcgatgtatgctagtcatgtacttggggtgacggcaaagttagagttgcatagtttctaaattttcactcaacgctatgtttgaagcatgtagtcctaggggcattctcatttttgcgatgtctaccagcaaataacacaaattttgagtcatgtagcaaattttgctgcgaaacaaggcaaatggtaactcaaattttggtcggtatcagtatcgccagaatggtgctggaattgataggcttttcttttctgagaaaagatagcctattattttttttaaccagacgtcctgttttgcactgtacaatttctattagtggtaggcttgctgttcttttacactgaaaaagaagttcatttcattcttttttctggtagtgtgtacaacaagttaatatgagtgattaaccaagcaggagctactgcattttttataagttcttattaatttcttttgttctatacaggagctactaccgttgtactcatgatgggtgccctgtccgtaagcatgttgagaaggcaccagacgatgataacaatattgttgtgacctatgaaggtaagcacaaccatgatcaaccgtttagaaacaacagtgagtcgaaggatgggcctgttcctatgatcattccagcagagacaacatctgagcagcccagcacaatgacctcaacatcagaacagaaacagccgatcagtctgctgaaggatggcggcgatgagcccatgaagggcaagacttcagaaatcggtggtgagaaggcagtggagtctgcgcaaacccttatcagcattaaaactaatcccgatgacatgaagaataccctcttgaaagatacttccgcggtagttcctgtccaaaataattgatcctgtgaggttagggttgattcgattaatgtattagtttgtggtatttattggttcggggagctattgttgtgttagattctgtacatgagttgagggccggcattctgtggagcaccattggatagaagcatctaggctcgggaagccatgatacttacagttgtcccccttgtatagatctccaaacccctagtgtgtataggtactgtatcgcttactgaggctaagcaacaaggagacctgagaaacttcatgtgtggggtgctctgcttggattcattgcacatctaagccgatccatgccatgatatgtttattgtatctggtgttatatcataaaaacgtgcaaggtgtatgccatttccattctataaacagagtaacacaggctgcatcgcttgtctgctcggtgagcagtagacaaggtgagtttgggcatttcatgcggttgtatgtggaacatttgtagctgaactgaacgactacaagacacattgaatcagagccaggcaaggagcttttgctgctcacttgctcaggcgagctcactgtaaccgtgcagatctatgtacagtgcaacaagaagatgatggtcttcatcatgtttgagccaatgcaacgcttggggcggccttgaactccttcaccgccttcttgacggcctcgacgtcgatgtcgatcagcttcccggtctccgacgcgacgacggtgcagcccttcttctcctccaagtacggcaggaacagcctcgccttctccttggatgagaagagagccacgctgcaaagattcaggaaaacatcaatgccatgagcagttcatcctctgaaataataaccattccaaaatctggagatgcagatcgcagctcagttgatctaaccatggcttgtccctggcgttggcgagctggacggcggcggtgttggtcgcgacgacgccgacggagtcgttgatgaggcaggtgagcttatcatggatcacaaaaagaaaacactcagtaataaagaattgtaatgttacctgtgaaagatgatctaaggtgttttcagattgcaaagtgattgtaatgaagaagcatcaaagaacctacttggccaggagtggtgatgaacaggatattggtgtccttccccacagtctcctcaacctcttccctgtgcttctgatgagggatcacaaacagaggcttcagaccattgtcttcagagctgccaagacaccaccatttttttggctttagttctaccttctcacaatcggtaccaagctggaaatgtaagtgtaagagcagccgtgcttgagtgagtgagtgaggtgaggtgaaaaacctgatctccttggcgatctcagcccaatgctcgagagggaggaggcagtcatcgtcccccctcgacctcatgttggcgaaggagtcggaggcgatgccgtggacgacgacgaacttgcccttctcgacgccggcacggctatatttgtcctccacgaacgctcggagcttcttggagatggacacccgcaacggcggtaccgggtgctccggcacacccttcgctggccgcccaatccactccaacatgtcctgatacctaatccatccagttgcacactcttcgaaatcagaaagcattttgcaagaattttataggattttgacggtaattggttcaactcttctacaagaataattgagcaagattcctaagttgcaaaagaagagctaggcaatatctgctttactataagggttataactctgcctctgcttgtttgtcttattagccgcaaccaaatattaaattttaaaatttaattttagatttgattttgagttttccttatcatagtttatttctcaatattgacttttgaaccattaagaacagttaaaagttttgccaacaaatcatattcggttgcctagttcattttgttatggcttttcaacctaaatcaaaggcaaaagatgagacagttgcccctatataaattaaatgcaactatacagcacaagaatgccaaagcagtaactttttcggatgaggaaattataacagttatgaaccaaggggaggcgaaaccgcggagaagaggaggatgatgatcttacatgttgtagccgctgtcggcgaggttggtggtcggcggccggaacatctcggtgaggaacagcccggcgccggcgctgttgacgttggggtaaacatagccgaccttgtcgcgggccgacgacatgaagaggaagagcgcgtgccctatcccggccaacttggtcgatatgatcagatcatagtacctgttctgccaacctcaacacaaaatcaagcttcagttggttgaatctttcatgataaatataatctaatcaaaatactgagcatatgtggtggggaagcaacataattaagcaggtttatctgatattattatgtttagagaatcacaataaattttgaacaaattcagcgcatatatcgaaccggctcgagatgtgcaactccaatggtttgtttgaaatttgtcgaaattaatgaaaaaccgattactcactatggctcgaaagtcgaaatctgctgaccattagagaatgtaaacctgggctgggcatgacacttctgaaggagagagaattctaatctctcgagaggatatcttctcgtgtaatttttattttctaaattcaatgtaattggttgtgaaaaattctaaaaaaaaatgacaatgcataataacatctattactccataaaaacatatttaaattcgatctatgctttgaggaaacaaaagacgaattcagacatgacactactcatatgttggatttttttttaattatttctcaatgtgtgagttgaattttgacttgatttttttttgagtactttacacgtacggtgtgtatgttgtcaattttgaaagaattcttaacaattatttagatgaagtttgaataaacgagtggacataatcccttctcgatcgagtttaaaacatatacatccccactttgagtgactatttctgtacgtagcagtgacataatttttggtttaccttgagcacgccgagctggtgggtgtactcggcgggctcgggccagtcgtcgtcggggtcgtagacgtcggcgtacctgacgttcttgcacatctcgtacacctgcttccccctcgccgacgccaccacgtccaccaccaccccggggtacctgtcccgcagcagctgcaccaccgggaagaagagcacgttctcgtacaccccgccggacaccacgcagcacgcccgccgcacgtcgcgccgcaccttggatgccaggctatccagctccgggttgtaccccgccgggaaccgcaggaacccgtacgggttcgccgggtcctccggcggccgcgggtcctcctcctgcttcccccccgagaacgcgccgcggtagtcgaactcgtcgtcgggcccgtcgtcgaacgggtccagccacgggttcttcttcttcgccgacgcccgcgccacgcccgcgccgccgcgccgccctagctgcagcaggtggcagcagcattgcctcgctatcggcagcgacggcggtgaggggagcttcgccggcgtggccatggacgtcgacatggttggcgtctgcatgcttgttgcagagtgagtgtgctgatgagttgctttggatattgctattgtttttatttatttatttctatgttttttgttttttggtgtgtggaggaggggtttggatgtggtgggttagggatgtgtggaggaggaaggataaagtgcacgatgatggtgccaattggtcctgttttcttgtgccaccattcctcgatctcctttaatttggttcatcctttttgttgatgtggcagctggcaaaatccctccgaaaattcttttggagtttggattatacttgtgagtttctacaaggatctttcagaatggagtaattgtagaagatttatctttatgacagctgaactaatcctatcttactataaaattaccccccactaactcatttaagcttaacatgcaaagatgccacatcattatccactaattaaccagatgccacatcatcatccactaacgatcatcacatttaaacatcatgcaaacatgttatattatctataattttatagtttttataatttaagagcttttaaaatacaagcatgttaaattatcatcccacataattcacacaatgtttcaatgtatatctatattttataaaatcctactccatccgtttcacaatgtaagtcattatagcatttcccacattcatattgatgttatgacttacattgtgaaacggaggaagtacatacttatatagttcatcctcacttagttagtgcttaaatgattaatctatggtccaaattatatttctccttttttcctctaattaagtcatatcacatcaattgtttttagcctttaaatgattaatctacggtccaaactaccctacttttcttcttccataaagtcataccaccttactttttacgtttgaatcaccattctacatactatttaaatttaaattatcataaatcacattaatttacttaatttgatgttatctagctatctgtcggagatatgggcccgggggtatgtaaagtgaggggaatttaccttcccatccagctacgtggccctgcagcctggccctacccccgcacctcgcgaatcgcagaagcggccggggggcctcagggtgccacgtcatgcccctcgggccctcgcgctgccctgccccgaggacctcgcccgactgccatgtggcagggggagcgagcggggaggggacccaggctgaaccgctatcaatgcgcgcggcgccccaactgcccctcaccgcatttaatgcggtaggggcagacatgcggtgccgtccgactgacgcacgtcagtcaggactaaccagtctgtcaccggcctgttgccggtcacgtctgactggacgggcggccgtgcccccacgtcgcctttttctccagcggagtggaggtaggtgtgtcctgtcacatcggagcgtcatccggagttctcccgacatgaggaggacggccaaaggtctctgcccatttataagggaatgacagggctgtcccccgtgttaggaagggggcggcgctgggtcccactcaaggacgggccgctgcttagcttccgggtgaaggcacagatcgtggcccggtcaaggtaaagtgggtccccctcccatgaaagagtaggtagaggcgatgcatgtggtatccccttgaactataaaaggaggaccttgcccaccgagaaaagggacgactctcagtaagcctaaactctagaataagaagagcgagagccctctccggagtttaggggcccttgtagcactcaaccataatcccacacacaggagtagggtgttacgctccatagcggcccaaacctgtataatcttggtgcccgcacgcgatttagtagcattcagggcggatacgtgatttctaaaggcgagctctttccctcggccgaactcacaaaaggggatctcacgatctcccgctagagaggatcactcctcgacactatcttacacattattttttcattgttatcatactaaattcctgcagcaatgcgcagggtttcagctagttctttataataatttgccttccaagggattctcactgaagcaagcccattttagaagctaagggaggtaacgtaagccatacaaagataatatagtgcatagctttttggagttaggtgaattctaagagcaaggacaataatatagggcctagtttagttctcaactttttcttcaaacttccaacttttccatcacatcaaaactttcctacatatacgaacttccaactgttccgtcacatcattctaatttcaatcaaacttccaattttggtgtgaactaaacatagatgtctatttatagtaatttttatccaactataaataaccttgtagccaataaacacaacaactaactatactactatggctcacactttgcatgaaaaaatattttaatctcccacgatggtcccttcccaggagcttgatgaaaaaaaggaaggttgggccccatagtgttgcttactttttcttgggacaagcatatagcttgtttctctaacctcgtcttctttctcttccacctaggtaggcaataatttgatgtggagaccactatcatccgctgatataggtttattgtacctgctcttacgtagtatgataatataggatctgttcagttgtctgtgctagattgtttcatactgtggatatagatatagcatgtctagttgttactcagataaaactaacgatatatgcctttcaatattcttaagataataaaaattcattctgatatttgttccaaaaaaagctacaccaaattattatagaggttactagataaaaacgactgcgagttaccaaatcttaacttgattaaaaagaacacttaaaacaccatctcaaagacaaagattttcatatgtggttagtgagaatctatgtaaccatgcgcataaccatagtttcttcacaatggcttatccttgttttcattaaactaaaaatatagtcttcaaaatcagcggccgatcactgtgttaatcaaattgcacacacatcatcatcagtgaactgaaacgaaccaaagtgcaaaataatgttggcccagataattgcaaatcgatccaacaaaaacacatctaccaagcacgccatatcaacatggagcctccgatacgacatctaggacgttttcattgctattctagccttatggaactaagttttcaatcaaagattatacttcgaagcacaaagatgaggaagggggcgtcaacgacattgccttcaatgcaagaagctatgtggcgtccacaggtgtcactgacatcaatgctctcctagtccaagatttgcattgatatgagctcaacctcctcctcagtgttgagcggcaacaacgatagtgagggaggtggttggccatgggaaggaagggggtgaggcatgcactctggtggcaccctgtcacaccatgagagtccgatgaagctattgataagatgaaggcatctcgtagccctagcaacaactctgatggtgacaaaaatagcacggttttatatatagatcaccggaagccaaatccagctagaccccaccactaccttcctcaagggtcaccatttctaacgttccccttcagcgatggtgaggaacgggaatcgccttgcttacatgattggtgacgcagaaggtggtattatttaccaacacacaatttctaacatttcaagtattatttaccaacacacaattctaacatttcaagtctcgtatgaatcaaaccacaataacaacttgattgaataaaagtagatgaaacatgtatgagcaatagtgcctcaaatctcacatattaaatgcactgataatctaagtcaaagcatgggagtgctaagtgctaagataacaaacttagagcaagtttaatagtatagccaactactagctccaatttatctatagccaatctaatagctcatttatataatagttacatactatactattattactccaatttacatgactttggtagtatacaagaaataaataaaaattaaacttaggtgcaccagccactgctgagttgcaaaaactggactcacgtgtcatccagtgaaaacatcaattcgcggactacaccacccccggacgcagtggagcatcgccgatcgccaccgacagatcttagctccatttcctcaagatacgaaacctcctacccttatctcactgactagtgggcccacgcagcatgatggtccacacgtcagtgggtgtgaaaggatacttttcccaccaccgcaacaccatcaccaaccagcctttttttcttcctcctctctgtggccgcgcacctaaccgttctcactgacgtgtgggacatgacgggcttggtggggcccacctgcctgaatttggcatgaacgcaagcaaagccccccacccacgtcgttgcgacgttcccgtctgtcttgctacacacaccaagacaaagtttacccgcaccaaacagccactcactgacatgtgggccgaccggggtgcccctctggtggaccccataggtcagccagatgtaggctctgccggattcgatttacagatgcttggtgcacccactgacacgagggcccgcacgcccgcgaaaaataccggtagaaggaagcatttccagacgcggcacggtacgtgcacagatagttcgccgacgagatgcacaaagaactcactgacatgtgggcccagatagccggtaagctcaaggtggacccacatctcagtgtgcgcgtagtggagtggctcacgtgcgcggagcgaggcgtggtttgacccctctcgtctcgctcgtcgcggccacctctctttctctctctctccattaaaacagcacctcgtcgcaacggaaaagcgcaatctcgtctcgccattctctctctcacacacacacctcgcgtcgcctccctccccgagcgagcgagcgagcgtgcgcgtgcctacgccctcctctctaccgccatggcgatctcgccggtggcggcgatggcgctggccatcgccctcgcggcgctctgcctcgcggggctggccgccgggttctacctcccaggcgtcgcgcccaacaacttcgacaaggtgtgcccactccttcctctactctcccctttatcctctttcacggcatgatctctccgctgcgtttgttttttttttgtcggatctggggttggggtggccagatctacggcccgcgctgttgcgcccgccgcgagatctgggtgtcggtggtggtggcatgtactagggggggggggggtagattaggatgcgagatcgtgcgccaatgcaggtggtgttgggaatgtatgtctggatgctgagaaacccacgctgaaatcatgttccgcgttcagagtgcgttgaatgaaaccgtgtgcgtagggagacgcgctgatcaatgtgcgcggtttgctgcatcaacaaatacctgtaaggtggcatcgtagtatgagcttgttgggtattgatgcttaattgcggttgctatcggtcatggtaggttattaagtgatgtgtagttttggaagatatgattggacattttggggctgtaaacctgggtagtacatgtccaaacaaaacttagtttttcccaattggggtcccaacttgttttaccatgtgacaaacaatagtttaggtcgtatgtttttaattgttcaccttccaaaaaaaatggttatactttttttagttgattccgtttctatgtttgtgctagttattaacatctgactgtctttgtagtagtcatgctcatagatgaaacgaagggtttaacgctttcagtatgcatcaatatgagactaccggacaaattacttgctatttctaactatagtgatatttctttgtttacagaaagatcctcttcaagtgaaagtcaacaaattgacatcaatcaagacccagcttccctactcttatgtcgacagtgctcaaaatctcggtgaagttcttcgtggtgatcgaatcgagaactctccatacacggtttgttactctatcgcgttttctttgattatttcttgatatattggtcctaaggttaatattttaacttctattctttccagtttgaaatgagagagcctcaaatgctgtcaaatagtctgcaagatttctgtcggggagaaagaagcaaagattctcaaggaaaagattgaagatgagtaccgtgtgaacatgcaagctagtgtaacttggtttcttgattctaagagcttattcatggctgccaaatattctaaacattcattttctcaacatgattcttgacaacttacctctagttgttccaattaaaagaatggaccaagaaggtgcatatttctatcagcatgtcttccatgttggagccaaaggacaatatgcaagggtaagtgtaactttgagtattgatcacatgctatgaaaatgcaaagttcttatatcgtgcactttcttccctttttctgtttgtacttggcagagcaaggatgaaaagagcttcattcacaaccatttatcatttactgtgaagtatcacagggatgcccaaaggatgtttctaggatagttgcatttgaagtgaaaccatacagttatgctgcatgtgatttattaaacaagtaggcctttgaagtatttggatgttgactgtccttcctgctgttaaatttacactaaaaactatgacatatgctgcagcgttaaacatgaatacgaaggacagtggaatgacaagaagacccgcctgaccacttgtgatcctcatgcaaaacatataattacatcatctgattctccccaggaggttgaagttggcaaagacataatatttacttatgatgtggatttcaaggtgagatatatgtgcacttttttccgatcgttctgctctaatgaaatgatcgcagtagctagaaattgttcagtgtgcactagatggagtgctaatattttgttaccatctatgcgtccttttgactattctgtcaatttgcaggagagtgatatcaagtgggcatctcgctggctgggatacctatctactgatgacggatgaccaaatccactggttttccattgtgaattccctcatgattatcctcttcctttctggaatggttgcaatgatcatgctccgaaccctttaccgggatatctccaagtataaccagcttgggactcaggaagaagcccaacaagaaacaagatggaagcttgtccatggtgatgttt

SEQ ID NO: 9936 - DNA, 6547 bp, Oryza sativa
  unsure (1)..(6547): unsure at all n locations
ccgccagcccggccctccccagcgctcctccccntgcgtcgcctcctcatcctccccctacccccgccgctgccgcctcctggcgaacgcgcgggtaggctcgccgcgttcccgcgtcgtcgcctccaccgccgtcgcctcttcatccccccaccggccgccgccctatcctcctcccagccggccgctgccgccaccgcccggagaggcctccacgccgcccggccggccctcccctctccctctgttccctctctctctctaggggcattttgggcacaaaaatctctaaagtggcatttcatccggtaggcaacgtattgagtggcattttatccggtgcattgtattgagtggcattttatcccacccatcttatagagtggcatattgttcgttttctcaactaagttgtggcgttttgtgtaactacttttgtccattcaaaatccacttagatctaatatgcgtttgagctagggaattccacatcatcagggccgtgtggccgtgtttagttcacccctaactaccccgaacttccaactttccatcaaatccaaaactttcctacacacataaacttctaactttttttcaaactttcaattttttctcaaactttcaacttttttcaggaactaaacacaacccagattttgtatagggtttggaacaacttctatagggtttggacgtgtctgttttactccatgaattgaaatgtatttatcatgaacagtaacggatactaatagtgtatgccccttttgttttgacaatgaaagctgcacttgatgagttcttaaatgtcattgcgggattaggtgcacctaaatgcatctagtcaatccatcaagcagccaaaaccaagagcattcatgaactactctacctggcaaccaccgggtttgccccatggaaactttgtacttgcaacaaacatgggacaggactcccctccttgctttttcagcaaccgatctaaattaaaacctgtttcctattggctatttctgcaggtacatagggtccggcatcatctcactgtccaggctaaaatttctttgctctgaacccatgtgctttcttaatttttttttaagcggtaagtcatggactttgaattagttgaatatatgtgtccgactgtcccgttggactttttggtaggactccaattcaataatgcaacatgcgctcactggtggatccgtttcttaggctagatgaacggctgaccgggctctaaccatgtttcatcgtcggaaattaactgccgtgaaaacatgggttgtagtgctagttgtttgttgcctgggctttttaccaaatacctgacttttctattagtacgtagaatacacaatatatagagccgagtgtcctttaaaatggaggatttttatagaaatcttaactaatcatgcaagttaaggcaaataccaaagcaaataaagattgtacgagcaaacaccatgatctcgtgcatacccatctacgctatttcttgaacgtggttaggtgcgccgcatcatagttacatgacatcaagaggctaggctgatggtggaaaagagatgaaatgggagctagaagggcatcatagctaaaagggagaaaagatgaaaccaaggatgggacaatctagtctttcatttaactgttcgttgctctagtcatctgttgtgttgttcagtgtatataaacattgaaatgcgtagaaattgaacaaaatgttgtttatgttatttcagttgtttcttttaggtttcttttcgctgtggtagctgctgctctaaaccagttcatttcagaaataaaatggtgaacaatactctttttcttcttgtaatatgcagtagccacgaccagcactacctagaaaagccattgttttagagtttatatttttcctcaaaatacgaattaacattaagaggtttggtaccagatcacatacatttttaaatcaacgtttgaaaggaggccccgtactcttttacactcactgtgctaacatagttaaaacctctgttacgaggtataagtactgtcatggactaatctccagcagccccttgacagctctccctcgccgtgcttgtaccctgcagcttgtagtttactccaacccaagaactagtactaccactgcactgctacagccaagtggcccaaacgcccaggacacattgctcctccctcctcagaacaagtactatggacctcatacctcttgtttgatatagtacttcctccgttttatattagaagactttctaacattatccgttcatatatatatatatatatatacacacacacacactaatgaatcacatatatgaatctagacaacatatatataaatatgggcaatgctagaaagttttataatatgaaacgaagggagtaccatgtaagagcctcatgggttgccaatattacttaataaatcgtttagacttattagggaataaaattaatttataggtaaatttttatacacttgttcgtaacggcttaaaaaccaatactaaaaagaaattacattgaaaatgcttcaaaatcaagtttgaaagttcatattttgcccttttgctttggcttattaggcataccgatgaggctctaaaattacataatgagatagaaaagagaaaaaaagaaagaaagagaggagttgccaccccttatgtaaagggtagtctctatacaaactcctagatagataagggaaaaaaatcaatggattgaattaaaaaaaataaggtatgagtagtatattgggacaagtgcattagaggcaatatgttgtatgggtaattttatcatccttaataatgtacctagaggtaccatattttctagtgtaatatttggtgcctctaggcactgagtaccttaaagtaccaaaaaaatttagagtaaaatttagttacctcgaggttgttaataaaatagatacacaacggagacacgaattttatgtggaaaacctttgcaggaaaaaaccacgggcgccgaccggcaatgatcactacagaggagttggatacaaacgcatggggtacattggactgtcgcaccctccccgtgcggcttacaagagtatggggctgtttggatccatgccacagaatgccgcacctcatgttagtcagccacaaccgcttagcccttgtttgttttgcttccatagtttagcctgccaaagaaagttaggcagcttctagctgctttgccacacatttttgagccaaagctatggcaaggatttcgttcgccacacttttggcatgtgctaacttgaggtgtggtaagttgaaatacccaaccaaacaggccctatatataggagaaatctaggagtcctagtggggaaagacttagagtcatactaggaaactaatcctaatagtcaacttctattaggaaactaatccgaatatattgtaggcccaaaattcgaatcacatatttaaaagagatttctgaaggaccataaaattccttatttcgtataaactatctcctaattaataagaagatggtgtgtgtaaaattaggagaaacgcctatagggttttctggttagctctatttatttgatattaggtctttccctaatagtcatattttttttataaaattagaagcatgtttagcacagctctagctccagctccagctctacttctcctagagctataactagccaaacagtttcagctctctcacaaaataaactagagaggtggagctggatttaggtagctccacaactctactctagacccaactcctgtaactaaatttaggatttggagctctaccaaacaggccaggccatatgaccatcacctctaccgtgaaacttgctctcatagcctgggtggccatagcgaaatcatgcgctcctcactccaagtcgtcgtcgtcgtcgagatgacgaggagagacaaacacgcgcctttttctagtggccgcaagaatcaagatccatccaccggcagagaaccgaaccacgcaagctagctggtcgatcgatccatccatcgacaggcggaaaaggaggcaatcgattccctaatctcgctaccgccatccgccaagcgaagcgaagcgaagcattgactcctactcctactacgagcggcttaaagtgaccagtaaccaccaccaccacgccgcggccgccgtcgccatccgcgcgcgcccccacctgcctccgctcccactcgcgcacgcggccaccacccccaccgatacgcttctcctgcctgcctgcctgctgctgctgccgcgcgccggcagggagaggagaggaggaggagcatcgcttccttgcttcctcctcacgtgccttgcccccgccgctaagtagccggcttcctaccgaacaagaactgcagcgagcgactcgggaggaggaaggcgaggggatatgcagcagcagcaggcgtgggcggcggggcttggcggcctcgcggtcgccggggtcggggaggagggcggcgggggaggtcccgctcccaccaccgtcgacgaggcgtccatggagcggagcaagagcttcgtcaaggcgctccaggtaggcctgccggccggccggggacccggatccgggagagatcccgcggcgccgcgaggctcgttttttttttctttctctgaaatgaattgcagttcttgattcttttggttgaactgatgtcgcgcaggagctcaagaacctgcggccgcagctctactcggcgtcggagtactgcgagaagtcgtacctccacagcgagcagaagcagatgtgagtttttttttttgttttcgttttcgtttctactgcgattcgaatcccagctctagcaggcaaaatttgtggcaagaatttgtgcgtgtgggcaaattattggttgcttgatgctactatgggaccatgaacttgtttatgattgctctatccacatagtttctcgtttggtgctagaaaggttgcggttggtgtgtagtaggtttaaatggtgaatcagttcagagttagctgagcatatacaaatagcagaaatggatgaggaaattacttgtgaactagaaacttgggccacatttgcgagttggaacacagggaccttaaataattcttgcgaaatctgaatttttttttttgcatgcgaaattcctgcattcataacgatcccttaccgagacactggtagataattaatcttggtgcagcatagggtctggaaatgttgagtttacttgcaataatccatccgttgtttatttcagtctactttgtactaagttctgatatcctcactgcatatcacttgctgtcaaatggttgtgttcattttctgcatctggctgctaggatttgagtacacgaaaatgtgacaatcattgggagtctgatctgatttcatatgcttatttatgtcagggttctagacaacttgaaggattatgctgtgagggctttggtgaatgcggttgaccaccttggcacagttgcctacaaactgacagacctgtatgaacaacaggcttcagaagtttccactcttgagctgaaagtagcatgcttgaaccaggtactgctgtttaactcaggaatttgtgttgatgcagaccaggagttaaactgacattcttattgctcaatatctagcaagtcctcacctgccaaacttacacggataaagaaggcattaggcagcagcagatgaccggaaccgccacaagacatcacaaacattacattgtaccgagtaaggacgtgtaaaaaaagatgtaattctctactgaagaaactattagcacctaatttaacttgctattttttctctatgagctcagctttggcgaacaaaagaatgcaggctttctctgagatgcaaactgatgctgatattgactcaaggcctagaccttatccctcaggtgcaatttcttggcactcagcacacaattaaatcttgatataaagtacctgcactaaaatggttttttctcttcagcaaaaacccttttctggcatttggcttcagagaaaaactccaaaaccaatggagcacgccaatctgaatttgtgtaagcatgccagctctattttgcctattgtgaagttggtcgcttactctatgattcttcctgtgtaattctgttgtctctatttttttcagcctagaagaaacaaaggctacaaaacctgcatcgagaggttttccaccattctatttaattgcttttattgcttagtacaccccagtagtgtgatttactttcatgattggcactgagtgtatcttaggcagacttctggatagtttataatatttgtacaggtggctaacacctcatttggaattgcttttgtttcaggtaaggaaccatcaacatctccattgcccaagcatctgcagacaaacttggccagctctgattttgctatgcataatgttggcatgaaggtaaacaacttgatgagtggtttaagacctgactatttttatgctgtaaaacttgcaaatgagcatta

SEQ ID NO: 9937 - DNA, 2757 bp, Oryza sativa
tggatccccctttcataatattcatggcattcctataacaagatagaagagaaaagttgtgagataaccttgtttgtttgtcgttgtccgttgtatcagcaccacgctcactgccagcaaggtcaataaacgacaacttgccagccaatctgggtggttttgagtcattgccatcaacacgctttttaatagcaagctgaagaatggcatgggatcttgatgactcttcatttgcaccagtagtaccggtacttctggtggcattgcctttctcaatcaactcctttatggtttcaacatcagacacccgatactcttgtaaaccaacaatgcaaactttctgtttcccatcctccctcatgcaaagtttactgcatgaagtcaaaaatgtttcgaacaagaagatgtaacaggcttcctgaatatatactgtctataagcataattgattgggggctacttacctcctttcattgagaagatcaaataatttcccaccatatatttcaaagaagctcacgaataactgatagccttgattgcgatatgtatgatgcatcaatctcagaatgtcttgggaggccttgagaggcagtggacgcatggtgtaggtctttccactacctgagtggacagaatgagattgaatatagcgttaaggattctgtacacacacatgcactataggcaacaaaataggtgcaacccaccctcactggttgcatgctaagggtggttgcagctcagatgttgccctgagtctacagaagattagacatataccagtttgtccataagcaaaacaggtagctttcgtacgattaaaaatagcaggaacaacaggttccactgtttctcgataaacctgtgaattaaatgagtaaaggctgttgagaatggatctacaaaacttaatgatatgaattactaagcgtaggtggtttatactttacactcacctcatcattcgaaacgtcttcatctaggacagcatcaaacacaaattcatgtttctcaacatattcagtgaggtcaacctgcacaaaaataccccaagacattgataaatgagtatagactgatagtagggagcaaagaatataaagaacattcgtcataacaatgcagatgaatgtaaatagctagcttggaatgaaccttgagtttggtctcatgaacagtcaaggagttcgactgttgttcaatgtctatgatatcttcttctttctttgatatctccttcttattaagtggtcttttgcggacctgcattcacatttcacatcaaatctattagaagtttgcaggttatcttaagctcagcttttctatgaaggaataattatcaaagattatggacaaaaccaagaaacataccaccactttgattttcgcaacaggagctgccttctctttctcagggaaggccttgaggaaattactttcagcaaaaacagtggatttgctcatctgtttatttggagcgaaggttgggtctgaatcatcaaagcctccattgccatagccaaatttttgggcaccatcatacatgccaatccctggcacttgaaactgcatatgaatttgagctccagttaatagaatgatttcagtatggtaaaagattggatagtagataatccttgatcctcactgcaacaacacaaggttcgtgcaaacatttaggtttaaaatgcaccatcaatcaacaaacctagtacactgcatcatgtaaactcaacaacgaaacttaaacaaaccaacaactggaccatatagtcagtattgatgcggtgccacatctcaacaaccgtccacgattccaccaaagtattatttgtttaacatcttgacattccaatccccaaaagaattgcgcatccaacctagcattcctaaaagaagaccaaaagcaccaaagcagtgcacttctccatttcctttccaaattccaactcactgattaactgaaaagaaaaaaaaacacccttaaaaaagcgacagttctgactgcccaagcggccatgccatcgcattgggattcagagcatcagatccacaacgtcggcgtcaatttggaaacgcggcgatttaacccccaaccatgcgagacaatcgaaacagaagggtgggcactaactagaaatgcagctggtcttacatcgctgataagctcggtgtcgaaggcgtggagatcgagcagcccggggctgagctgctgcctctgccccggcgactcccccgccgccgcagccgccgcctcccctccccgcagccgcgccggcgtcgtcggctccaccgacacgaagatctccccatccccgcgccgcaccccaccgcgctgcacacacacgcacacacaaacacaaacgagacacacccattagctcatcccggtgatcccgcacggccgcacccccacgcgtagatctcgaagaaccccgcacgccgtacctggccccacttgccggcgccgcccccggcattggcggggacgtcgaacatgagctgctccgaggagtatcgccggcgaccgcccccgttcatcgtcgccggcgaggctggggtggggattcaggggctccttccgaggagagggaggaagagagagtggaggggggagagaggggggcgacaaggggaggcgtggtggtggagtagagtaaaggccacccgtttttgcggcttccaccctgggactcgcgtgccgttgcggagacgccctccggtttgaattttggagtggagttcaaggca

SEQ ID NO: 9938 - DNA, 6100 bp, Oryza sativa
gggtgggtttgtgttaggtggacgccgtctaaaacccgcggagggggttagtgcggatttcgttttcatccttttcagtcaggatttgttgccctgtccttaagccggtttaaatagagagttacgtcgatagggccattcgattatcattgtttttctactaagtcattgtcgaaatgattttttatttactacttataggcaaatgtgggttttgtttttcatttgcgatgaataatttgtacaagtaaagcttgtaaccatgtttcttcgataagtttagtaggtaggagtatatgttaaggataaatctgtgagaatgagatcatagaaaaagtgctagagtatatattatagttagagttatattaggatatgcttgatttgtgttggactccttccatatttgtaattattccttatctctactctatgtatctcctatatatactggctcatgagccccaataaaaatatgtccaatattcactatattcttatctccctatactattcaacatgatattagagcggacgaactagggccgaccttctcacgcttttgcgtcgtcacactcacacccgggagtaaggatctcccgggggcggccaccatttcattctagttgtcaccaagacgccaagtcgttagcctaggagaaatcgatctccctgggtgtttttcttcgtcgtcatgcttcgacgcagagatcgatattgatctcctcggcatgtctcctgcttcgtcggagtcttcatcgttgaattctagtcttcgtgtcgtcaagtcaagcacagcaacaactccctccatgccaccatcctcggtctaccgcgctcttcctgctgacggctagccgtcggtcttggcgtgccccatccaaagcacgcgacggcttccccacctccgtatgtttgcctcctcactgtgtgctagagcctcactgtcgtcggccaccgagtcccactaccacgccgctcccgatcgcaccccctccgccttcgtcgacctcctctaccgctggcaccgctccggggtgacaaccacctctccaccaccttttcaccaccccaccagtctaccgttgacaaggaccactcctccgctgcctctatctaactaccccatcccaggtcggcgccccatgggcctccaccaccgccgacatcatggagctcgcggacgctcgcttggtcgtcgctcgtcatcgacctttgctagagcagccttgccattgatctccagatgctcgtctctagcttctatctgtctacacatgtgtgttatattatataatagttagagtcatattaagatgagattgatttgtgttgactctttccatatctataacttttttcttatctctatccccatgctcctatatatattggcccttgagcctcaatacagtgtgtctaatattcgtagtattctcttatccttatactattcaacaaagagttacattctcactatgtctttagctccaccaagtccaaagctcaacaattttatttcatcaattgtcttgtttacgaactcctgaacccaagttcttcattcttgaagactcgtctattacactcactccatatttcccatgtaagagcatctccaacaacatatctaaatttgactctccaaacatccatttgcccagcttgccaaaaatttggatagtcgaatttgcctttcactccaacagactctctattacagttctccaatctgtcagtgggtcccacatgtcagcctccttatttatttttcaccccttcttatcctcttcttctctttctcttcttgttattcctttttctccgctatcttgtcttctccacagtcgaatcctggcggcggcggaggatgcggtgatggcggcgaggaggagatgacaaggttccgccgccgctagagatgtgggggagataaaaggagacaagagagcggagacaaggaggatgttggtcgatatagcgacaaaggcggcagccggagctcaagacagcggatccggcggcgacactcctccctcgacggatggtggctgtggcagggaggggcgaagtgtagcagcaagagtaaggagggccgccgcacaggaggaagtcgccttcgtggctgccgccaccaatctagaagaactcaatggcacagtggaagaggtcgacggcgcggaggagcttgtggcgccggaaaaaggaaggcggttgatggccaacgccgagaaggaaaggcaacggtcgagggaggcgagcggccggcactgtggagagtgagaagcggttgatggccgacgctggagcacaagagatgagggggacattcgtggggaggaggaatagcatgtgggcccatcgtttggtgaggcatattggctggcaattcaagccacatcgttttttttcgctcgaatggctaaaaactggtttggagaggctaatagagaggttgttagagcatcaccaacagtccaccaataatctatccccaaaaattaatttttgggtttcctaaactaaaaataggtggtgaaaaaaccccttcctccaaaagatagcctaaattcaatccccaaaaactaaaagtgggcccttctgttaaactatcaatagaaattctagttttttttcctttctcgtgcgtagaaggagatcgccccgacacgggaaggagaggagaaacgtggaaggaggggagaaacgcgcggaaggagtggattgggagtcgttctctctccctcaaatacacctcccgagaaaattggagatgggaactccaaaacgttcagagctcttttgggaatctgttagaccagtttttttaaccaaaatctcaaaaaaataggattaggaatggaatagatagactgttggtgatgctcttagagatgttataacggatgagaacatgtttcatttctcttgaattgtgtttatcttatacttcctccgtttcacaatgtaagtcattctagcatttcccacattcatattgatatcaatgaatatatatatatatatatatatatatattcattagcatcaatatgaatataagaaatgctagaatgacttatattgtgaaatagagggaataaaagctatgcaccttaaaagcaagtacctttagtaatcctaaagctagagctaattagtgcagtactaccacgaaaattatcatgccagatttactgcccgcacgtacagtcacggttccccccgaagaaatgaacatgaagtgataccgtgataagtggcgcacgactgcacgctaagtaaatacttcttccgttctaaaatgttgctatctaggatttgatttgacccatcatgtccagattcgttgttctaggatgggtcaaattctattctaggtagcaacattttgggacagaggaagtacttcctcagtcccctaatataagggattttgactttttatttgcactgtttgaccattcgtcttatttaaaaaaattggaattattatttttttgacttactttattatccaatgtactttaagcacaactttttattttttatatttgtacaatttttttaaataaaataagtggtcaaataatacaagtaaaatgttaaaatctatcatagtatgggacaaagggagtatttcatgcaggaaaagaggagtatcatctctgtcctcaaagtttaaacagctggcgtgataaacctttctcgccaggaaaattttcaaaaagcacaaggactcgacggcaagaaactctcgcaaaatgagcgagggccacacaggccacttcggttttgaatagcgcccccctcgggtaggcgatcgcctttcaccggcacgtggcggccctcctccgcgccgggctcggccggtgacgcgtcgaacgcgaccgaaagcggcccggcgcggacggcgctccccccgcaggccacccgccggttctgcccaggcgccggacgtggggcccacgacgcaggaccctctccctgtcaagcgggccccaccccgcacagcgtccctggctgatttagacgtttaattaaaacacaagtgttttgctggttagagcaagtttaatagtttaatagtatagcccactactaactctaaatcatctatagctaatgtaatagctaattcatataatagttgcttattaatatctggttccacctatcatacacatattacgtcttaaaatccgtgctgcagctagttacaggtctatagcccgctgcttttttttttctctttttttatctttttaaaatatatttatagctggcttatagcctgctattgtaagtgctcttagtgggcgcgattatttattagcaaggactactaaacaaatcaacgcggctgatagcgttgcggcccatgtttgtggcgctttgctcgcgaaaaggtcaaaaattgcttgaaccctagcgccggagccatgcaccgcggctgtggtgcgtgtcacagactcacaggtgggcctggtttcccgattcaaacaattccaaggtaggtctgcaaagcagctgtgctcgagtttgaacgcagcaagcgagacgggtatatggcgtacgtacacgagaaccctaatcggcgaccagtcgcgggggaaccagtcgcgcgcaacctcccccgcgcggagaggtggcgtgggcggcgcggtttttattttttccgaacgatttttctttcttttttttttcggatggttttctttctttttgttttttctgttttttttttctttctgtatctttgccgtgcggttttttttgttacgcacgtttcttttttctgtttttatttctttccatatcttttttagttttttcggttttttaatatgtacatatacaaattttgtatatacgtatacaaactttatatgcatgtatacaaactttgtatgcgtgtattttttgggttttatacctacgcataccaattttgtatacacgtatacaaagtttgtatacacatatataaagtttgtatacgtgtattttttggacttttttacgtacgtatatcaattttgtatatacgtatataaagtttgtatacacatatataaagtttatatacacgtatttttttaagttctttattcatacgcacctaaactttatatacatgtatatatacaaagtttatacgtatgtatagatagtatatacacttgcatatacatgtaatattatagactagaggatatagtagtatatatactctagtatgggcaactcatcagtttcccccgtacgtacacgcctggtatccctaatctcgacgctttcttcgttctgcctcagtttcaagacgatacgctaatatctctccccgacgtttaatattagcgagccccgaaagcaaagcatatagattagtaccaccatgtttgggcaaggggacgcaggaggagtacgtgaaaacacgagaacacgtgacaggagaagcaatttggctaaaaattttgcaagcagccacgctgggcgtgtatcctgtatgagcatgggcattggcgcattgcacgcattccagagctcaaacctgagaggggccgaaaacgttcgggatttcctcgtttcaggcccatgcggtagtctaggtctacgaaaataaactacgacgggccaaggccgacgaaaatattgggattaagttcactggaggtccctcaacttaacagcgagattttttaaggtcccttaaccacagaatcagaaatgtgtacccttaaactcacataaaccgtgcactcaaggtcctatagcagtatatatgtgtggtttcactgacgtggcatcataatcagcaaaaaataataataaaacaagtgcgtggggtccacatgtcatccttcttctcttttcttccccagcctgggagagagggggaggcagcctgacgccggcgggagaaggggtggccgacgcgggaaagggagggggaggtggtcggtgcaactggcgggagaggggaagaggtggccagccgcgccgacggcgggagagggaggagagacggccgtagttccagcctgcggagaagcgcgccccgtgaccgcccatgctaccatgttctcggagccgtcgg

SEQ ID NO: 9939 - DNA, 7910 bp, Oryza sativa
ttgttttgttattagactatgtttaatactttaaatgtatgtccatatatccgatgtgacacgataaaaatttttacccctagatttaaacacagcctttatgaattatcgtcttgacaaacttcatctccgtgaagcctagcatacctttatcatttcacactcgaagaggcggcaagccagcaaactagcaatgcactgatgtcaacgaactatgtcaaaaaggaatacgaagacattttttttatgagaaaggagatgtgttggtaggactaaaaatgaaatcatattccatcctttcagttctaaacaagactaattcagcatggtccactggaacggcaatcattcttcattatgcaacgactaagagcaggtacaatagcaggctataagccagctacaaacatattttaagcagataaatgaggagataaaagggcagcgggttacagatttgtagccagctgtagcatagactctaagacacagtgtgtatgacaggtgggaccagatattaatagtgtagtatgtaactattgtatgaatgagctattaaattggctatagataaattggagctagtagttgactatactattaaacttgctctaaacaagatgtaagtacaaatttcccagagccttcgtgttatcctttactaggatcatttgactagcaatgccatcctacacttctgtctagcgaggaaaccgtatcttacacaaccaaaaaaattcatacaatacaattttatggtcggtaactcggtaatgcatcggctgtgaccaactgaccaacattcaaggaatttgagtccagcagttgaccccttgcaaaggacaaaaactatagcactgtaaagcgttcatgtttacctattgaaagagtaaagagtagcctctgccaaaggaaccatggaaaaaaaattagaagacactttgggaaagcaaaagcataaaaaagaaaagaactaaaaaatatgttccttttcctaggccgaaggtgaaatgctgcttcttgttcttccatgtggagagcatatgtacggttgctgcctttgcaagccatacagtgtaggaaggcgccatgtaatctcactccaaagaacctgtgtgcaatttcttggcattgggaatactagatccccttatcatctcggtcccatccttgtccgtgatttagaggcacgtttgataccctagaaccacgaaaccgaatagtgatgttcttgcccgatgtgacatgtgttcatgcacctctggaccctcaaaacatgaacagaaaacgtagaacccaaacagttcgttatctaaaaaaagaacccgaatagttcaggcaacagcaagaggcatatccaaggaggctgcttgttgttctgcaacaaggtgaagaggtgatagatctccctctaattaaaatctctctaaaccatcgtgtcttacggctcctgtcgagaacgagcaaaacgggattcatgcatccaaatccaaaggtagcaaacgtggtgcagtctcataattaagctagatattcacaatctgaagaactcatagttttttcatgggaaagatgtgtgttgctatgatccaaagcagtacgagtactactactaaactactaaaacaaaccatttcccgttgctgctcaaatagcgcacgattgtgaatgagtgtccgtagtagcaatctcagttgcatatgccatttgccatgatagcccaactctatgctcactaggaagactgaatcgattgccttgccccaactctactgaagttcagactactactgctatgcacaagcacaatgaaggccctatctatctaccgcaaacgaagcatctctcccctcctctccaagcagtcaagatccgcgaaatcctgcacatcgcgtttcatcattgcacccgcaagtttctgcagagagggggatgcagttttgtcatcagtacaaaggccagccaagaacaaaagaagcctcctttcgcagaatataagattagagacaattttttttccattgggcatcatggccatggcccccacattagatgcacgctaggcctcctcggattcgctgctaatgctgacgacgacgatgcacggcgtaactcacgttatcagcgtagcttttgccaagcttttgcgttagttatgccatggctttcctaacccgaacgagattaaagtcctaaagccaagcaaaggtcagactaaacaatgctctatctctctctgggcgtcgtcaaagctttgggccattctcgtggcctttttttctcacctttgctgcctcgcacacaggtgaactcagatgagaaggtactgaaggtgatgggaggggcggtaactagcagtagtgtggttgcacagtaaactggtagtggtaaaacgggaggaacagcagcggcagagcagcaaaagaagagggggaaggggaaaaagaagaggaaagagaaaggctgcagcgagttgccgtggaacggcagtgcgtgctggggataaacaaagccgaaagaaatgggctctcgcggcgcggctcgagaggagcgaatcatgcgcagatctttgtcccgcccaaatgcccacccacccccacacagcccacaaatcgtacgtatcgtctctcgccaccgtcctgatcatggccgcccctgcttcctcctaaacacatcttgcaaagctacattttggtgtatcgtatcatgtttctgagataactggtcatgttctgagaaaacgggcatgtgggacacggttcgatcgagtcagagagaagaatgcagtggatttcaagtgcctaattacaggtcgtgttgcgagtaacaaaatatgaaaaagaggagtaacaacaagtgacatacagagctgacaactccacgcttgtacgtgaggaggggagtggctaaaggagcctaaaaggagctctttccccgcgcctaaaactacacaaaagaacgaactcaactcactcactcgcaccaaagaagaagaaaggttaataaaagagaattctctcgctcgctgaaccaccgcgttttcttttcttgaggcttttaacaagcaattcgtacttgaaggttccctcgtcttcttcttttttttcttcatctcgccttcctccgcgaaattcagcgcgaagcttcttcggaggcctctgcttcgtcgagagaattcgaagccgattggtacagctagcttcgtggatcgctccgtgaccgcagcaatggcgagtcgaactctgacatggacgctgcacgacgcaagtgaatgaacacggggcgtcaggattcagtgcacttcgagacgagatcacgaaatggaggatcacaagtgacaatgtggcgcggggcgcgtaccacggtggagcgactccttgcagtgcgcgatggcgctcgcgatgccgtcctgctgctcgaggagcgagtcgtcgcggcgaggcggcggcgactggcacgccgccgtctgcgccgcggacgccgaccggctcttccgtagccggaggtccgcgccggcgctgggggctacccggcgcagttgcctcgagatcttgctgaggtaccgcctgatcacgtcccgcgagggcgtcctcctgttggcctcgtccccctggtccggcgagccgtagccgaacgcggcgaagagcctggccgagcgcgcgctgttggagctcctggagaagctggcgcggccgccgtagaacgcggccttggcggacccgaagctgagcgtgcgcagcttgccgcgcctgccggagccgtaccgcgaggcggcgtcgctcggctcggacgcgcagaacttgaggtgcgcgggcgccgccgccgccgcgcgcgcccacccactaccgccgccaacgtagaagacccgctcctcgtacgacggcgacgcggagcggctccgctgcagcgagatgacgaagtctgactcgccggcgcacgacgagtagtcctccgactcggaccccgactcggcgctcgacgcgggcgccgaggccgagcagcacgacaggtcgaggtcaaagaacgggccctcgtcctcgccataccagccgccgccaccgcatggcgtggcccgcgccgtcgccgtgatcgtggacaccgcgcggcgccggaaccgccgcgccgcgagcagccgtaggaccttcatgtgcgcagctgctggtgttcgggacggtggtgctcgtcaggtcggtgttattagtgggagatgtggaggggtagtggtgttggtggggggaggcaggaggcggggcggtggctcgcttttaaacgggagcggcaaaggccgcagcgtcggtggagtacgtgcgcgagatttaagaaaggccctactgggttttcttggggagtttttccatgtttcggcggtgtttgcggtgcgaagtgttgaagccgatggcatccgcggcgtttcgcggtttcgccaggcaacttgggttgggtggctcggcgcggtgtgggtcgcgtcgcgtggcgtggcgtggcgcggccgttgcgttgccgtggttgttggcgtgcgccgcacgggccgtggatggcaaggggagcgtgcgtgcgcgcgcgcggcgcggtgcgtggcagtagcggccagtttcgagcgcgatgccgctcggctccgtggtgtcgccggcgtgcgtgcgtgcgggcgcgctgttgccctgaaatctgtgaattagtggtagtatcggtgggtaggtttcgtcaagaattccggatttttacttttgtctcttgcttaccaacccgatatccagaaggatggctaccccgtaccattttcgcgttgttaatgacgttgttgtgcctagtgtctatgtaaagtatagtgagcgctaacaacttattaccaacaaattaagcagagtgaataatacttctatgtactactagtatcttcgtgcacgtgtccaatcagtcacgggcgctctcctgtcaacatttctgagcttctctcgcacaagatgaattttccttttcagagaacagctgatggttataactcatcacttcatgatcgatactaatgactaatgtcaactactctcccgtacaaatgaaaacagcatattaccctctccaggggcacttacatactgtcatgctgacaatcatggtgcccagcccctgggactattcgatgaacaccaagcctgggaaaagaaacatgaaatcaggaatcattcattcctgagccaaaaaaatttcatggcctcactaacagaagcttcacaaaagtctgcaaaaaccatccactagctagctttgctttcaaagagactgtggagtgtgggcagcaaaggaagggagctgccagatgggaactgacggctgtgaacaacagcgtcgctcaagtgcaatgcagtgcagcgccgttgcagctagtagctgcagcagaggcagcagcagcactcgatgagtccaactccatggcgcgagctttcactgttttcacagcctttttcaccggtggtcttcgtcttctactcttccctctcctcgtctggtccaacccatctacagtagtttcaggtcaaaaaccgccattattcggcttgaccggaccagtcttgagaatggcctgcacttgtcatatgtgacgaatagattctgtaaactgttaccatagtgtactatatactggagttgcagtacatttatactgttatctgaaaatgcttttgccagatttgtttaagctctaccattccgtgttaatggccgctacatttgccgttttctcaagaaagatgtgacgtgatggatcatggacgatgactttcagagctagattttggcaccctgtgccaggtaggtcaggtcaggagacctgcccgtgcgagaacacatgtcgccattcgaaatagaagcagcagagttataatcagtgaagtgtgattacaagaaaaataatccaaaatggatccaatggtgtgcatgtgcttgactaactagtctcatcatcgattcagagcataaaaggcttaaagcgtcttaccctttctttcctgcagatctcgaacaagtgtttgcccgtctgtccatgagagttcagagaatgcgtcggcgagactaccacaaaagtttgaacagagtttcataaatttctgtttcttaaagccaagtactgcaggaacagcagcgccaacggcatgtaccacgtctgaattctgatggatcatttccctggactgcaaagcagagcaataaatactagatcaaaggaccaagttcagatgaaatattgatggttcaaaagctcgtcatccacagtccaccaaaaggttcttacatggtgaatgggtgatactagcagtaaatcccgtcattcatactgtgtaacattagtgcctgaattcctgccaatcctgttttgaatgtgaaaggaaaaacgtgaggaactgaaaaggggtttgtctatggctatttgcagagtgaagtccagaagaaaatttcaacgcaaggagttcacataacacagaaaataaacatacaacatcaatgttttcttaacatatcagagtaacgattcaaatgattgcatgtatacgatgttttaccaaggaaaagttttactttggccctaattggaaattggaaattgcatgtatacgattacagataaagtatgtcctttataatttaaccttacatctatcctctacaaaactacccaaactattgcagtctactactcacatagaatgtgtgcttaattccgggaagctgcatccggaagttttgcttcgacgagtcaaggtcatcctgcgatcgcctgactgaacctgttcagtcaaaggcaacgataatggcaagtgacaatattgcgggtcctgctccaaacggtgaccatcgtacaaggatcctaagttcctaccacctcccgaaccagagaagaaagaaacgtcttcacaatcccatgaagccatgaactactactgctgactactgtatccgttggacccgcagaatagttgggattaagcaactccaacaattgttatcttatgtattttggagctggacttagtgctcttgctgacgttggccagtccacacgaagggcaaaatttcggtttatgagtcttgcaatccagtcagacgcgtgctgtactggtgttgtatttgtgcactgaagtctacaagtcagtggacaactgaacagggtttcagttcagtagactggccagtacaggctttgaggtttcagcatcacgacgtcttcgggttcatgtatcttcttcgctacagaatttatcattttcgcttgtggatttatccaccattggattccatattccaactttcgctgtgtttagttcttgaaattgggaaaaagtttggggaaagttggtagtttggaaaaaaagttagtagtttatgtgagtatgcaagttttagatgtgatgtgatgtaatggaaagttgggagtttgggggaagtttggtgtcaactaaacatgacctcattaacttcagtacttcagttctgattccatgacggccctcggagtttgatcaggttgggcgccaaggggaaaggtcccctgtttgttagatatcttgaggtccaaccgcgagtgttgggcttatgtacacttttctgcggccctgtataaaaagcccataatggacacactcgttgcacgccaggaataagttcacctgccgtccctcaactttacaccgagtttgtttgacatccctaatccttaataccagaaatcgtcatccgtaaatcctagtcagcaaaaaaatgtatatgggacccacatgtcagccaccctcttattccttatcttttcttcccagaccttccgttcgccggccgctcaagtgggccagtagcaacggccacccggcgctatctgctgccgctgttggtgcccccgggagctgccccgactccgacct

SEQ ID NO: 9940 - DNA, 2489 bp, Oryza sativa
ctgcagccctaattcacattagatcaacatcaactccaccaccaattccttgcttcctatataactagtaaagacgcacacagtggacttgaaatctgaaggatttgttgctaagacctgctggatagaacggccagatgtttttatgtttatctagtgtcgatcacttattttcacagggcatttttgaccaactttaaaagaatgttaatgagaaaaccgagaaattgaccagttccacttttcttgatgtttacaatagaagctatccacagagtacttgatttgacttcactgagtttaccgactactccctccatcccaaaaaaagccaacttctggctatgtatctagacatagcctatgtctagatacatagccagaagttgtttttttttttggggacggagggagtactcattaacatagtaagcaaaaaccggactagactggcagtccaaaaatccaagtaaaaatatatttttgttaaagtttggagctgagcgggatcaaaccagggacatctggcctcttcctgcctgaggcttctaaccaagtgggttttacctctgatttgtaagtgatcttgcacattcactcatatgtgtaatctcagatccaatccaaaatacattgtaatataatattatccaacccgcctgttcactgtatagactgtggttataccaggtagagtgacacggtttgcccatgactttttgtactatgcttgtttgttactttgtgaaaagcttaactgaattgctagtatctgttgacttgagagagttacattatccttttaggtggctggttagtgattacacttgtgaatttgcaggtagttgcgaattgcatgcatgcattacaggagatctggaccctagaagcagctaagtcagaggaagctgcaagggagattgagacactatatagcaagccagtagtattttaccttcttaacaggtagattaccacctacttttttttctgttaactactctctcagtctctaagtagtattttaccttcttaacaggtagattaccacctacttttttttttctgttaactactctctcagtctctagaagagtgtagttttagcctaatatttttccctagaagagtgtagttttagcctaagatttttccctaaaagagtgtagttttagagtggtccactggacttctttaatactactatatccttttcttgtcatttttagccactgaaccaatattattccctcctcctccctcattgttttctccccctcgttttctctttgaattaatgggcatagtagtcttttaagttttaaccttgtgcttaatatgtctttgactagctaaaactacactcttttagggacggagggaatactcaataactctattccgtgcatacttattgttttatttgtcattgcaggatcaaagagttcagtgagtgggcacagtgcctcgttctagaattagtgtcaaacttcctaccatctgataacaacgaaatttttgacatcatgaaccttcttgaggacagacttcagcatgcaaatggagctgttgttttggcaacaatcaaagtttttctccacttgacaatgtcaatgactgatgttcaccagcaggtcttactcttgcagcatagttttgatacttacgctagtggaagtttgtcactgttatgcatacagatatactgaaattccattttgcataactaaagccccacataaatgctttggaagtttatatggtctgataatttcttcactctgatctgagatcacctggactgtttggatttttatacctttttgttgtatggatttcatttgtgacattggttttgtgcactttatagtatgaaagaagagacatgactgatgatctttgtaatcattgtttgcatactccattgtaggtttatgagcgtataaaagcaccactgcttactcttgtaggagctgggagtcctgaacaatcatattctgtgctatgccatttgcatcttttggtgatgcgtgctccaatgctattttcctccgactacaaaagtttctactgccagttcagtgatccttcatatgtcaagaagcttaaacttgagatgctgactgctatagcaaacgagagcaacacctatgaaattggtacagcagatatctgtttccattgattatacatcggcatatctcacaacatatgtgatatatttttaactccatgattttcattatgtttataaaattttgtggccttctttcgttccagtaactgagttgtgtgaatatgctggaaatgttgatgtaccaatcgcacgtgagtctattcgagcagttgggaaaatagcgctgcagcagtatgatgtgaatgctattgttgacaggcttctgcaattccttgaaatggacaaggaatatgtgacggctgaaactcttgtaagtttttttgatagtattttaactgttcatcattcacta

SEQ ID NO: 9941 - DNA, 34474 bp, Oryza sativa
aatttttaaaaataaaataaaacatattttttattttattacctaaaaataaattgtcataaataatgtatcgtgcaacaaaatgataattattaatagtcttatgcgataaacttttatattttcaataatgtaatttataaaaatttctatgttcatccaaagggtaaaatggtcaattttatagaaattagatggtcgactgacgggagggatatggaagggaccaaaataaaattttaggagtatacaaagaaagcaagtaaaattcagaggcataaaaaggattagctaaaattttagagatatataagtgattttctccaaccggagttgaaatgggattgcactatatgcacttcctacttccaagacatgtagtcatgcacgcctgcacggatagtctggtagatatatgtactgtatttgtttagatttgactacattagcaagtttttttttggagataatagaattgaatttgataataaatcatttcttctctttcacgagaccacaaatacactcgatatagttatatatactttatataattatatacaactataataatcgtcgatctacttcattataggttgcattcactatgatcaacggtatacgtctttatttttcctatcaacacatactactgataggcccacagaacgaacaatctcctgtcttacgtcctgtttcgttcatgggtctaatccattagtcccttcattttaatctgttttagtctctaagaatttaaacaagatgactaaaattaactaaaagtgtatgttaggattaaaatccattaatcccttatggagatatttgtaaggaagaaagtggcagcctctctcttctctctccctctatccacatacctttagtcccttttagtctctggatctaaatagtaggagactaaagtttaaagtttttagtttagagactaaatgatccaaacaagaccttaacatgatactccctttgtttgaagtatttcaaaattgagggcagaggtggttcaaataacataatactacaaaggtacgaataactatactttggcacggagtaaatagatagataaatctatctattattatatactaaaagtccattaatcttcctacaaacactctcaaggagccacgtggctttctaaaaacgttctcaagccgtcacgtggcactctaataaattagagaaaatcctacaaattctgagaaaaaagcaaaacatctagcccttagttttcacttaaattggtgacccaatatttcaggccattaaattaaatctattaaaatcattccttcttctaatatagatacgatgcgtggagaggaaggtacgatgtactattcgtaaacagtaaaaaaaaatcctatgcgatgcatatggaaggagaggaatgtacgtatgtactacctaaaaaaaattacatgatatacgtttatatgaacgtaatgtaagatcgtacgatcggaaattaaaaagcataaagcgaaaaaaccaaattatatataaaagtccactaaactttctacaaacgcttttaagctgtcacatgactcctacaaacgctactaagccatcacgtggcgctctaataattaaattagagaaatctaaaaaattttgagaaaaaaaaggaaaacattatatcattgattttcacttaacatggtagacccatcattttatctcctattatctcacctgctcacttctttatccaaattttctagatagcagctcagtacataacaataagaaatgctatattaactatctattatatagtacaaatcaaataaactccgtacaaacgctttcaatctgtcacatgcgtggtgtgctacaaacgctcctaagatgccatatggtactcaaacaaattaagattcctaaaaattatgataaaaaacaaaccattgattttcctttaaataggtgaacccaaaaattatatctactacaataaatattttttaaaataatttttctatctatattgattcacatgcataactaattgcacatatatgagaagtaattaaagagagggctagcaggatggtaaaaaaaaccaatgaaagtttgttgatatttcttcacgaaagagatatataaagaacactcaattcaaaatagaaaatacgttactttaattttaatttgatttgttagaactattttcgaaacaaactaatgcgcagcccgcgtaaatgcgcgggctatcttcctagttaaataaacaatatagaaaacctaatccattagaccaatggagacaggtgttgaacataaaacatttcacgtattttcttttttagcaaagcagtacgtagtccatgatttcaattagccgcaaaagatatcatctgcgaggacattattaatttatttatagaaggtataagaagggactttcctcttgtagtaagaatgactttgtcactaactaattccactgatggatctaagctaggaggcccaaacgaattaggcaggataacctcacaaaaccacccaccaacaccaaacccactactactaaaatggagtaatggtactactggtagctgatagtaagaccatatggacacagaaagtggagtatcctttcattcctaaaaagggcatggaatagaacaaccccaattttggaaacggggagcagagccattcagctgtttggggaccaaaggcaaggaggcatgaccgaccgatccccatccattccaagccttcaaggagacaagatattttcgaagagagcacacctaggccctagctagcacagtgcgcgctacagtatagtattaggagcacttcttttcccccgattctccaatcaatccaatccaatcctcgtgtaggccaccaggaggcccctccatccgtcccactctgccctaccgcccatctcatccccatccatccggtcgctgaaatccgccgtgcacgtacaccgtcttgtcgatcacgaccaaaccccggccgcctccgcctcctttctggtggcgcgcaccgcccgcgatctcgatcgttcactcccggccgtgccgggacgatcgcgcgcgctcgccgaccggtgtcacggatcatatcaaatctcgcgtagctagcggtcgaagtcggtggccatcgtttgttcgccttcgcacaggtgtccgctgatctcggcgctcacaaagcggtcaacacctagtactagctactgaagtactgtcaagagatcgagccaagccgggccggccgggtatatccaggggcgatatgacggatctggcaagtagattaggcatgcggttagttgggattagatcgagaggcatgcacgcccgcgcccgctttggcgttgccgggtgccccggatcacgctgttggtccaaaaggcggcactgtttagtgtcatggcctcaaatctcacgcgatggcgacgtacgccacagcgggaagggtcaggagcccgacacttgtcgcgctccggcctcccggacacttctatatgaacaacccccccaacgccccaatagtagtatatgccgctcatatcatcacttgtttactttagatcatgtcctgtcatcgcagtataagggttaaccacgatcgagcgagctagccaccgtgcgtggctttgccttttgagggatttgacgtgtaggcaaaagctatagctcggagcagtggagtggcttggcttggcttggcttgctgctcggtcgatcgatcgagagatggacgggctgcacacggagctcgcgctggggctgatcgggtgctgcggcggcgacgggcagcagcagacggcgccgttcgtggcgaagacgtaccagatggtgtgcgacccgcggacggacgcgctcgtccggtgggggagggacaacaacagcttcgtcgtcgtcgaccccgccgccttctcgcagctcctcctcccctgcttcttcaagcacggcaacttctccagcttcgttcgccaactcaacacctacgtcagtatcattcaatcgccggcgccggtccgccgtactcccgatgattaacgctttttccgtcttgtggtacgtgcagggattccggaaggttcaccctgaccggtgggagttcgcgcacgagtcgttcctgcgcggccagacgcacctgctgccgcgcatcgtgcgccgcaagaagcgtggcgagggcggcggtggcggtggcggcgcgtcctgctctttcggtggcggcgccggcgagcaccaggtggctgctgctgcggccagcgtgggaatgtcgggagaggaggaggatgcggcggaggacgtgctggccaaggaggccgcgctgttcgaggaggtgcagaggctgcggcacgagcagacggccatcggggaggagctggcgcggatgagccagcggctgcaggcgacggagcggcggcccgaccagctcatgtccttcctcgccaagctcgccgacgaccccaacgccgtcacgggccacctcctcgagcaggccgccgagaggaagcgccggcgccagcacctcccttcccacgagcccaccgtctgtcccctcccgccggcgccgccgccacaacctccgcagccgctcctggctctcgccggcgccgcggccatggacggcacctactggtggacgacggagcatcatcatcatcatcatcatcagatgaagcccatgacggtgttgccatccttggagccgcccaccgctagctgcggcgtgcaccaagtgccggagctcgggggtggcggcgtgatgggcttaacgacggacggtgaggccaaggtggagccgccattcccattctgtctacttggtcaagctttcttttaattaacctgccgaatcatgcccatgcacgtagtaattcttccattccacttactgattcagtcactcgatcctacgtacacactgccaagaaaaaaaaaaacagatgttagttctagtgcaatgcatgcagtaacaccagcatcgatcagtacgtgttgatctgattattcttacagggtacagattagattacagacgatggtgtaaaaccttaattactactgtgtacttatgtacaacgcatcaaacaatagtggtacggtgttgattactagtacttttttgattgctagctgatagttaattagtactactattattagtaagtagtgttttcattaggtggatgcatggacatttcttcttgccctccaagtttgtagggttcatgatttcatcaaagtgcttatattaatctctgctgcataacttttgctggaaacatgcatttggcttcctgtgattgcccatctaccctgatgttaacttcagcaatacacttagtttattgagtggtttgtgacttttgtgagaagtggcttttgctttcagactctttaatttctccagggcccactgcacacagccaataagaagctaggggtggtgacgaattgccgatcgctgtgctgtgttaatggtccaggtgtctgcttccattagcattttctgtagtgatgatgttaattaaagtttggatttggacgtcgatgccggaagctagctagctagctagctaagggaagcagaagaagaaatgaaaggctcttagagctcacgagagggcgcgcggcgcgaccagcgatttggcgatttttgacgtgattttcccctgtgattttctcctctcttcctctctcccccgtcgctctcgcgggcgccgcgccttcgatcgagtccacttcttaattacgcgccccgcggatatgcaggagtttgcaggtataggagtgtacttgactcctttagtttggactgagatcgatcgatcgcgtggcttaatcgtggctaagcatcgcgaaatctttgtttaattacaccactaagctggtcctgcccccagctgttaacttcggtggcgcgcaaggtgtgacactccgattgatatatgatatataatcctactagtaatctaccagtagtaatttgctttgcgggattattattccaacctgccggcaggtgtagatcgatcgatatttacaaagatttggctgtccgccagcttgatcgtcgatcgatatatcgatcgagtggtactacgtgctagctagctactggctgagctatagctgtgaggagatatatatgtatatttatgggcgtacggtaaatcactaactaaaggctgagctaattaagtactctaggtggtatatatatagtagtaccagtatagtactccgtcttaaaataagtgtagttttacactattcacgtttaacatttgaccgttcgtcttatttgaaatttttttatgattagcatttttattgctattagatgataaaatattaataatattttatatacgactaaatattttcaaattttttataaattttttcaaataagacgaacggtaaaccgttagacacagatattcacgactgcatttattttgggacggatgcagtagaatgtatagcgcgatgcatggccactagccaatatccatccaccacccacgtgacatgatatggtccatgtccccctcggccggaatatgcttatatgcaaatgatatgacggctcgtataattacgctggtctccatggtcaggtagccagacactgacgcgctagctctacatacattactgtatttcgtaattcataaaagaattaattgaaatatataaataccgtgatatcgatggtaattaagggaatgccattatggaacgggatataaaatgatttttttatcattgttttctatatatcggagtgatcgatgtcatgtcactgtacgacgacgcaagtggctgtaggactgcgtacaagatcggatgaacaatgatcactctcttaattgttttgacccgtcgcgcgttgagattatagcgagagggcatatgggcaaagtaaacggatgtgtccaaaacagggtgggccccgcgatatatattcagcagcaggtggcccccagttggcaggtctccatcgggcacaaagatgactttggccatgtttaggggagcttctcctcttagctgcagtttttttcaaaaattgtttctgttagaagctgcctcaaatagttacagattctaaaaatgaaataaaaagccagaaactggagaagttgggtttcagagttttttcagattctcataagctgactatcaaatagctgcttctcagaatttaaaactccccaaacatatcctttgtctgtgtttactgtgtgaagcaccgatggaattatgtctcgcgggtgtactgtgttacgttggcgaccgtaggagcccaccttgatcacgccggccttaaaggtgcccatacacgtacagttacggttactgtgagccgcatctccaaccgtcgcgcgacgacaggcgatatacgaccagctgctacactatttaattaagccgcgtgacaacaaagttaaaaacaatcgatactcattatcaatcgacgggctaattaactaacaacgttctggcggtcagttaacgagttgataatacacggtgtaaacccacatgcatgcaactgtagagtatatacttctactatttacagcacgcgcgcaagcaaagaatgcaggatagctaaaggcaaaggcgacatgtatctgcctacctatctatcgatcgacctctcatctcaaaccatgtgagaaaggaggcaaaggcagcgtgtgtgcaggcgtgacatgccactgtgtgactgtgactgtaggattgcctgggaggtcatgcatgcaggcggttctctagctagctatagccaacttgatcgcactgttgcgcattcaatcgcatgttagccggtgcggggctcaccatgtcaggcataaaatatgttatctatgcacctgcttagctgctaggctaggctgctgctagcagaaatcaagcaagctggctgagtagtacggaagtggatttcttgctccctagctccgtcctaaaaataagaaattttgaatggataaaacacattatggctatatttagtttatttaaacttttaaaaattccatcacattaaatgtttagacacatgaataaaacattaaatatggacgaaaaaaatcaattacacagtttgcatgtaaattgcgagatgaatcgtttgagcctaattacgccatgatttgacaatatggtgctacaataaatatttactaaagacggattaattaagcttaataaattcgtttcgtagcttacatgcggaatctcgtagttatgggtttttgttattagtctacgtttaatacttcaaatgtgcgtccgtatacgtccaaaaaaaatttgaggaggaactaaacacggcccatatttttaaataaaaaaggtcaaacgttggacacaaacccataactacgcttaaaatgcgatagatggagtaaaacccatatgtcggtgacttaagttaattatatttccagtttagtacatactccctctgtaccataaaaaacgaatatagaattggatgtgacacatcttaacactatgaatctggatatatttatgttcagatttgtagcactataggatatgtcacatttggtaatagtttatttttatgtaacgaggaagtacatcatcgtgcatggccgttcaatgttatccatcgatctcgctgtttcatactccgtatgtgcatgagaccgagttcatgacttcatgtgtgtgacgagttacaaacttagtacgtggtatatatgcccgattttagggtttgtcgacggatattgggatggaaatattatatcgtggagttatattgatacttccttcgtcctaaatataagagtttttagatggatgaatacatcctagtactacggttataaacatactcttattcagattcgtagttatagaatgtgtcccagcattcacccaaaaacttttatattttgagatacagggagtatatagagtagacatggaggaaaaggaatatttacgtggtaaactcctctgccgccatcacccctctgcctgatctgggagggagagggagagggaggggagggaatcaaggaagtgaaggagaggggtggaggatgagggtaggaagtgagggacttagccgagatgaatggttggaggcagattttataaggtatctaactttttgtaagccgatatttttacgtctcgtgtgtgaaaatcgatttttacatgtgtgatctaaagaggtccgtctgtaaaaataattcttacctcttaagaccatacctgtaaaaatcgactagttttaattttataggcaagactagttttattgtacctttacttatttttgaaaatggtaattttttttacctttacttatttttgtaaatggtaattttatagtctatctggaaaaataaaataatgatgttggaaaaaatcgtcttgaaaattcctacagtatatttttccctcaaataaaaaaactcttattttttattaaaaaaaactatgattccgtatatccgtggacagaggaagaagtttttgtgatgcgggacggggggtaacaacagcagcatatgcatgtttgcacgcatggatgcatgcgaagggtgtcgagtagtccccccttgcacgtgtgcgcgaatggtttgtgttcccttgcaatgccgcatggcatactgtgtgcgggatattggacgcatattatggcttatggggcaccgatcgatcgattattctatcatagattcaaatatacgatatctacactatgatcgaattgttcttattcataaacattatggtatacagcactattatgttcctgccttcctggtatatatccattaagttaggcccttgctctattgtcagtggactggcatctcttaggacatgtacaatggtctttattagcggtctctctttattgtcatgcaagcatatttggtgacgtggaagagagaggaagtaggaaagagaaagatggttgctacgcatgacaacggtgtagagtcgactcttagcatttattagaaaatttttttgttgcattgagtctaataaaggaaagatgactagtaagaaagtattttggtacattaatggttagagactgtactggcttaactattgtaacgtgatagcctctaattaacgtagagaccacaccgatctctacctttgtacttgcccttatttagccatttttctgcaacgagaaatggtaattaagatatggacattgatatgtctaaattaattaaggatcccataccttctagaaatcttgctgcttgtaaccctaggcgttatatcaattcagcggatattccatgggcatgcctttacgttgctattgcatattctggctcaactgctaaggctctaagaaaacaaaaggaaaatgggaaaacgttatttcgctggtgttattatattttgctagagagagacgacatatgtagatggttttttttcttctgaaaactcatgtatttattcgatataggagttctcacatgcaaacagattacatgtgccatttggacatctctcagaaaaagagagattgagttgctagctctcagtagaacaagcagctggtagaagtacaacacaacatgcaaaaggatccttgaaaaaggacaagttatacaaaggtccttgaaatatgtaaagaaggacacgaaaagaaaatagaaaagcattccagtccttgcttcgctttttctccctcaccggtgacctagatgatgaagccgacaacggctatggtgaaaacaaggttgactgcaaaagatgacatccagccacaaacccaacaggggcctcgtaaagtagaggttgaaatgaactcgacactactgcaggatagatttttgtggacgccgcccccttttatttccatgcgatctgtaagtggaaccgcacgggaaaataggaagaccggcgccaagccgtcgcccgcacgggaaaacgaattatcccgtgtgggcggcttaagccaaccgcacgcgaaaatagaattattttcccatgcggatccttaagaggcccacacaggaaaatcgattttcgcatgtgggcctcttaaaggcctgtctataagtctatcattcctccccttatccctcctcgatacttcaaaatttcatccttatccaccactcttccttatcttcaaaatatctctcctctctcactctcacctctccttcacatccttatctcctcgcctcgggattgcatcctcacatcctcacctcggttggcgcactgatcaactgcatcgggacgatgacgacgaggaggcggccagcttcctcgccctccggcggcggctcccttgccctccagccgggagctacgacgacgaggaggaggcgaccggctccctcgccctccggccgggagctacaatgatgacgaggaggcggccgggagcggcgcagccggccgaatcaacgccgcccctgtagccgacgacgacgaggaggcggtggcctcgagcgagcgagcgagcggcgggtggcgcagttccctcaatctctggcctcgagcgacgacaacgaggaggaggcggtcgggagcggcgccgccggcctgatcaggccgccgacgaggaggcgcctgtcgcggctgctggtggaggcagcgcggtggccgccgccgacgtcgaggaggaggaggcgacagtcgggagcggcgccgctgccgatgacgacgaggaggaggcggccgggagcggcgccaccgtccccacctcatgcggccgccgacgatgatgatgaggaggctgctaggagcggcaccgcccttcccacgccaggatccggcggtggcggctgccctccggctagatctagcggcggcagcagggagcggtggatctagggttagggtttcggtaatttgtgaattttatttttttttcaggtttttatttttcgtgcgggcgacataagcacccgcacggaaaaatccaattttcgcgtgcgggggcgcctcccgcactcaaaaatcacgattttcgcagacgagtagttgcgtgcgggccattcattcgcatgcgaaaatattttttgactgcacggaaaaacccttcctgtagtagtgcgatgaacaagagaagtttcagtcaaaccttggagataccccatcgaagacaaggaaggacaccagaccagcagcgacaacctcactggagatgatttgaaagaccagcaccacctcatcgttgtggaggaagaagtgttcccaccacagggaatatctgttgcacttgtggatctaacaccaacagaaacctccatagcaaccctctgaaccgcatgaagctgagaaatcccggattgaactcaagctgagcatggaagggagcatctgggatgaagaagatgggtgttgacatcgccttcgagctgtacacaaaagaggaagaagaaaacctagaacgagataaactcgatacataacgggataaatctgaccacgggatgaacacaatagctccctgaacccccaccccccccccccacgcgtcaacggcgactagctgccaccacaagcgtaggggagaggggtttcagcgaagtggaaaggaggagtctggctgttcactttttaccgccaacgggagagaaaggataaggttgagagagagaccccatgacatacgtagatgtggagtattattaatgcaagcacggaaggagaaataatgaattaatgaacctcggttgaaaggcctctctgtttggcccaatcgagttagtaataagtccgtttcatctccctcatcttttgctcttgattgagtcacatccctcgattacaaaatcaggtataatgcttcccttaacttaaaaaacaggtgcaaatcagctcattcattggtttaggaagcagtttcttcatgtggggcccacatgtcagtgagacatgacaaaacatatgcggtgggccctacttgacagtggcagtagcggccgtgtgtgcgagaatgcagccatggatgtgcgcaacaacactacttcaacacccagttccgttgatattgctcactcgtgccccttgccgcctcgtcctcctcctcctcctttgcagatggcatggtggttgtcggagacccacgctgcgagctcctcccaccgaccaccgacggggcgcctaggagaactgcaccacgaactcctcccgtactgaaggcaggcggtgcacacgtattggaggatgctgggcacgataacctctacatcagcatacaccatgcgggcactttgccgtcggcaacgaagcagccggctgggggaggagccaacagcgtggaggcacgggagggttgggagaaggtgcagatgcatattcgaaggggttgggcacaactacgtatttgccagcttacactatgctggcgctatgctcccaccgacaacggagccaccgactaggggaggaagctgcaccggggcaacaggtttcgatcactgaagctatccatggatgagctgctccccgcggagcccgttggtgttacgtatcaggcgctgctcaaactttccatcgtagatgccaccgagcttctcctccacttccttcaccatgcacggtgcccaagaccctccctcatcccctaagcgtagaaccgccatcgtcactgccactggccattagaggatgatgcatcggagaaagaagaggacggacgggatgtgtatctgggcgatggacaacgaagacgcaacgggacagcgaatgtgatgccacgttaggggaggaagacggtgtatggaatggcgcatcgccggctccctcgcttccctcctctcctcctccactgctatagaccgccttcctcgccggctgccaccctcactaccttgaagtcaatagccgggaatgtggacaagttgacacgggagcatcggcttcctccgacacaaccttgaggttattgggtcgggaacagggacgggttgacacacaagcggttgaggtggagctcggccacacagacgacagatgcgaaggggtagaggagaaaggtgaggtcaatgaggagcgcgaggaagagtaagagtaggagcgggcgagaggaagtggatgaggatggggacgaagaagaatgtcagcggtggggaggtggtgaaagggggagagagaagaaggaatgagaggggggtgacatatggatcccactattatttttttaaagcttgtactgctgactcagcaaaaaacgcttcctaaccaatgaaagagctgatttgcactggtttttgaagttgagagatgcgttatatcctattttatggttgacggatgcatttttggatcaagggcaagacagaaagatgtaaaatagacttattccctcgagtcatatggaattgaatgcccaaagaagtaagtcacgtatgttcaactggatcgttgggccgtccaacttgggctcacttgtgacgaggataacgtaacacttggaataagttcatctaaggtcccttaactttacactaaatcctattttcgaccttaaaccccaaaaccagatacaactggtcccttaactatcaaaaccagtgcaaacaaagtccctcgacggtttgtaaggcggttttgactgacgtggcgcctacgtagctggtttgactaggtcttcatcccacgtggcattgacgtgacgcttatgtggcaattctatcccagaaaaataatagaaaccgtgggctcacatatcagtctcactcctccatccctctctcttctctctctgttcttcctcatcctcactcccctcttcttccctctcccctctctctcttcttcttcttcttcccggggagtgccggagcggacggggcgggtgggcggcggagcaggcgagcgaggcgggctgtccgagctccggcggtgggcaacggcgccggcgacgggagcctcgaccgggggagaggaggcgccgcggtagccggagccggggtggtcggcactgcggcgggtgaggtggtggttggcgcggcggcggagagaagctgctgctgcatctccagcatgatgcagactctgctttccggattgcttgctattggaagaattgaggagtcgatccctgctattggaagagttgagctagataacatatcactgacagttaagctatagctatttttttctccatatcttaattttcttttgttgacaaaaccattgctatgcggccagttcatagatcatcaggcacacgttcaattcacaacaagtacttttctttgcgaatccacaatccccgctacgaccggccgcctcgccatgccagtatatgccttggcgaccccttcccgaccggcggcgtggtggtcggcgccgccgcggggtcttgcgccggccgcatccccgccctcagtaccgctgccgccgctgtcgaactccatatccttctcgagcgtgacggcgatggcgccggagtggtcatcctcgtcgtcggagcccgcggtcgagcgctccgactcctgcggctactggtccagctgtcgcgtgagcagccacggtcaccaccacgaggccgcggaagacgacgacccgtcggagagtgaaggcggcggcgagggcgccgcctcgccgaggtcgctggccgcagtcagtgtccgaagaagagagaggataatgggaagaagaggagggcagtgaggatgacatgtggggcccacgtaggtcccaccattttttattttgtgtgtgtgaaactgacacgtgggtctcacgggttttattattttttcggatcgaattgacacgtacgcgccacgtcggtgccacgtcagttgaagaccgagtcaaattagccacgtagacgccacattggccaaaaccaccatgtaaaccaccgagggatctcatatgcactggttttgatagttgagggacccgttgtatctggttttgcggttgaaggatgaaaatcggattcgttgacaagttaagggacctcggatgaacttgttcccgtaacgcttcgctatattttggcccgcaaaagcccctcggatttccttctctgattctccctcgcaacctcctcgtccgcatttttgggaacacgcccggacgttcccacgcatggctcacgaggcatgtgagttgataactgataaaccggttcgtcggagcccaagtacgagctgaccaaggaggttctccgaaaccaccacaccgagaaccaccagaccaccggtggaatcgccgaactccacgccagcgacgaaaacaaaaatactcggtgaagaacgcgcgcgtcgacgtcagtgagcagcaacgggccgcgccgcgcgcgacgccatcgggaacaggggcagcgcgccgcgccgcgcgcccagctccgcacatgcgcgcacgcacgcacgcacgaacacgggcaaccgaactcgaggccgtataggaaattcccacccaaaaaaacaccacaagtagacgatagaagagcttagcgcgcgcggagtcggcaccacccaccgttgctctcgcggcgttcgcgcgggggcgggaatctgaagacccgctcgccgcgtgcggacaagcgcggcggcggcttatgcttgttcctgcacgcgcggcgagctacgtcaccgattaccgaattaccgaccgcggtcaaagaaagttctactgtagggctgacgcgtgggcccactcccaagcggtcctctggtgggccctacgtgccagtcgctgcgtattgcttctctcctggggatttgggatgattaattattggatgacgcacttgctagctaaaccatcttggcttgtttgtttgttgtcaagatggagagcatatatgctcctctggtttcactgcctcctcctagctaatactcctactcctaccattttatgtaatcctaaaagttggcgctcctgttgctacttggtactacagtgcttctgatctgatgagtagactaggatgtgatgtgagcgtgtgagcgaccacatccaattcagggtggttcaaattcaccaagatgcctaagcgatcaatcagcataaagctgtggtgtggttggccatacaaataacagcatctagcacatgcaaatttggcctggatattgtttgggtcaaactttctacttctctgaaagctatcgttaaaacattgatgtgatgttacagtctcgcgcacgcagacctgcaggcgtcctttggcactatggatccaaaccacgggttcgcttgcaaaggttgcatggtgtatacaattgcagcaaccgtgttcccctttgggatcagatattccaaacacaattatgaactcccaattttaacatgcgcaaaaccagcgccttgcccccctgattggatttcagaaatttgttgcccgccgggccgtttgtgatcatgagcatcgaaatggaagaacaatttttagaacctaggattgatcgatcgttcaacggtttcttcctgacttcctgacactacagttattcataacacgagcacatatgcatttgatggcacgatcgatatgccaattcttcatgtaaatacaaagtagacttaactgcaaaccaagataacacgcattaatgccgatcgctcgctgcatctcctaactacgtacacctctgctctactggcctcacaacgaacgagttatagcttggttggctaatcaaacaaggctttggtcgatcggttggttggccactgtcactgatcagtgatcgctcactcactcctcgccgaagacggcctcccatacgtcctcgaaggcggcgaggatggccgggtggtgctgcggcgagttgagcgagaggtacgaccccaggagctcctccatctccggcacgctgcagatgcgccgctccacgaccatctccaccatcgagctccggaagtcggcgtacgggttgctcgaccgcttcaccaccgccatgcccgcgccggcggcggtgtcgtcgtccgtgcccagctgcctcttgatcgccgtctcctccttcttcttcatgtcgttgtgctgcttcttcgtcgccgccacggataccaccggccggaaggcgtcggccgggtcgctggtgatcctcgccgacgcgcgccgcgccggcgggcggcgcgccggcgcgttcttgtggcccttcctggcgaggctgctgctgctgttggtgtggtagaactccgaggtggagtcggaggagaagctgagggacgagaagagcgtcctcgtgtcggcctcctcgccgccctcctcgtcggtgctgaacggcgcgagctcgtcgtcggtcaccgtggacgacgaggagctgtactgccccggtgcccccctcgggagccgcgcgcggccccaggaggacgacgggcaatgccgcctggatgtcgacggcgaagagcgcgcctttctcctcgccctgctctgtttcctgccatccttcgtcggcaacgacgacgagtacggcaggaggggcgcgtcggagtggacggagcggcggccggaggtggccccggccccgccggtgcagtcgatggagatgtggaccagcgacgcgctgcgtcggcgtcggcggggacggccgggggcatcaagcttgggcctctggtaggtgcagggggtgcagaagtacggcgagggcggcggcggcggttcttggtgcgtgtcggcattggtcttgtcgaggctgacgaaggccgtggacgaggtggtcgttgtcgtggtggtggtgttggtggtgcaagtagatcgcactaggatctgagccagcctctgcttcagccagccaccggcgcccaagccgtcgaggcggcggtgggggctcttgtccacgaaaggcgtgtgcatcgcggtattctttgggtgtttggaaatgggttgaggaggggagagtggagtttttttttggtttatctcacgtcgcggcttggtttgcgcctccttataagcttctcgggagtgtggtttgcatcgtgtgaaatgtctaatggagattgcatgagacagagaatgcagtaggaagccggtagaaggggagggggtagaagtgtacaaagtgtacatcgaaatttctcggctatgtacgcacgtgtagtgatgcggtggagtggtggggttaggcaagagatgtgataagagaaggttgatttgcacatttgcaatcaggtttcatatattcatgaatatatgacatagagtactaagtaggagtatgtactttttttagataatgaggagtatgtacttgcattacaatggtcaatgggtcaatgctaataacattaaaaggagagtgggtgatacgtggatttaacataaaaagaggattttttttatccagacatttctttttctgcttttctttcacgatttttttttcggagcgcaccattcgttttttttttcttagcgtgcgctacgtgccagggggagaagtgggaaggacagctagggtgatagaaaaagaccgaaccaagagaccgagaccgagaaattcggtcatcaattcggtcatagatagtgaaagatgaaattttattcggtcaattcggttagtctcttcggttaaccaaatagacagaaaagaccgaattatcaaaaaaatgtctaaatgcaacctacaatccactatgtttaataggattaaactctaattttcacgtacctacttcttctaggcatgcaacctaataagagtctttactcataagtacttacgaattttttttgtgatttttgtgttgaaaatttccattatttctttgcatatatggaaatgttgttgaatttcggtcgagaccgagaccgaatttgtcggtcctaacatttttttcgctgaaattcggtcttcactcttttcaaagactgaaaccaaaattttcggttagatcgaatgtccgcccctaaggacaacgacgattgtgcttttatagttgtagatatttgctgctccaccattttgcatgacgggatgatgttagctgtcaaaacaatttatacgaggaaaggcaacaatgtccttttgtttccttgacttggtgttatcctcaatccttcaatcctaaaacctccattccagtctctcgcatgaaaaatatattcctcttcttttttttttttttgcaaaatttgatatatgacacccaaagaacgtgtatcttcttgttgatattgtaaaaatgtggtaattagttactggacacccaccgtattattttattatttccgatggaaacagagagagaaactttcataacagacaagtttgcccacgggccatctgtataattgatgtcattaacttcttagttaacattttataagtcgggcccactcgtcaatctcatatctccttctctattcctcttctccctcggcagcaggtggtggtggagctggttagccgcgatagcggcagagtcgcagagcagtcgcggggagaagagtcgcagagcagtcgcggggagaagaaaaacccgaagccgtcgtcatcgccgccagtgaccccgagctcccaggtgagcagcacctcctcgaccacccctgcggccgctcccctggacagcgcgaggagcagcgccagcagcagcgcgaacgccgccagtagtgactgcgcgaatttggctagtggcgtcgctgaggaggaggctggtggccattgccgcgcgcgggggaggagagtggccgccactagggcctgggggccagttgcagaggaggagctatgacccgcggacggtgaggtcgccccacaggccggtggcgtcgccgaggaggccggcgaccatcgccaccctctgccgcgctcgctcgcagaagaagaaaagagaagaaaagagaggaaaagaaagaaaagaggagaaaagagacatgaactttcaacgctctttctctctctattttcaccggaaataataaaataatgtctcggtgtccagcagctaattaccatatttttacagtgcccacgagaagatatactttttttcacagcaaaggccacaagctttaagtgtcatgtagcaaattttgtctttttttatccggccggtggaaaaaaaagggctccgaccgatttttaataagattgaggaagttctagaacaagtgcaacatcgggccaactccaactagcttagggcctatttggcacagctccagctccaactccacctctcagccaaacaatttcagttccaccaaatatgggagtagagttgggtggagctctatcacaaaatgaactagagttgtgcagctgggtttaagcaaccccacaactctgcttcagacccaactcctgtagctaaatttaggagttgaagctgtaccaaataagtcattagtaaaactgtgctgcaaggagagatgttggcgggctccacttctattataagtgatggcaaatgactaagaacatgtttgtttggaatgtttccttcatcaactttctcgttatccattagcatgttttctcaaccactgaacggtgtatattatgtaaaagttttctatatagaagctcttaaaaaatcaaataaattcattttcaagattatagtatacgttaatgatccatcccagcggcctacaactacagccatacaaccgatttaaactcagcctaaaataccaagtaacattctttttagtgttatatctctaattaagcactttggtgtggtaaaaatgtgaatttcccaaaagaagctacttaagtgaagtactgaatgaaatagaattgtcaaagaaatgtcactggtggagtttgtggatgttactataatgtttttatgaaatttgtcaaactttcaaaaaaaaaataaaacaccaaaacttgttaaaatatggaacagagggagcaggtgacattatgaacttattgaaagtttcctttaggacgtgaggaactgaggactatttcaaagaaggcttccaagtttttattttctttcccaatcctttatatattaagtatcatgtatatatgccctgccatctctattgtccattggtagctgccggactgccgcgttttggccttggccaccggcgtccggatgggattatgggatgcggtgcggaccatgcggtcatgcggatggatgacggatgcacactcgcagtcacaggcagcactgcagtgccgcgcacgtcgttcagagcacaatcacaaaaaccagcaagaatgtggcgggcccgacgacgccccgtacgtgccaggcggctggtcgaggcagtcgaacatgctggctgccggccgcgctggtggtggtagcgagcgccgagcgcgcccgccgcccgtgtaggtgtcgggtggctgtgcctgtgcgtgactcgctcccgttgacctctctgcgcgcgccggccggacggaccagcggtcggagccgcgcgtcgcggaagtggaggagaataagatgtcctcatgcgcggcagccgcgggcacgcggggttcggtggttcggtcggtggctctcgcgatcgtccccgtgatccggcgcgtgcatggtggtcgtcgtacgtaccggttcatcaccacgcgcaagcagagcgtgatctggcccacctcgcgccgcgccacggccacttgccgcatattccgccctggtacagcgatggatcatatatatcccagccatttcgctcatctctctcttaaaatgatagagaattcattgtggcatttgtttcatagaaactataggagtactatacaaagttgtaggttgaaatcggacgaactacaaaaacaatttaattaaaacaagaaaaaattttgaaacactagtctaaagagagtcgtaacgaacctccatctacgcggaactatagtggcttaagttacatgtcgtttttgttttcctcaatctataaaacagaaactccgaaatcagcgggtaataattgtgccgattgaatttcactatattgtatgatccttcttttctagtctattgctgctactgactctacaacgggttttacctagcactagggtttggtaaattttatttgagaattcaaaatttccaaaaaagaaaagaggataaacatttagaaaatttgatgtaagtagtatttaaattgtagtgttatctagtgaaaaaatttcgtgaaaaaaggaagttaacatcatatttttgagccaaagtgataattcaaaaatgacaaagaacaaacgagatttttaattgcttgaatgttaaaaataaagcaaaagtcataccgagttttcctatgttacattaatatatggcatttctacatgttctaaatgtcccctacatacttttgtaattatcctgaatttccccttaattttttactgcttttcattttttttctttcattttgttttcttacaaacagttagcggtaaccgcgtcttatactgtacagttcccaatagccgtcgaaaaagttgaattctcaagccgtgaagaacgattgtgaaggcattacaaatttacaatacataggattaggagtacgttgatcgggtttaatataatttacgagatacccctacttcgtcgctaatgtctggacttgctcggtatcacgactcacgaggcatcttaaggtgcaggataagcatacacatttcacggcttattctctctgattgatgttccactgaggccgagaagacattctgacctcaatgtgcaatgtttcaacagagtagacggcaccaaacacaaacaaacattctgccttctagccagctatatatattcagtactactccctcacttcgatttcaaaccaaagtacgggtttaactaataatcagtacaaaaccaacggcctaatttcgctctcacctaggtgatccttccaccacaaagtttgtaaccacatgattaggatgtagcggaatgtttcatcctcccaatgcagtaggaggcagcctaattacagcatcgtcagtgtacgcgtcctcctctaccgtaacacgacgaaaggttaggcatgtacagatctactgcaaattaaagcaaccatatgcatataatctcatacacgtacaaggctaagtccaaggtggagaaattaaagatcaggtaacgaaagaacagttaaaggctgcacggtccttgaatcttgaccccgtggactgaagtacaatgaaaaagaaaccaaaaggtcttcgtagatttcaaatgcctttggacttgatgtgtgtaatggccaagaacaaagggacaggtgatgcaaaacaagcgttgtgttttgcagcgtaagcttgctgtgccagttacaggagaaatggtattaacttattatgagtactatggtaggtaaggggatgaagggatagtggctaattatgtagtactacgctggagtggtgatcagtcttggaaaaggctctaacacagcgattatattatgaaagagaagggagagggttttgttcctttctcacttgtcttgttatgtcacaggctgaacttaggtgcagtggtgcatgctagagatgctcctcctggagtctctcatctctgcatcaacctactcatgcatctcctaaattccaacttgccatcacgttgtgtttagcttctgacattggcatgtgaacaaagataagagcgatctggctgacatgattgcgagcagtcgtaaaacgcaccttcttaatttgagctttgattgtataaacgcccagaggccctcttccgtacttctgctccatgtataccacgttggaattcacaacttgtcttctaaaaatctctgttatctgacacgcatatctagctacgtcattggtcagtgacatacttctaccaccataccatagcaaatcaggggtcagtactgctgactaccttcttcacctgagccaaagtgccccttgacgtcttgatcatcaatcggagctagagtagtgtcacgcagagatatctctgcgattccggcaggtgtaccatgcacgtggaaacacaactgaacggggccaatgtacgcgctggctgtggtcacacacaaacacaaggggagagctactccagtagactgtgtcgcgtaacggatccggtgcagatggggggctaccaattccggcctagctaccactgttctggtgccgatccagatgagcatgcaggcgcatgataggtgagtcactgctcaaacgaatccgagcgacaaaaagaaggttatccatatacggcgcacgtctgtacggccgagggtgagtcttggaaaggttcaacgaacgaacaatccgaacagtcgtacgtgccttctggccgggccttggctagtcatccacctttgtgcttgccgctttgtggttgccgtcatccaccttcacggtgcctccaccgtggagagctgatgatcgagtaagatgatgttcatttctatactaatggcactgcaatggacaatcctagctatcggtgatactactatacactgattgcctctcggtaattcaaatattgctaaatggcaaaatggacagatctcttgcttttgtgatcagatagacgaaggagctcctgttcggaatgaggaatttcacaattaagaagattcatagggatcaaaatagagttagtcatgaattaacaagtattgcttgaacccagaagatgtcaaacttctagctggatcatgattgtaccctcaccaaacagatgatcattcaggatcagtctgagattcatgattaatgaaatccccttttccccgtaaaactaatataaagttagaacatacaaaataaaaaaccattatcgtgtaattaattaaatttgaattactacaaacttttaaaaatggatctatctaatattttaaaatagcttttatatatatataaaactttcacacaaaatactttggtttagcagtttaaaaaacgtgttatcgaacacgaggtgaaatcataaaagaacgggcctaagggattgtttggttaccagccaaactttgtcatagtttgccatacctaaggttaagcaagtttgatcacattggcaactgtagttgtgacaaaattctctttcaataaattgggtctcacacatcattggctcaaaaagtgttggcaaagatttccttaaacttggaatttgatctttaagatgtagctaagaatttgatcatctcaacttagataagtataacaatatttgttgataaagagttgtagagtatagccgagaatgcgagaaccaaacacaacctaaaaccacgttatagactgtacgagacgctctcccccttccgagaccactcctgagtcctgacctgagcagtgacttgctttaccgtgaataatgtcctcgattgggggcctttggatgctgacgcagtttacgacccttttcttctcttctgctgcggcatatgtaggcgtggatctgcgtcgagcagtagcactgtagcaagcaacagcagcggatgactgacagtcgctgcaaggcggtacgcctgcctgaagtcccatgggtgcccggcaacgtgggttgctgaacttctcatgatgcgcggctcccgcggtccggccgctgcaaagacgccagccagtcagtcaggcacacagacgcacagttcaccgttcgcttccaaatccaactggagtatcacttgccactggtttgagtataattgagtataatcaatggatggaaaggaatagatggatgcatttgagagcctacgagatttgccagattgatagacgcatgtgatctcgcaaggccctgcatgcttaccgggcgcaattaatgaacgctaacaaaaccctggttctgaaatcaacgtctccgccgctgagtgcacggccatatacacgcgacttgtaggatccaggtcccagctgtagagatcgcgtcgttggctcagaaacatcctgtcatcttcctatactacaatagccataaatagcgacatccaaacatgtactaattgcaatactagtcgtatatgagacaatctatgtcgattggtgatcaagtgtcaatatagctgaaatcgtcatgatgtttcggttatggatggatgcgaatataattaatggcactaacaaatgatcaatcatggcagtagctaaaaaggtttctcacagcaatagccatcacatgtagtcatgtactaatgttactaccagacattctaaaagctactagttaggatacttgggagaagaatgatcaatacctcttgaataaacaggggaggcatggttaatgacaatgatccatattggtcccctgtcctgtctgctagtttgtcctgagaaacaccacaaaagagttccatgagtcttgctccaaatgttgccaaataagtaagaaaaaaattgaaaattgtagcatgatgaacaatagaaggctttgttccattcagcatggacgtaaccaaaacttacagcagtatgacacagggagatcacgcaaactggtagcaagcaagtgggctaaccagacataaagcacaatttacgagtaacacagaataccagacatgattatgccaatacaatatcagaaagattcggacgaaaaggaagaaaagacagacacccattggaaaaactttcacgtgtccacaatcaagcactaacactgcagtagtgtgtgcgatgtaactgggcagatcagatcctgacccattccacttatcagatactagttcagtcccccacaaaattggtggttcacttgtgtacaatggtaatagtaagcacaagaagttgggagtgggacatgtcaatgagttggcatcacccaacacacttccatccccagatgggcatatagaaaagagaagacctatggagctactgtgatttactataccaggaagcactctctttcagtctactatgtatggtgatttaggtagggtaagataagccttcacagtttcactgtgatctgccccaacacacttgaagaagataagaactgtgcaaaacaggaaggaagcaggaaagacgaccgagaaagtgaggcagtcagctacatcaaatttcttgctattgcagggcatctatgcggaaagtgggaactttccattatcacgattcacgaatgaagcaagctccagtgaaaataaacagtgattggtcaaacagaagactgataataaattttacagtacatatgctatttatttcaactacagtttacagaagggcctcccaactgttctttttcaactaaatggacatgccatcgttctgcaaattagaatatttgtcatttattagagagtgtgcttgtcatgcaaattaatccattcggcacaactgtacgttgtgagaataaaagaaacaaaacagcattctcaggcatgatctcactctagcagttcatgctggtaagaaattttgtcttcatcaacacatatggaaaatgcaatgttcttgatatataactattgtctgcattctttctattaccagaagatggcagcagaattttaaccttgaagtttaagcaggatgatctttttaagaaaaaggggtcagctgccaggccattatactattcctgatccatatccgctacctaattgtttcttcaaaccaaacttagaagccatattaaaattctcaacaagctaaccagtcaatacaagtatgtcttccattggtaattgcagtatctgctcagctaaccacaatgcttgacggaccaatgttttaaagacatttgcagactcagatactgtaaactataaaagttgcctttgcatgtaatattaggcttaaaagctggagcctaattagtaattaactttcctgatccagcctccaccctggagagaacgaatttacattacaatccattcatcacaagtattattcattatgttcaaattccgctaactggacttatcatcatatagaagtcaggaaaacaaggagaaggtcaagaaaacatacatgaattcttaacactgcaagcttataaaagattcagaatctatattgccaggagtactttactccctctgatctcaaaaccaagttgttttggactttccatggtcaaatatatacaacttcgactacctagttctttagcacatattaaaaaaaaggttacacaagtgtaatattatgaaagctcttgttataacaaacttgaatatcatttttatatacccaaaatctatactttgaatgatttttatggtcaaaattaacttgtgtgactgcacgcattcttaaataacttgtttttgagaccagagggagtactagctacttaggacctataaacttttgagaattgaaatgctttgagaaaaataatatgctgctactgcagcagcttctaagaattccttagcttattgaaaatgactaatgagtacttattctgctgtagattcacttattgagtggtcttgataaacacatatacaaattcttcactcattcctgtactgccaatagcatcttccctagtgaagtcaatagcattttaagtgagatactaacacatcattctaaattttattttccatacaaactagctggaaattaaccaacaccccaaatgtacagaggtgataacaatacaaaaaaaccaacatctgaattgacatttctttaaaaaaattagaacggtcctctagatagtagaatttaggcactaagacaaacttggaaataacaaatttggttgtaaagtaggtcatgcgtgtcctatagacacatgctaagatggaacgatacaacgcggattagagaagagaataggagtgaatacagataagtatcacattaaaactttgctatcttccaaaaccatgaactcactagcaaattaatttgtattagcaccattcagtacccttgttgcatatagtctagaactctagattagtactttattttgacacagtcgtaaattactggctatgaccatctgctttgtaagcatagaagaatcaccttattttattttcttgtggtaatataaacaagattttgttcctgtaagccaaacatagcaagaaatcagggaaaattgttggttttgcgtaggtattttgctagtcttggaaaaatgagactgttgttcaaccaggtgtatgggcggttttgcactgctatgagactgcactagacattactatgatgctcacatttaaggcaattcaaaaccaatgatggtatgtctcacaacgttcatgtattccacccagggcccagttaaaggcaaattttgccgatgattgtttgcttatgcatcgctacataatacatgaccaaaccatgaattggaagatttgatgcactgatactccatgaagagacatccatttggcaattggcatcactcaacagtaaaaagatgacggaggaaatagcaccatctaaaaatgtcactcgagaagccgtgcaatagatagaaccagtaatgacgatatgcaatatcaaattttcaattttcactgtaagacatgaattagagatcatgtagagcaaccgaccattgcaatcgcagaacagtccaataataacagtaatgagttcaccaacacagttccatcggtcgctccccaatcagcgagaagatacggcagtaaactagaaccattcactgtatcagactggttcctgaggaaggggttagttaccgagcacgaagaaagcgacaaagaaaacgtacgaaggcgcggttagccggagaggtctcttcgtcgtatccattgcgagaagctgcgccgcatccacctccggcggactggcggcgcgccgcccttcccgtccatcgccataggcggcggcggcggcggctaagtgggttttttcgcgttccgcgcggagaagaaaagctgaagagccgtttccccgtctcttcttcattacagcgacaccaacgttgatttccgctaacgacacaggaaggcgtattctggataatgggcccacttgtcagcctcccgtgaaccagatccaggttcccaccaaacagaaaaacagaagctccaccactgcatcgtagtcgtcttcttcacgcgcacggcgcacccagatccaagcgtccatcgccgcggccgcatccgccatggctccgacggcgcccacggcggcgaagtccgcctccccgtcccagccatccgggtgcgccaccctcctgctccttcactcctgacggcatctctttcatccccaacctgaaccctaaactgaccaattttggggggacttgtgagttgaggtgtgcaggaagagcgaggtggcggatctgaagcagcagctgcggcagctggcggggagccgcgcgcccgacgccgacgaccagcggagggacgtcttcaagcgggtgatctcctgcatgacggccggcatcgacgtgtcggcggcgttcggggagatggtgctctgctccgccacctccgacgtcgtgctgaagaagatgtgctacctctacgtcggcgtccacgcgcgcaaccacccggacctcgcgctcctcaccatcaacttcctccagcgcgactgccacgaccaggaccccaccatacgcggcctggcactccgcagcctctgctccctccgcgttcccaacctcgtcgagtaccttgtctcgccgctcgccactgggctcaaggaccccagtgcttacgtccggatgatcgctgctgttggtgctgcgaagctgtatcacatatctgccaccgcctgccttgatgctgacttgcctgcggcgctcaaagcgcttatgctctctgatcctgatgcacaggtgagttgccattccacaaacaatgttgtgattatcatgcaactatgatgctgctacctgttgcaatgattcattatctgtagattatagtgctcacaataccgtttaattaccaccgaaaagtctatgacatctgtagtgctgatttaaagttggaactggtagacaatcagtaaggatttaatacttcttgcatgccaatgtgagctgtaacttgaaatttggttcagcatgcagccggccaatcgttttctactttgcagtttgtctaatagaacaggtggagggaaatgcctaatgaagctgcatgctagtgatattaatcttcattgataatagtttgattttgatctgattgatcatataggttgttggtaattacttggaccgacatattttgtgatggaaagtatagtgacttaacattgctgaagtagcttgaagccttgaagtgaaaccacaatgctagtcaagacaaaactactgaacctagatacaccctattcttttaaggttacataatggaagaaatcaactctgaaccaatctgatcatgcatctatgtgggtttgatttctgggaaggatttggaggctattaggtgaattcatatatttttgctcaaaacattcttgttttggcttaggcttttaagatttcagccacaagttgaagggtagagtcataattttcttctggttattagttctatcatgatttttggcttttaaaagtccctgtggtaaagctgtctgttacttaaggcttagaatttttggtttataagccagcgaattagctgaagcaagcagggctcaacatatgaatgtggttctgggaaaatagataccatggtactcaaatataaccttgcaagaataagagtctgaacacaggtaaaaatggtactgagaggatagataccttggctgcctttattggttctgtttctaactcgctatccccattttctaccgctcttgtccatttttcattgttgcatgctgttgccaccttgagagtccctgcctcaccatgccgccacacctttgaagtgtacttttgatattctgtttgtctgctacattttacatgcgtatgatttataaattttggaacaattgtttcagtatttgccaacataaattcctacaatactattgatgtatatttctattatgtgcttaacatttctggaatgttcatgcataatatccacatgtattcatgaccatattcatattaaatctatctgcatgtaatttgtatttgatattatacgaatccatatcccaaactgaaagaaacattatataggatgtgaaaaacccatacatggccacattttacaagattgcagccctacattcagtattgttcctgactgcctgtataagatgctattcttctatacaccttttgaataaagttacacaactcttaatattattcagatgtgtacaacttaagaaattggtcacacactttaagtctcaaatgattgtaccttgtgagagtagtgtcagtcgtctcagccgtatgctgttttatatctaacaaatactccgcctttccactccaaatgcacgattggctatggattttctcacatgaacatataggagaaatactaaacactgcaatttgtttttggaacaacacaggagagctgcatgttatttcattaaggaggaaaaaacaaagtacacatggtcaagaaggaaatcctgacctgaatatacatattcacacacactaaacactgcagtttgtgcaattattctagattcaacagcattttgcttgtacccttgggttcttgttttctcacaatgccttcaacagtataatacaacataataggtttacatagtgttcactagccaaactagatagggtacttcagagatagtatttaccaagaattatattgcagttttttagttatatttaatgtttaaagacatctcaattttgccatttatgatttatcactagaacatattgtaattctttttgttccacgagtaatattggtgttctacccaaagtaattgaaaccacagtaggtgttgaactgcccaggtgtttggcttgctagtttgctggccacagctggttcactatttaaatcggtcattggtggtcaagtgagtggtaaactcatgttatatataatactaataggagagtagccaggagcccaggacaataagccatggttggcaacttccacagctcctaggtggtcggacctcttggtatactagcatatttgtccatgcattatctcaattctcaaaaaagaaaaagaaagaaaaacatgaattcaatcattacacaaataaaaataatttacctcatgtctaaataaaaataatttacctcatgcctaattcacattagatcaacatcaactccaccaccaattccttgcttcctatataactagtaaagacgcacacagtggacttgaaatctgaaggatttgttgctaagacctgctggatagaacggccagatgtttttatgtttatctagtgtcgatcacttattttcacagggcatttttgaccaactttaaaagaatgttaatgagaaaaccgagaaattgaccagttccacttttcttgatgtttacaatagaagctatccacagagtacttgatttgacttcactgagtttaccgactactccctccatcccaaaaaaagccaacttctgggtatgtatctagacataccctatgact

SEQ ID NO: 9942 - DNA, 31261 bp, Oryza sativa
  unsure (1)..(31261): unsure at all n locations
ccgccgtagttgccgcacccatgcttccccccgaccacgatgccgccacctccgccatggcgtcctccgaggcccccgcgccgcaggagcagaggaggagggtaagtcgtcggacgcgtagtcggcggcggggggccggcgtcgagctcctgtccgcgtgctgctgcgactcggcaacaaccggctcgccgacctccttttccccctcccgccggcacagccggccattgtggtatcctcctcctcctcctccgcggcggcggcagggggcggcatcgagctcccgtccatgtgcggctgtgacttggcgacaaccggcttgctggcctcctcttccctcctcccgccagcacagccggctgccgtgatgtcctcctcctcttccgtggcggcggcggaggcctcctccgctgtgacaaccacaggttgagataagaagcaaggagagaagagagaagaaagaaagaacgaaaaaaataatagatgtggggctcacgtcattttctcttacacgtgggtctcacatattttatttttattttttctgactaggatgtcacatcagtgaaaccggacatctatacttctacggaatttaaattacatgcctttatatagtttaggagtgaatttaaagtcgaggaccggtaggtgaatttattccaaaatattggcctacctgttgttttcaaggtttcgacgaaacggaggcccagaaacggcccagtgtactggcccaggacaagccgaagacggacgcacgcagcaggcacaagtgcagaacggcgaaagttcactagcccgaccaactgataagagctgccgttttttcatggcagcatcacaggcctgttgatccatgcatatactgtactacgcagtagtgctcatcgaataaagacggagtttttaggtttgatctattgcccggtctacggaagtgaaaagagtactggtacaaatacaagtgggtttctcttttattgttttctggcatgatcgtgcattcgtgcgtgctcacactgtcacacatcagctatatattctcctcgaaaggcaggcatcggctatattctcgaattatcaaattctaagacccacacttgttctctaaactaacaataaacactacgaggtcttatgcttattaactgctagtcctagttggttgttttagccgagataatgagatttagagagagagagagagagggagagagagagagagagagagagagagagagtataaaaggtgtggcgtgtacacgaccgattccttttcgcttcgagggtaggcagctagcagcacatggccggcaaaacagttttgcagcaggagagattcatccgttcaattcgctgcaccctctcattacctttctgaaactttttcttaagtccagatgatgacggtaatgacgtgtggattccctgaaaagagggaggggtacatgatgatgatgatgatgatgggcaataggaatacgagttgctatctcacaagcgaactcgtcgccgcgagcaacggccgatcgagcagggcaaggcatgcggagggagtggaggagaggacccttggcaagctcgatcgggcgcttcttccgctccaaaatccacgaggttcaggccgtccggcaacagggatggctcctccgttcgttattcccctcctgcaagggccgcatctaattgatctgaccaacttgcaaggatagtcattagtcattgattactcgttaggtgctcaggtatctgtatatatttcggcttcgttgcaaagagacagctgacagccgtcggcccaagagcccacactttgagtggcgatataaagcaaatatttcagggtgggaattgtcctgattcatgtgagattgcatttcgttttgtttatgtgaaaaacctgaaatatacttgtgaatagtactttaaatctaatagattgtgcccccctttttttaatatgcagattttacctaggtttccgttagtatatatgtttttcaaactgctaaacggtacacttttacaaaatctttttatatagaagttgatttaaaatataaaatattttttaaagtttgtaacaattaaaacttaattaattatacgctaatgtcttctcgttttatatgcgctaactttgacatctatctcagtagtccaatatttatgttgagaaatttcttacatcctcccgaattttcgctcgatccttccattccatgcctatgaactttagcttatcccctacatatttttcattttgattccctgttgtgataattatatatcaaaacctttgtttttatgaaatttaatctttgaaaaatatataatgggaataggtggggtgaaagatttactgtcaccactatcttttttcaaaatagtatagatattaggttagaatatgcaatgctgatctaacctattaagacgaatttctgttctataatctcaggggagggtgactggattagcaaccctgaaacactagccacctttgatgctctgtgcctctggctaaaggggggcagagactaggttgaccctttttactcattagtaacatgtattaatgttatagggtatgtttggttctctactttgctaaatctttggtgccaaaatttagtaagttttaactctaccaatttttttggtagggtaaagttatgatacatatatttggattgttaccaatgtgaagccaaaatttgatgatatagtgaagaaagttttagaataatgctaaactgttcaaaggcattgccaacaatttggttttgatacaaaacattcactagtactatccaaactaccaatgaattggtccgacacatttggcatcaatccgaaataacccatattgcttattacggagtagtgaacctccttattttaatgcgtgattttttagatatgtttgataattagtcttatttttttaaaaaaaatgcaatagttgttatatattaaaaacggagatagtactggtcaatctttagctttagctgcgcattgcaaaatcctaacaaacaagcacgagcagaacggcaggacgacgtaccactccaaccttatctctactttatactgttataaaattgaaaatgtttttaccagtactttggtacatcgtccgtgcatgagtcagtttttaagtttgttcgcttttggaaatacaaatatgtatttgagtcggtttttaagttcgttcgcttttgaaaatacagaaggaatcatataagaaatatttttaaaaaactcacatgctaacatgagacaactggactcctaattgtagctcataattttctaaaaaatatatatatccaaacaagttctcatagtagattttatcttaactaaaacgtataataacaataataaaattaaaataacattcttccgtagcaatgcatgggtattttttttatattagtaaaggatgatggcagtgaaagtacttaaacacattcacgtgttggccatcaacgagaaaaaaaaagcaccccaaaccacaaacataaccactgtagcacgtagtggcgaccggccgaccagccggtagcggagataacgtcaaaccgcgcgctccgtgtcatcgctcaccgaaacctaaacacccacgccctctcttatccaaatcaatcgcactcaccaagcccgcaccaccacgtacacgagacatcgctagcattgcactccccgtgcgccgcgcccgcgcacgtatcgctcctgcagcgatcgaaatcccccccgtgaatccgtgatccgcagccaccacgcgcgcggcgcccggcgcccggcaacggcaagcaggtcagcagcaggggccgcgcgcgcggccgggcgctgcgatcctgtcgggtcgttttcgcggccaaaagcggcgcactccaccgtcgctttggcacgtaccggcgcgccggttggccggggctcggcggccccacgccataaactacgaggcatctggagatatgatgcatatggccaagatctcgtgctgacaacatatatacgtgctcgatcgtaccacgggggggatctcgctctctctgccctttgacatttgcacaaagtcagtgagatgaaaaggggaggacaatggacacgggagggaataatagccggcgcctgatggctctagcagtcaaggtgcaggcaataataggggcggtagtattaaaaaaaaagggccaagtgtaaaagtttaattccccccacactcgcgtcttttatggcgcgagaggcgagagagagctcgaagattccagcccttttggttctcctctctctctctctctcccttttgacatttggacaagtcaaagaaaacaatacgggagcctatcgccctagcctagcaagcaaaagaggcgaggcgacgacgatcgatggggtccctcttgacaagtgtacatagcaacaactgatagaagaatccctttccaaacaccagcaagctgctgtcccatttggcgactagtttatcaccaattacgacttgtttatcgccaattatcggcatatctcttttttcctaatcgcttgctcccgccgtgcccaccactagtagcgtggcgtttgactctactcccgctagtcgctagctaagccagtggtactagtagctagctagtgacacttcagaatcctctcggaatacgcgtctatgtacagggatacgcgtgtatatatggcgcggcccggccaaaagtcaaccccccgcctccggcgcgagctcgcagcagcacgcgtccttttagctgctagctcacctcgtcaaactctcgcctctccccccacaacgcgagagcttgccgacgtcggcgttcatgcgcggcccgctgctgctgcgcgccgtcgtcgtcgtcgccatggagcacttcaacgactgggacctgcaggccgtcgtgcggagctgcagcttcccgcaatcggagcctcctcgcgtcggcgtcggcgtccccgcggcgccgggagcgggcggggctccggtggtggtggcgccgcccgcgcgcgcaccggatggtccggatcagatggcgcgggcgtcggcgtcggcgctgtacgacctcgagtacctggatttggatcataagccgttcttgctgcccgggtcgtcgtcttcgtcgtcgtcgtcccgagcggtggcgcgggcgcgaggggaggatgacggcaaaggcagacacgaggtgatgatctctttccccgcggcggcggcggcctccacgtccggtgcgcagccgcggtcgccgtccggtcggaagccgggcatacgcaccccgcggcctaagagaaggtagtacacactactagtttgcaaccgttttacgtaccagcgcattggcagcctgatcgctccaagaaaattctcagcttatttcgaagtgatcgattattgtgatttccatggtgtgaggagcagcaagaagagccagctgaagaaggtggtgtacgaggtgccggtggcggacggcggcgtctcctccgacctgtgggcgtggcgcaagtacggccaaaagcccatcaagggctcgccttatccacggtaactaattattaccaacactttctttgaccctgccgtcccctttccacgcgtcactactcactagctactcctgcatatcaccataatcatagcgttgggaaacctaaaattgaaggaaatgagcacataaatttgatatttttattacataatggcatataaataacctgctgcacattgagatcttgagattatggccacaacaatcgaatgcaatgccttgcgtttccaattggacatcatggctttggtcacgctccacgtgacatgtacttccggtgtagtacaaggcaattccctgtacttagcagtacaatcggctgtaagcatgtatactttgcagttgacctaatgacctgtgcgctcggctcaactaacttggcgatacgatggttcgttgggtggttgtgatggatacaggggatactacaagtgcagcagcatgaaggggtgcatggccaggaagatggtggagcgcagcccggccaagcccgggatgctcgtcgtcacctacatggccgagcactgccaccccgtgccgacccagctcaacgcgctcgccggcaccacccgccacaagtccgcccctaccggcgacgacgacaagccgacgtcgccgggccctgcagccggcagagcggccgccggcgagggagtggtcaagtgcgaggacgtcgacggcaacgagctgtcggcgatggccgcggatggcggcgcagaggacacggcggcggcggcggatgacgacggtgagttgtggccggaggggatggggctggagctggacgagttcttgggtcccatggatgacgacgtgttcgagttcgaccatgtcttggaggacgacggcgtgctggggcgacggctctcgctatagctgcaagagaaaagctgtactagctagctttgacgagccttttaggacagttgactgtcagctccaacctcttcaggagatccaagccatgtataggcggtttttattcgtgcgtgtttgtggcatgatctctctcaagtcaaggttccaagtttcaagtttgcacaagtgtatatacttgtaatattcgcagggatgtcagtgcgcattgacacttttgcattcctgtacataattctcgtggttggtgactttgtcccaacacgtggaccgggctcaaagggaagtgacagcttcagtgcagtttgcctgcttgccagattgctattgtaacatccaagggacagtgcagataagagcatccccagcggctcctctatccagacatcgatactgtgtttggtgtatggaggtgaaaaattgcactccagcagaatctccatcacacacgccatttttataggtcctccaaaccggggagtggattttaatccctcaaggggatatcccctcgtatacctttttctttcaaattcgatgcaaatagttgtgaaaaattctgaaaaaaattgacaatgtagagtataatgatacctactagtccaccaaaatttatgttcaaattcgatctacacatcgagaaacaaaaaagacaaatttagatataaacagtgcactactattcatacgctgaatttgtcttttttatatctcgacgtgtgagttgagtttggacttaagattttgtgaagttgtatatatgtgttgtatgaatattgtcaaatttttccagaatttttcataaccgtttagatggtttttgagcaaacgaggaaacatcccctcgagggattagaatagtttccctccaaaccgagcctttcacaagccaaaaatggcggttctctctcctcatgccatcctcaactgccgacctcgcgccactatatggactgcataccgtgggagagaggagctgcataccggatttggaggtggagatcgccggagtagaggtggagaggcagcggatctggcagtgaggtcgccgccgtccccgccgctcggggtctctgccgctcctctgaccccgccgcccctctgccccgccgctcctccgccgccccttcgcagagactgggtggtggtggtggcggcgggccatcggcgggaggaggagggagatggacccaccgggaggaggagggagatggacccgccggccgtcccttgcgccgctcctccgccccttcgccccttgcgccacccgcatcgctcctccgaccgcgccgcccctttgcccagccgctcctccgactgcgccgcccctccggttggccctcatcctccccgtcctctcggcgctggtggtagagaagaaagaaaggtggggagatcggcggtagagaagacatacagatggggagtttttttttagagtagtgataagtatgtggtagttgtaaaatattagtaaaatataggatgttggtatatagaggatgtaatatagatgatctgttagagtgaaaagtaatatggagtaggtatcttttttatgactatctaaatgggagtatggaggataaaatttagatgagctgctggggatgctctaagcttcctcctaccgaacattatatttgaagttttgaatggcacaacaccgcaatatccactagtaatatatgttactataaaagaaggattcgattaaaaaaatacagaaacttcttgatctcttatttctgaacaaaatcaaatgaattcaatgtatctttgcactctaaacatcggaacaaatgtttgcaaagcaaaagacgtataaattgcacaccttacaagtctgcaagaattgcagtaaagaatatatactccaaaattatcaagtggattcattactcgtcaccatttctcatgaagcatttactatctctgttctaaaatataaaagattttgtccatgcacttacatagatatgacatatctattatatttttagaacgaagatagtagacattaagctattatcttctttgtgcttcgctagttgccatctactgatccacgtctacaaatatccgatgatatcaacaaatacattaaacgagcacatcttttttgaatcagttgcatacatacaaggggaatgcacgggtctccaaccaccagtgctgcaggatcggagagagaacaggggagagggaaatatggctagcggagcatagattattaaaggggaacaatcgaggaaagagtactgaagaacctgcatgctgtacgtaagatacattaggtgcttgtttctaattttttcttcaaacttttaactttttcatcacattaaaactttcctacacacataaatttctaacttttttcttcaaacttccaattttagcgtgaaactaaaccaattttggcgtgaaactaaacacagcctagcctgcggaattgattatttttcgatggaaactgagcaattatttttcgatcgaaactcaaacaattattctaacactcattggttgcatatatttgtgttaagttattttatttttgttgtatgcatatgtacgttttttaatctaagtctttgtctatgttacaataagatgagtttttttttatattggacataaaaaaaatactctagactttcagatgggagagtaaacagatagtcaacaaactaactgtgagcattgtagaggctacaattaagacgaacatcgcatttcagggatgataggagatacagcactactttgcaatattagtaaaacgacagagcattctgcacttcggagcaaagattcagataacgtattcttgtgtccagatgtatcttccaaaactaggataaagtcttagacaagctagcctgtcacacagagagcttacaatatggaaacgcaacgaagagcatcacacaaaatccaacttgacaatgatgcgcgaaatctccagccaagtgatgactcacgacgataacgaatttacagcatgcacgaaccgagatcttagtactcccatttcttaagctccatcccatcaggtgggcttccctctaccttcttcgagccaacatctttccaattggtcgacagaacagtaccgttagattcaacctgcaaacaagcacatcgttgatgtataagtatacaaagttcaaacttactaaacgcacttctgtcagcaaggtcactagttataaacatttcatcaattgtgctaaagaaagacatacaaaagatttcatcattgctcgtcgcatgtcttcatcagcatcactgtagatgtcacggaaaaatttgttcaatgcagcatcgccttcaagcttctcctccttctcctgttggaaattcaaagtcatggcaattcaataattaccagagttcaaggaatgtccacaggcagtgaaacgttgaaccatgtgcatcatactaacctcctttttaacttcagcttccagtttatcccagtctttcttggattttgaggaaggatatgatggcctctgggccgattcagctgataaaagaagggctatcagtaaaactgtaggagagatggggaaagaataacaattgaaccccaaaaaaaagccagacttgatcttggttgtattccagtcatgtacagttcatgcttaagccgatctggcagtaaaccatcagcctcaacaaggtattagcaagataacactcagaaccctcttccattttcatttaaattcgattaccaattttttgtgacattaatgtgttcaacaagcacaggaaccagcaaaatggaaatgactagcctgacatgtgagccagcgatcagcaagtgcatagaacggcagaccttattgataactaccacatgaatggaaaagaagtcatttctttccatggctataaatcagctcaccagttactaacataaagcagtaaataattatacccagcaaagtacagatatttaaggggaacctcttataataagattgaacagtgcaactttcaactaaccacaagaagcaacacaatagtaggttcaacagttttctggaaatcaactgcaatagttttgcttagtttgttacctgagggattatcttttgtggaacagcctttggttttttatcataatcaagtgaggtccatgtaatctgttcagctttagccagtcttatttcaaccttcgtggatagcacttggtatctgcttttctcagggatgatctgatagtcaagagattagcaaaagttaagaggtgagatgattggtactgtgcatagaaatcataataaacagatgctgagtattggttttcaaaaagaactgtatgtatggatcaacagcaatgcaaccaaagaaaataggcaaagcagtacacccagctttattaggtttggaagcatatttcaggtaaataccttacaaattagaggaaatgcacaaacatattcaggtcataacaatatgcactgtttccatttccaatgcattaagaagagaaataatcctggtattgcagggattgcataccttagaaaacagacgaggctgaaaatggtacggctcctctccagggacttcaatcgacacacttaactaaaatggaaggcttaattagtgagcacagtaaattagtaaatatagatgatttgcaacaatttattgttaaggtacacaccatttgttcaccaaaatcaacaacaacattctcagcaggaacaccctttgcaaaaattgtcaatacaacttctgtagcactgttgtagaagtcgtgcctgcaacaccaggtgcatttccagaaaatgtcagtaccaaatcattggggttaaaatccagccctaagaagcacttggtttagtgtctgagaaagggtgtgggacattatcccatatattcatgtggattctgtcaagtggtttccaaaatataaagtggacccctcaattcagaataacttgatacttgactaaagaactgtattgggaaaagaagcacagtgttaaaggattcatgaactggttacctgtattttggcttcacttctaccattggtggtgtattatccatgtttgcagcatcatccttttcctcaacaaaagaagcaacagagggggcagctgctccatcttcagccttcttaacagggacttcactaagctcctctgaaaagaaaatgcacagcatcaaagtatgagaaagatgtctcgtgcatacatttcacttcaacttacaggactgctgtggatattcatcccagaggacaaatatgtgtgaaaatgcatactataatatggtagtctcacgtaatggtatgccccaggtaaaaatataacacaatactgcaaatgtattaaccaagcaatggactcaaagggacagcttaccagcaatgcgctcatcacactccttcattaggcgagtaaaccttgagtcaccagatgcgaacgagtaacccaattcaagagctgcttttgcagtttgatactcctccagtcgtatacatgcagcgctaaagatcatttgcttatcagccatcataataaattaatgtgcctagtcttttttcataacattaaataatttagtcaagactgaccctttacgaagataagccttgtgcattgatgggtcaagttcaatggccttgttagcatcagctacagcctctgcaagacaaagtgcaatttgttgctttaatatgaaacagcatgataatgtctttgcaaacaaaacaaaataaacatgcagctaagtcattttagcaccagcacccttatactgaggtattttaagatatagcagtgctgataatttagggctacaggctacaaaacaacttacagctattactgataaggatgattaatgccttgtttggcaataaaattttgcaacatttcggacagaattgtcaaagatatgtgcaacctgacaaatttttacaaagatcagaaccaaggggaatgatcaaacactagtccaacctgacttttttttacaaagatcagaaccaaggggttttctgctggcaagcagcaagttgtcgccagatatcattttagcaccagcactcttatactaattcaatactatgataacagacagaaaacagtaatcagcaaacatgcaggagtatagcatttccttgagttggcaaatttagctgggaattctcagtaagtaatagctgaacaataacaacaggtagacccatcaaaatctgccacggctaactattgctctaaaataagagtagacctactctcctacatagctagctaaacagtcaagcacacatatctttataaatttcttgttttatcttactttgtaaatcaaaaggaacaggcaagatcagcacactaaggagttaaatttgattgtttcatcaaattttaaatatctgtttttgtttgctatatgcaatcattaggcatgatatgcggtgcagatgaaatttggatatatagaacaagggaaattttaaacaatcattaacatgcatcatcttggatcattagttgtcaattttttctacagcgcacaccagctttgtcatatactccctccggttctatattaattgacattttgaacaagattgatgtcaaacttttataactttgaccatcaataactttaaaaatatttagtttaaaggaactagaacaacatatatagatttgtcttttaaagcactataataaaagtaaacatgcatttatttattatatatattataatagaaaaataagatcaaatatatatcttgtagaccgtgtcattgtccaaaacatcaattaaaatgaaaccagagggagtacaataactagaaataaacaagcaactaagtatggttcacttaatgaagtctgacttccatacaaaatggttagtgggttcaatcaagtatactttaacagttgaacaatactttctcatcctttgatttttaactactccaaatatctctcacgcttccaaactcaatttaccccctaccaattcactactgcgcaccatcatcattcatgcttgacgtaaatcatttaaaagccctctgaattgtgcctaggattctggtcagaagtgtcaagtgtttagaaaatggagtatagcaagtcaactctcacctatcgaacagatttccccagtccaataacccccgacctagaccaaatccaaatcacacagtacggcacgcgaacggaatggttcgaattcgaaacatggtatttgtggcgtcctcatatcccccacaaacaactatgctgcttctttcgactaggatggtacctgccacaatgcagctatgccctccttgcgctcaatatctcctcctatcagcaagtcaactgtcactaataaaacttattttggcccatcccatgaccttcaccctagatccttctccaaatcacgaagcgcgatcacacacacgcacacgaattgcttgaacacgcaaaacaaacaccggtttgacgtaactcccgcaaataggcgcaacaaaccacgaatcaaaaacgcacaaaaccacacaccccacgcctcacgatctcatctacatccacacagactccccagaccaccaccaccaccaccgcacacacggcaaaccaatctaatcgaaggaaggggaggaagggggagattgcgagagatggattaccagtgtagttgcctagcttgatatgggcctgggcgcggtcggcgtagagctcggcggtggcggggctggcctcgattgcctgcgtgtagagctcggcggcgagctcgaagtcgtcgtcgacgaaggccgccttggccttgctctccagatccgacgcggcggcggttgccatggcggcttggcttttgcggctgcggtgaggaggccgggggatgcgggtgggggaagaccagacgaagacttcgcggaggggtagaataagatcacggtgaaaggcctttttaagggcccgtgtggcgagtttctagagagttcgatgcgggagaggccgggccgacgcttggaatttcatttttcttctctctctttttttctttgcctttttttttctctttatctttttttttctttcgtgtgggtcaagtcgtctctctggtggtttgttttttgttatccggaagccaggaagtttccggaatcatttgggtttcattgatgtttaagcgttgcaagttgtgtgtttagtgcacttattcggattgtgattaggaagcgactactagctggcagaccatcctcccttgtcatcatggtctcatactctcatgtggcgttgagaatttgagatcaatatccaaagttctaagcgggttttcctggtggctggtgatcaagtcggtgatatggataattcccgtctcccgatcacagccacaagccatgccaaaattcagcgtgtcgatcggagtgtctgaattcgtagaagttaccacgattgtggaactcaatttcagaggacttgtatcaaaaagtagcacacttttcggtaggagccactagtgagtactactccctccgtcccaaaatataagaatctagaactggatgtaaaatttacatgtccagattagtagtactagaaaatatcacatccagtcctatgttcttatattttaaaacggagggagtatctatttgcatagagcaaacttttttttaaagattaaggtggcaggagctctgccgactatattagaagaagtaaaacaaaaaacaaacaaacaggtccgagagtatatattacataaacattacaaaacagaaattaataactttaggccatgtttacttcccacctggaacgtttgaacacatacataaagtagctaaaaaattaactaattgcacagattgtgactaatttgcgagacgaatcttttaagcctaattgctccatgatttgacaatgtggtgctacagtaaatataattaaaggaatagaaaaaggagcatccacgttcgctctcatggcctacaaattctcacattaatcggagaaaaaaaaacagagtccatatagaaatacaatttagaaatagctgaaattcggaattaaaaaataaagaatattaaaagaggagactagagtccatatagaaatacactttagaaatagttgaaatttggaattaaaaaataagaaatattataataggagtatagagttcatatagaaatacaattaggaaataatagaaattcggaattaaaaataaggaatattagaagaggggtatagagtccatatagaaatacaattaggaaataatagaaattctgaattaaaaataaggaatattagaagtagagtatagagtccatatagaaatacaattaggaaataaccaaaattcggaattaaaaataagaaatattagaagtagagtatagagtccatatagaaatacaattaagaaaaaaatagaaatttggaattaaaaaataaggaatattagaagtagagtatagagttcatattggaatttaaaaccaactaaaattcagaataaaaaggagcctccacgttcgctctcatggcctagaaattctcacattaatcagagaaaaataaaaagcagagtccatatagaaatacaatttagaaattgctgaaattcagaattaaaaaataaggaatattagaagaggagactagagtagttattacacattagtagttttgaaaagttattgcaaaatttaaaattatgttgtcattgtaatatattttataataatataatgagaaaacatatatgcttttatatgagaaaatataatgatgctagccgcgcaatctacgcgggccaccatgctagttttgctaatgatgaattaattaggcttaataaattcgtctgcggcttactgatggattctgtaattagtttttttattagtgtccgaacaccctatgcgacactctatataatatctgatatgacacaccaaaactttacaactctaaagctatacaaccccttagacacagagtaaaagaggctagtagctgactggaagcgtaaacgcaagtacgctttgttctaggtcttctatgattaagtttattgtcagcttccttgaattctccctgaaaaattctactatttcgttgcaactagatatgccaccaggttgtgagtagtgcccccgtcctctggcgggattgtgcctttgtggcgctgtttgttatttgaatcacccaatctataatattttgggcttgtgcagccacggacagtggtggatctagaaagaaataacaatggagtatgagtaaactagatagcaatagagtctcaataaactagatagagttactagatagagttacagttccccctttcatctacatatggtaaaaattttagtagggttttttttggagactcttatagttttcacgccaatagtgagggttcgagacccgccatcccatgctagatccgcccctggccagaggattccttctttttagtgagtgtattccagacttgtcttgtgtatgcgcagtcacggtacaggtggtctacatcctcaaaagcttctctgcaaagggagaaaatccaatcacaggccaatgcctaattaacaagttttcttctattagggtcttttggtgcaggatcagccagcccatgaagcgttgctttagctgtgccggcgtttcccaaaccgtggtcacgaactgtgtttgtatttgcataaaacaaacttaaaatatatataccacttcacaaaaatgttgagtctaaacttcactcacatatcaatattattttctaaaagaagtctagcattacgcatttactgtaatatttatgctcagatttatcttttcttttcttaatatgtaggtcaaatttaaacttaatttttgtgaattaaataagtcattacactgcacatcattaattttttatacaaccatttgcacttgaatttgcattaattcatttttggagtttgaaataaccaacactcaattaatcatgtgtttatctcgttttacgtatcttatcattttttttcttttcatgttctatcaaacaaaccctttagaacagatacaataacagactataagacagctataaacacatattgaggagataaaagaagagagagataagcagcaggctataaatctgtagccaactgcaatacggactataagacacaatgtgtgtatgacaggtgggaccagataatatgtgtatgacaggtgggaccagatattaataatgtactatatatttataggtaactattgcatgaattaactattaaattggttgtagataatttggagctagtggttgactagtatacaattaaacttgctcttagtgagcgaaggttgtgttatctagtctaagttcataactcatctcttattttctgtatacacgttttctaaattggtaacaatttataagatagtccgatggatgatgggtctattcgctgcaacttttcggcagctgcagccgttacagtgactatattgtttatacacattggtactgttgatgtagttgcaactgctgcagcagcaagctgcaccgaacagagccgataagtccaatggatgagaagtccgatgggtatgcaatctatcgaatgattgttcctgtgaacttttatggggatgttttgcaaactagtataatgggtataatgggtttatagatgttattgttccttccaatgcctaagattagacaaatcgtcacaaccacaatttgtgagcagataagaaacacggttgcatgggctgatgggcagcatcaccagagcctgccaagaaaatacagggccggagtacacatatcgaagattggcaccaactagctagtataatctgagcaatcctaacgccaattaaatggagcaaacagcaaacaactgacaatgctgcaacaagattttcaccgtacgtacattccttattacacgcaagttaaattaacaaaccacttgggctatgccccgatgaatcagaaaggttttcagaagaggaggtcccggaaggtggggagcttcatctcaccctcggtggcgagcgggatggtgaanctgccgacnacggggaggtcgatggtgatcccgacctccagcacgtagtcgatgtcccagtccccgctcacgtccttgatcagcgacacgatgaagtcgtacggcaccttcaccggcagctccagatttgtcgtccgctcgccgcgatccaccctgggtcaggcatcgtgccggacgctatcaccctgcaaaaattgacgcaaatcgcgcgagaaccagccagctgactcttttttaatttgcttcggataatttgaacacgaactaactggatgcgccggctaacaattatgtaaataatgcacgcacttgtcgccgctcttgaaggtgtaggtgagctcgcagatggggatgcggtgcgagtaggggttgttgacgtcgaggtggctgtggagcgtgatgcactcgcggctgacgcccttgaaggagacgcggtccagcgtcgcgtcgggcttggggattttcgcgatcttctccgccacgaaccccttggccctgtccaccagcccgcccaccccgcctcgctcccgccgctcctcctctccaccttccccatcgtcccgctcctgccgatctcctctctcctccgccgcgctcatcctctcgctcgcgcgcgcgcacgtcgtgacggatcggtacacgtctctgttgctcgtcgcggctgctgcgctctcgcgtacgcgcggcgtgttctgcctgcgttaccattccggccgtgtgcatgcgcacgggtcgcgggctcgcggctaggcgcgacacgcggggagtgtgtctgtgtgtgtggatcgatgcacgcatgcgcgcgcgcgcactggtgcacggccaccacggaaacgtttggtccgcgaagcgtgcactgcgcgcggcctgtacggcagatcgggcaatgattgtttacgctgtcttgcgcgaaacctgggaataaagcggcgcagggagctggaatctttggacgtgagatccaaggcaagctcgcgtgagggagggaccactgttcgtgttgggtgattgggtcggccgctttgtaagatcgaaacaaatctgcaaaccagggcccgggggattgtgggcttgtgatattattgtgtacatgggtgggtacaaacgaaaacaaaaatataaatgagaaaaaaaatgaaattgaaaatgattttgcttcaaactaaccatatccgacttttattcttatggtaattaccatatttcatattatgataattatcgtatttctaaatatgcatttatgatctattttcttatttgacatagtttagaggtctatcaacttcacaaccaaatccttaactcgagtacaagattaaaagaagataatttataatttacatagcataaccttgaatttattttaacatattatatagttatgcaaagttaaatgtgtgattttatagttcaatatttccaatatttgttatggcttcctattgatactgatatgtttctgttcgtatagttcatttctggttttttaattgtttttgtttccgcttttaccattttttattcagtttttgggaaaaaaacatggctatggaaataatcgagatattttccaaccgttttcatccctaattgtgcagcagcaaactaggtgatcaaatctgcaagggagaaatggattcacatgaattgaagagtgtacttcctttaataagaaaaagaaaagcaaacatgcatctgatgtccacattgttttggtgttggcgcatctcattgtttactgtttaaagtgattatagctggtcattttctgaagagaatagtgatctctgaattctgggccgaactgtcatatgttgcatattatggccgagaacatgatgagtttgaactacagaaacagagcataaggatcacatcttttgcctataacgtatatgccaatgttaaaatttaaattttaaaacttactagttgattttgagatattttattatatttcatttttcagcattgatgtttaagttatttgtaaaagttttaattataaattattttttcgctaatacactctttggtgtattatccgtaattggccaatcgatggcataggatgaagaaaatcttctagcgttgcgctgctccgggcccaatacagaatggggctcaaaatggatcgcgttatcagcctccatatacttaaaatgggccttctgcaaatgggcgtctgactttctgacttgtaaactcatagatcgttttttgttccattttctcatgtagtagaacccgttcatgattacaggctttcagcgttgatcaacaaaacgttcttgccctcttgataaatgataatcgaccgacttgccgcatttgcggattgagggctgctatataccgaaatcccactccaaaatgggatgaggtatcgggtgatacttatcaggtatcatgtgatacttgcgaggtatcatatggtacctatcaggtataatacgattcttaccacatagaaggagataattgcgaggtatcatgtcctataacctaaccggtatagggtgatacttataaggtatcatgcgattctaccacgtatcagatgatacttgcgaggtatcagatgatcctcgtcgtctccactgcaccgcatgcccattccttcccccggcggcgctccaccaccaccaatgcatcggcgccccagcagcaggaggaaggatcccttggagtacaaggagtacatcgtcctcctgaggccgtggccggacgctgccaccaccggcatggacgatgacggcgcgtagtggagctagtacatgcccttcctccccggcaacagcactgctggcggcaagccgcaactggtccgctcgtacaagcacatcgttgacggcttcaccgcaatcgctgtgtccaagaagcccgacttccgacgctgcttccaggacggcatcgcttgcttgcattgctggtttaaacaggaaggaggatggcaaccttgcctgatccggccatggtgacgacacgctatgcgcgcggcgagagcactcgaggcagagctgctgcggatgcaccagggcagaggcaacggcgacgcgccgcctgcgcggcggagttcggtgaggtgggaggacgcgagggacgacgacgccgccattctctctccaatccaatcccttcgtctcgcgctgcagggtggacgacacggtggacaaaagtggatcctatcccgtcccgacgggatcccgctgtttagcatttatgttgcggatttatcggcagcatcaagtattagccattttggactcggttcgtgtaatatgttttcaataggttgtttggaacaaagaaatgtcgaccaaaaattcgttgaaagctctcgtactatttatctatttaaaagagattggaaattttagaggataatgacaaggagggcctatacagccattcgctcgcccgcgtagcctcccgcacaggtgacccgggtggaaaccctagccgccgccgctgccgcccccctcccccaacccatcccttgcctcaccgccgcttgagcgagtggctggcaaagccgacggcctgcaaggacagcggtagcagggctcgcggctgcgaccaccatagttccagcgcgggcaagtccatggtggaagctggccgaaaagacgacagcgtcgaggcggggtgccggcgctagcggggcacctggatctggcaccccccacgtcggatccagccgtggcgatggcgacagaggaccagtggcgctggcggcgaccgtggctgcggcggctgtctggcgtcgtggccgtcagatctgggccacgacgttgactgcggcggtaagctgcgggtggtggcatcagcggggaggcgtgggagattgcggtaggcggcggcaggagcgacggcggcgcacgaaggagcaggcgcctggccggcagcaggcgcgacgaatgtgctggccggtggggctggcggccaacacggtgaaggagactcggccggcgccggctaggcgaaggaggtgtggccggtagcggtgcagcgcgaggaggagtggccggtggccgcggagtgaggaggtgcggccatggcacgccgaggacggccagtgcgcgagggcctccgcagcgggaggtgaggctggtggaggtggagccagtgaggtggtagcacatggagattggccggcggggggcaccggtgcaatggtgcccacgtgccaacggaggcttagatgacgatggagcaatggtacacctgtggtagatcggtaggtgatggatggcgtgtgaaaacctagcctggtcttgaccgggctggcaatgatgatgttcgagcgtcattcccctcctgggagcgttgttgtgttgtctcatccctcaagtgtggttgcctggcgaaagcccagtctcggctctctttgagaccttgacggacggcggtggcggtgtttttcgtcacttctctccttggcgacgtcgtttaggcacctccttgccgaaacccccaaccaattggtgcaaccttgctctaaatttcatgctcttgtagtgacatcctagtttctataagttggccacgtcggagggccttagggggagaggagttccattcttctctctcaccctctctccctaactcctgaagacttggatagagtggggctttgtgttggttgtaatggtttaggttttgggcgatctcggctgtgttccgttgttggcctagcggcggtcgttcacgcttagcagcggctggtccggtgctagccttctcctgtatctgtgagttggcactgtcagtgtatgggtagtggtatacctttttccttttcctggttacgacctttcaagtttgtaatcttgtaattttttttcttgttctatccatagaatttcgcaccatatcgtgcgagtcgttaaaaaaaagggagaggggggagcatacatgtttggaaagataacagcaggggggtttccagaagggattaaatattaaacatctactaatgcagtcgcttccatcattgtagaagaataaaacggtgggacataacacgacgcgaaaacaaactccaaccctatccaccattgtccccatggacccccatactgtttcttgctgctaatagcagctaacttcgtaactggatagggacgctaactccccgccgattcctgtaatgtaaaatataatcttgtttatactagtactgttttttagggggacatactcaacaaataccatattcacggtaccaatcaggcacactcactcatgtactgatgcacatgcatctagtacacatgttcgaaaattacgagacaccaaatcctatgtgagcgccgcaaggatgcatgcatacccagacatacgcaattatgcatgttcatctctctcagaaacagtgaacatgaataatttctctgtttcacgttataaaacgtctggggtttttaatatattcatgtatgaatgtatgtatgagtttgaatttatatgcatatcagcgaatttagacgagcatcttatagtgtggatcggagggagtactagatatccatgtttgatgtttctaaaaaagaaaaagaaagaacataaccatgtttgatgtaaaataacatcacctgaccatttggatactatttttttgaaaaaaaaatgatcatgttcctactcctacctctatgaatgaaaggaacaaacccactgcttattttttttctaggagaacacggagacagagagcgtctcaacctccggactccagagaggtttcttgtgcttgcagggccacgttgaggatttgccattggccctgttttgatccaagggttagagttagtttctagctctcaactaactctgaactaactctagccctagaggtgtttggatggaagggttagattgacaataaatatacttttccaatcatttggctcctttccaaccggatttggtgtggcagactcatgtgtagcctcctccctctcacaaatgacacaaacaaatcatatttcaacccctccgccgccggcgcctatgagttgaggtcgaagccgacgccggcagaggaagcggtggcagggccactcgccgacggctgcgaagcccacgcgctgaggtcgtcgaagccgtcttcgtccatgcgtggccggcggcgcagatcggtggaggcggcgacgcggatggtcggaggcagcgcggctcggggttggcggcggcgcggttggagggagggcgcggcgcgggtagtgggggaggccacgccgcgaggatcggcggcggaggcgcggatcggggacggcggcgcggatctgtggcggcggcggcgtggatcggggaggcggcggcgtccagcgagaggatcctgtgcgggatcgggaagagatggggatccggtgcaagcagagagagagaaaagtggcttctacggtgggccccactcaaactagctccaataagcacctcttgaaggggctagtttttttgtgggttagatgcaactagccccaatctaactcctcatgtttggatcctttaaggctatttgagcctcaactagctcaaactaactctaacccttggatttaaacagggccattgtcttcattgtaagttggaataggtggtgtgtggagtgtggactgaggagtgaggactacgagatgtgtacgctgcagtgcacgcaatatattgcgagggtatatggcggcttcgtgtggaagtgtgtgatcacactgatgggctgatggcgatcgcgaacgaaaataatccaagatctggatcggccaaaaaccttcatcacatgttgcttgctctggatgattggtacgcctgctgccaagacgcgaaagggcaactggtgctagaaaattcaacgatattaagggacccttaacttaagtactcttatccggcatgtttgcaaatcggttactccctccgtccaaaaatataaatatttttagactccgacacaatctttgagatactactttgaccaatattattaaaaatataaatgttttaaataaaaatagttacatattatgattttgattaacgataaatctagtaacaccaattttacatgattgatcttttttttactattaatagttaaaattaaaaatagttgacttgacactatacttaaaaaagcttatattttaggacaggatatatataagttaatataatatatagttgcaaatcgaccgcggtgctgacggaagggtgcgtcaagtgacaatgcagctctcgctttcgttgtacttcctccctaatgcacagtataagagtttcatcggttgtctatattctctaataaatcaaaacgacttattagataaaaaataattcatagataaaaattttatgtgttacataatgatttaaaagccaacgctaaaaaaataggttaaaagaatcttaaaaccaatcttaaaatcatcattaggcaatccagttagtcacgacgacatgatgccagaatcagtccgctcccgcttcactctacacgttgctgcacacgtcgccgaaccccctccagtttgtccgaaataaaagggcctacccacaggccaccgcatcgaacagcaatctaagagcagttcaatactatagtcaatccatacaatatttacctataaacatatactacacatatctgatccaacatgtcatatacatacgtcttagagttcgtgttgtagctagctacaaatctatagctcactcctcttctctctattcttttatctccttaaaatatgtttatagttggcttatcctagtctgttccaaaaaaaagccaaactctagctatgaacctggacacatgtgtgtccagatttgtagctaggattgaaacttttttgggacggaggggtagtttactattgtacctgttctaaagatatcgtcattgccatctaaaactatagtacacatcattaaagctgctctccctcttcagagatgggcatcattaacaacacccacattagagatggcaatggccccgaaacccgacaggtaattactccattaggtcatttccaatccaataattaggatggtgtctatagcattaaataaactaccacataagatgaaagatgatgtggcaaataaataaatgaggaaagagaagaaaaccaggtgttgtatgagacatagtttctacacaacacccactagtaaaaaaacacccataggtgtcggccacaaaggtgccggttagccaaaaaccgacacctataagtcatttcccgccaatttagcaaaaaaccggcacctataacgattaataggtgtcggttttgttgggaagatcactggtgccggcactaaaaatactcccgccaacggtctgaaaatctcataggtggcggtcatggacaaaaccggtatctatacgaaaggtggtggttatttaaccaaactgacaccttcatataggccggcgagggaaatatgtgccgtttttttatccgaaccggcacctatatattctcactattataggcacctataatagtataaccgacaactatattattataggcgccggttatagaaccggcaccaatgactttgataataggtgccgaccaaaaggtgttgggcttgaaactggcacctatagggctttaaaaactggcactaatgactgttctgtttttgtagtagtgatccaagacatcatgtgagataagtagcattaaatttaggtatggaaatgtgatgtttgtattggaagagtagtgtctagtactagtttcttgatgacgtggagtttataaaaactatttctagtgtcgactggtcttagtttttatccacgtgggtctcttaacgggcaaaagtgtcacccgtcgggtggagcgggtgcgggtccattatcttgcccctgtacctgttaacccttggggctgatatgcactgcttgtttaatatgtggcccaccagaatttttcacatgcatttacttgcccaaggcccatgcggagaagagcttttcagcaaaaatcaacgaaccctactctcgttcctctctcttctcgctgactcgctgtagttcacacgcggacacgccgccgccgccgcctctgcaccacgccgcctgcccaccgcgaccccgttttgtccgccctccgtgctacaccgccgcctcgatgctggccaatagatcgacgaccggcggccccaggcgcactgcgtgctcgaccacaccgcttcctcccgttctgcgctgctcctcttttgttgttggcttgctgttgtggttgctgcagtcgggtgggtgtgtagtagactctgcgggcctggacgggggaaatctacacttttactgctacacccgtatgcggggatggggatggtgacgttcgattttttctgctgcggggatgggtacggggtggtcacacccgacgggtgcagcccgttaccatcccgcagcacgaactggttgacagacagcccacgccggcgcgcgcccgcatcaggagccgagccctccactttccccgccgctcgggccgctttctccattgccaagccgtaccttcgacgcttcgccttgtcagtcactgtccccttcgtggtcgtcttcgccacttctccccccgtctccacttgccccatatctgcggcagcctccctcctcctcgcggagatttgacccctgcgggctcgccttaaaatagaggcgcatcccattcccaagtggctgcttcctgcaaccacgaggtccgccgctctcgggagctccagcgagccgcgtcgccttctgcgcccgccgcccggtggccggcttaaatttgtgcgcggaggcgagccgtcgtcggtgccgcggggcttcctaattcctcccgggggagtgtggtcgagtgggggtttctggggttcttcgccacttcgccgcccgccggtgagttcgcttcctctcttccaagttccagtaagggcttgggtcactcgattgatgctgattcggcgcgtttcgcttgactgggaagttcgtcacgcgattgtcatacggttctcgcgtaattggtggcgtgtttcgatgagaatggccgttaggcttagcttgtagactgtgcaagactgtttttaggctgttgctaccgtggtctgtttggtgagaaaatggctggccttcctgattccttgtggtgttcgtagtggaatttgatgggggtctgatcgttgtggggggtcgcttgccggtgaaggaggctgctcttcggcaaatggttgggtgggtgggtcactgggtgctcaccgttttccggatctgggattctgaggtactgaaggtggtgtcgtctgtggttggggagtggtgcggttttcaagtttaggggcgtgtttaggacctgatgatgcaattgtaaatttgtaatacgatttgcaacgtccatatgtccacagcaacccaaatttattggtatagctctgatgaaacttcgggagtttcatttcagtatccctgttggtgaaaattatctcttctttcttgtattttgttcatgaagagtgatacaattaatagtattgccactgttactgtttttttctgaaaaaatttggcgccttcttttgtcttaacctgcttggatgatacgcatagttaatcacatcattaatccattatgctgtaatgatgtgtgaattttcttacaaactttgttttcttttgcagtttagtaaattcaacattttggacctacatgagttgattaacaagtccattccattgtccttcatggaggcttcatcttggttgtgctaccaagctcgtggttttggttcatccagagtatggttatggcttcttctagctcttgttcttctgaattgcagcctggtactctcagcctcgccgtatctggtcggtatggggagcttcgacataacaggacctgcagcagatgttaacatgatgggatatgcaaatactgagcagattgcatcgggaattcacttcaggctgaagtcacgtgcatttattgtggctgagcctaatggaaagcgtgttgtgtttgttaatatcgatgcttgtatggcatcacagattgtgactataaaggtgcttgaaaggctaaaagcaaggtaagagttaacatttcttgcgaccttattaatgcttgcatgtttgttgcaactttatgtgatatgcgcttatagatcgtgtataaaatgatccatcaacctttctacatgcatggtatgttccccaaaaaagcagacccgtaactcattgtcaagttactcatcatcatggattgagaatttgagatcctctgacttacttccctttgacttggagtcactgacatgtgggcccgctacctaaagggccaacatgtcggtgatccctgtcagaggtaagtaagtcataggatcctcttcctcaccatcatttgttgatggccgtcttattgttttcaaagattgttcaagtgaggcactgcctcaaaatcattggccattttgcaatgcatgttgcagaaacattgaggaacccagatgccctcatgttcactggtatgatcttgtttgaatctgttatgtcccaaagctcagtgaggcattatagcacgccatcatgtaggctggtgctgacaatgctgtagctaaggtactcatgttgcttgtctgttgtagcacgcctagagtctcagtcgagtcactttgttggaagttggaacattatctcttaaatcgactacctactcaacatggtattgtatttcctatgggtaaataaaccaaatttctagtttatattttgtccaactgaacctcaaaaccttgacttacagcatcaggattcttcccagtgcttctggccagccttgagacccttatgcagccatgcacctaataaagtctgctcagtagtttttcataacatcagggatcctcaaatttgcaggtatggtgatctttataatgagaacaacgtggctatcagtggcatccacactcatgctgggcctggaggttatcttcagtatgtagtttatattgtcacgtctcttgggtttgttcgccaatcctttgatgtaattgttgatggcatcgagcaaagcattgttgaagctcataacaacctccgtcctgggaaaatatttgtgaataaaggtataaaattagcttttgcttggactagccaaggttttccaaaaccgcctccggagccaatttttgctgctgtttaattaatgagtaaattacactttggtccaccttttattacccaagtttcactttggaccacccttaaatctatcttttcaatttggaccggataaatttaccattgttgcggtttgaaataccatgaaaaacttttcttgtcatgtctaacttccctttcggcaaacatatgaaccatacatagaggtgttcgcccgtatacaagagttgatgtgtttaaggttgttgattgtactgaaaaaaaatcgtttgtggtggtccaaatcgcaacaatggcaaatttatctggttcaaagtgaaaagatttgtttaagggtggtccaaagtgaaacttaggtcataaaatgtagcccaaagcgtaattcactcttaatgagtaaattacaatgcacctgttttctgttatttgtgacggttttaatctcacatatatgcatttcatttagttgcaagtaggccttcaaatgtcattacttgaattccggttatttctttcttatcattcaga

SEQ ID NO: 9943 - DNA, 16361 bp, Oryza sativa
  unsure (1)..(16361): unsure at all n locations
tccttttcagtcttactatccgaactttttgtcccgttttcttgaattttggtcttttcttttggttcttgcttcgtttctggtgcagtttccttcttgacctggagaatcaaaattgccattagtcactgtgagatgatgattcgctttatcaagcacccggtaatggagtttgcaggtttcatcagggaaaagttaaattatagttatccgttcctcttgggtcttaccttgttcttttctttctgaagtagctctctgacaggatgataagctgccgtcacgcaaatattctgaagaaaaaaaagtacagatttaatatttcagagagtgacgactgaataaatcttctttataataccaaaagtccaaaagcagtgtacagaccttcaagtcactgctggtgtatccttcagtcattttggcaagctccttgaaatcaatattttcaaccgtctctttcgacaacaatgtcttcagaatcagctctctactctccaacgttgggaggccgaccatgattctatttaacacaaatgactcataaaaaaactcatctagagaagctgaatttaatcaaatagaagtttagatacacataaacgaaacatacctgtgctcaaatctccttatcaccgcatcatcaaggtcaaagggcctgttcgttgcagcaaggactaatatcctttcgttggacttagacaagagtccatcccagtgagccatgaactcattttttactctgcgggatgcctcattttcgctatggttatctcgtttccctagcatgctgtctacctcatcgatgaaaatgattgctggtgcaagtttagcagcaaggctgaataaggcttggatgcacttctcagactccccgtaccattttgatgtcatactagccatagagatgttcaagaagctagctcctgctgcgtttgctagggcctnnnnnnnnnnnnnnnnnnnnnnnnnnnnnnnnnnnnnnnncagaacgcccttgcatggcttcaagagaccacctttgaagaaatcaggtcgttgaagaggaagcatgacaagctcgtgaaggcattctttgatatcagccagtgctccaatgtcatcaaatgtcactcctatttcattggctggtataaccgttggtcggatcttcttttcatactcattgtctggaacgacctgtaagttaagaatagcaaaattttaaacatgtaattaaactaggaaaattacttaattataacttattgtagttgaaacaatgtattaccatctctgtctcatcctttgcttccactgtatctttcccaaggtcgttgctctcttggaatatgcgtaatccatgggataagctgtgaaagtgccatgttagcaaaagcgagataaagcaacaatggaccacctcaaactcaaagtaaatttagctaacctctccgaagatatgacaagattcccgtttctgtatttagggttcttgttattcatcagatggtaagagacagatggggttataatttcttctaagtaagccacaatgattttacaatcatcatctgcattgatcgagctcaaatcttcacactcaagattgttttctgcgagcacttccgcgatgtagttttgaacgacttgattattgttattattcgaatcttcctccatctgggtcttccatttctcaagaaggaccttgtctttgggaggctttgtctccagaatacaagggaaaagagcacacacagattcttcaatatcttctctatcctcatcatcatcgaggaattgtgaaccaatcacgattacccgtccagatagttttttcaacattttctgaaacatacagtatgctttttctgaacttccaagcaagtcatcaacatcccttatgtaaagaatgactggactgatttcagaagcagaaactataatctgcaaaagccatccaatatcagcttgtacaaatagggcacgtaaatttggactatactgctgaataactgagttaccttgtaaagggattgtatgagaaccttctcattcaaactccagcatggtttaactgatgctgcatcaaaagagagggtgatctacagatagctaaaaactaggcaggttaggataactgcagatttcagttggaggaaccctcatgggcaggcacatttgaatatacaggtaaatgaggatgttgggttgtctgaaactagttgaagctggcaacatatgcattatacatctaatgtgcacatgtgcaattggggcataaataaacaagagagcataaaaaaatggatttcactcaccaaggtatttagaagattcgggatcatggtccttctcgggaggtaccaaggataactgaacccgtactgaaggtgtgttatgaggacaacaagtgctgcaaaagcaatagcataaaatgctcagaaaatcaatatctaatacctctagttgcatatccaggcagagatattacctagtcctgagatcaaggatgcctgtttcacggctcaatggtcctacattagtgtttcatgaagacacagtcagaacatcagaaaagttggagcatgggcatcgcttcaaaatcatgattgagagaaagaaggataaagcattgcagaaagtaaacaggcaaagaaacggtgagtgcacaacaggaagaaacagggtacctgttccagttggttcttccttcttgcgaaacagattgaaagctccaaccaaactagacactctatcgaaggctgcctctgtcatggatctctcacgggtctgtgttatgaacagatcagaattgattaggtaaatcatcagacaaatccacgccacttcacaaaattgtaacaaatgctcctgttcgaaaaaaactgcacattcagcaactctactagctaaattgttcagtgtggacagagtagactaggttctatcctcctcaagtaccccgtttaagttgtgcagaggccggaatcgtaaaacgctattccataatctaaagaaaagtacccattgtttcaacagggacaccatgttttactttgactcattaaggaaaaaaaaaaggccaaactgataaacagaaatgaaaatcctgaatttcccatgtcgcttggtatatcaaccaaatgtgctatacaagatggaactaccagttaccacctagaaaaagaaggcagaaataggatacagacctgtgtattgcttggaccgccgtacttatgatggagctgcaatggcaatcgggaaaagaacagtttaggatcataagaggccagggcgacaacaaagctaaaatttctcaaattgcatctaactgaccttgcacgcgaagtcgatgacatcgagcagcagcaggcgagcactgaactggtttgcgagagccttcgcgagcgactgaaggtacgcctctgcaacagagaaacagcggctgtgagaaaaaaaaaagatcgcgcttttggcgaaaacgaacaacgcacattgcggttcaggaagcggagggcgaacctgatgggccgcagagcagtatggtgcggctggacgcggagaggacgcggatgtgattgggcaggatcgttgggctcagatgcacgaacgccgtgctggtgagggccagcttcgactgctcgctgcaagaaaaccatgggaaacacatgctcaattagccgcccttcaccaaacaccgcattgatttctactgacgacgcaacgcgtatccatgggatcagtaattaaatcatgtgatcctacccgaaatataccagcaaagtcataaactaatcgataaagctaccggtcaaaataagggaaaaaaaggtttggttttttttttccttctcccacattggattggggggtttttggctctgaggattcgcatcgacgacgggacgaacctgaggtagtacgggaagtcgtcgaaggagacgccgacgtcgcggccgtccaccaccagacaccgcagctccgcctccacctccgccgccgtggcgccgccgccagtcgccaacccggtcagccgcgacgagacgaggccgatgccgacccccaccccgacgcccacccccacggccgacgcgatgatgctcccgtgctccatgtgtcctcctcgttcctcctcccgccgccgccgccgccgccgacacgacgaccacacctacgcggaagccgacttcgacagcggcatgcaaaactttcaggggcgcggattcggtacgggtgcgatcgaacggcacagacacggaggggcggtatttatagagaggagggttggagagagttcgggtcggtcccgtcgcgtcgcggccaggatcgagccgagcgagcccacggcacggggcacggcggcgtcacggggcaggagggggtggtgccgattgggattgggacgcctcgcggatgccgatgccgacgcggatttggcccaaaaaaaagaggggtgaaatttccggtgcacaaacacctctcggcggcggaatctcgttgtcgcggatcgagtggccgattcctattgtttatttctattatttcgctatactagatagacttggtctatgtgtaaaactcaagtctatgtaaaattctcctttcatcactagggtaaaagtagcaccttttttttctccgccttgtaactccgtcatgccgtcattcgattccctctgggttttttttttctttttaatgctttctgatttggccgaatgttaacggtgacagaatagttgtacgctttagcaccacggcagattggcgaaaggcgtgtgacacttgggccttgggctgtcaacaccaccaatagcagagacgcgtgggggcggcggtattgatggatgtcatgagatcatggtttttgccgagttggggaccactagttcgcttctcgcttccttttcgagcgtaacgcagacaaacgtgcatcacggctggtgtttgaaggttgcgagatttccctttcttgctataacgtctttggatggttgtatcaagactattatgtgacactgattcttattcatcgaaagttcgaaactaccgttggttccacacttccactgtttaaccacggcgggagcaggagcgacccagcccagagacaagtcccgagccagcctatgctaatttctcagggtaattctaggcagaggtatcttccttgtaactatgagggtgtttgggagaggtactaatagtccctctctccaaaaaaataagtccctagatttagtccctctctcccaaacactctctatatatctcaacatgacatgatgagtagtcggacttctgatcctattcaaaaacatcggacggtgtttcatggtttcttcgaattgtgttagcatcgatggcaaggggtgctccctgtgcaccatctttttctgaggcagacattgtgtccctttcttaagaatcagtggacgacatggcatgatccacatggcggtggacccacgacgaggtccaatcataaccatgactagtcgagcgtgtctgaagaagaccaccgagcaatatggcgatgcgacccttttgtcacgtcattgggcttaccacccctagactctcgatggttgaatagctagctcgctcaatggtctccctcagccacacctagttagtcatggttatggttggatcttaccatgggcccattatttgcgtggaccacatcgtatgtcaatcactattaaagagatgcaaattctgtcactctcagataaataagagatgaacattacatatctatgcctgtgaagctgacatacacgctattttttaatcatctatcgtcatggatagccgcaaacctatacaataacccctgtgtatgcatggatgaacttcatttcacttccgtatttgttgatctaataatgacactacagttgcccatgacatcatcattatttttttttaccatgcatgacatcactatttcactaagatgatgtttaatagagctcctgggtgggtcgggggctttaccacaggatgaggacatgagaactgtggcaaattacgccgacaggatgggatggccactatgaagggaaaaggtgaggagggcatggctagtgtgcttctcgatgtgattaacggctaagctaatataacgtgaatggcatttaagaagaaattttaaaacagtggcgaccagataagaatactactcccgataatataacaacctaaaatcaggtgaaacatttcagagtacaatgaatttagtcacgagcttgtcaatattcattgtattataaggtagtgtttggttttgggactatgtgggatgggatagaaccatccctgatttttgagttgggatgattccacttacatgtttggtttgtaggatgggatgatcctaaatttttgtttggttgaagggacgaggggatcaacgatcacctgatttgcccccacagtcctccccatcgccggaggaagagcaagaggaagagctggcagcgagcaagagcaagagcaggaagagaaccatggcttgctcacctccccatcaccggatccgccgctgcccctcgacctcctcctcgcactccgccgccgctcctccctatcgccgaatccgccgccgccctatcgtcggatctgccgccgcccctcaacctcctcctcgcatgccgccgccgctcctccccatcgccgaatccgccgccgcagtcctccccatcgctggatccgtcgccgccgccctccccaccactggatccatcgtcgccgagtcccccgccatcgctgtcgctgtcgcccgagctgtttgccgttgctctcgagggcgagcgcgcgagtaaggcgccgtcacgccgttcgctcgtcccaggtgggacgagttcgtccaccacattttcccggatcggttggacccggatctgagaggaatattcctctctagggaccaacccatcttactcacccctcaaccaaacacccttaaaagtgggttcgtcctatcccatctcattattgcaactaaacactacctaaaatgttccatccgatcctaaattgctatattatgggacatagagtagcaacttttaggtcaaaaataagaaagcttgccaagtttgagaagaaaaagaaaagatatttctctattaaatagtaaagataagagttaaattgtctcattaaattgactatatttcaactgattaagtttttctttggtggaacataccatctgaatttaagtaataaacttgatagttgacatgagtactcgcattctgactttaccaatcttaagacacggggtctagcacccttcctagaaagacccgagcttatttggaatgatttggggggagggggggaggggggcaagtaagggtagggtgtagtattcttctctactctgccactgtttctagccaatagaacacatgtgcatacgcatgcgcacatcacacacgcgtgcgcgtgcgcgtgcacggcaatgatgagatatgctagtgagcgccggtattaaagggttgtctcatttattacaggatctattaaggtaaggtaagatatgctagagtgtctgaatttatactgatatttttagaagtaaaaaagttgtctcatttgttgcacgatctatcaattgtttaaaggttttctttatagtacttccctaatatatgtcgtttgaggtatcacctatagaatttatgggacccatccttttgcttaagccaaatgacatatttgcaaacgaaaataatgtgtgaataaaacttttatatttatatatatatatatatatatatatatatatatatatatatatatatatatatatatatatatatatatatgtttttagcaatttaaaagcaaaagctgaaaaataaacttcgatgagaaaaaccccaaaattatatcgttgataattcaaattttgactgataagcataagcgaaaagatgaggttatgtactaccatataattattttctataatatatatctcgtgattaccagtttgtcactagaaacatacttttatctcttaacacgtactctcttcgtcgcataaggaataggaaaacttgaaaatgcgtagtacactgtgattattactagtaccttagtccttatccggtcagaaacaccaacaaaaagacatataaaagagagataagtgcgatattctgcacaagcctccgacgtggcagagcatgcatgtggaaacctttccgcaaaaggctccgacgatgatgtacagacggactccaacattcacctccaccatccaatgaagtaacaaatgcaacgaaatttcgcctgcaatcatccatgttcttccatcccaagtttacttgagggatcggaagacttcgtttgtcgtgtaggtttcacatgcgtacacatacaccgaatccctatcacctatcatcaccatcaccccgatgctatcctacagccgcccggtcgtttacctcctcacctctcttgtgcacgctaacatacaagtagcttgttttaatattacccgcgacgaccagaacacggcgagtcagtcagtcaacgtgatacggatgcgattttctcctgtagttgagtagaaaagctaggaacagagactaagttgggtgtcgtgtgtggtggagtccaccatggatccatgatgctagcgctgcttgctaatcctgcaacgtttgttcggtgcgtgtccacggttgttgccccgttggagcttagctagttggcgaccactcgatcgacatccgatcaggatgatatgtgtcatacgtggtcctgcctgcccctgtaaaaccccatagcggcaagggccatcgaccgaccggccgcgtccgccgtacgtactacgttcgtgcggccggcctgccgtctccggcaggaattctccgccgcgcgtggcgggtgcgcacgtacgtacgggcgcggccgctggcgttggcatattggcatggtccatcgcgcggacgaaaccgagtcttcgctaccgtcgctgttgcggtggggctcgtatacagttttgtgctcgtttctccctccgatcgagtgcacgtttcccgaagcaacgatcgtctttcatttggtggttgttgtcatgttgggctcgcaagtgggggcggctctgggagattgtgttctcttgggctacaatacgctgggccaccatgaaagggaggtcggttttccggtatggatccggacctggcctggctggcccagcatgtcatatggtccatggcgcggtgtgtagtccagcgaaaaccatcacccacccatccacccaccgcacttagggttagggacgcgcgtttagttaagagccatgtcactaaggaacgcgttaattaatttgttggtgaacgattgaaaagccataataacgattgcgttcggagttgcggtttgtctgtatatccaaattaagagttttgtataggttgcgtcaactagagtttggtgcccgctcgcctaaatagatatataggtgtctgtttaaatgaagtcaagcgtcaacaacaagaaactggagtgtactctctccccgtatcaaaataaaccaatatatcattggagggaagtaaaacttgatgataataaagagatgctcccctgcgaaatcacgcatgattgcaggacgggatgcttcagcacgacatggaagctccaactgattgtcgagttctcgatttaattaaacggagcacgggagcaggatatctcctaacaggacggtggtatatgagaccggaaatggaccctctgacttattatcctctgacttagagtgacttttgaatccacatattagtgacacaagttaaaaataagtaagtttgaggattttaatccctattagacgtgggacgttagctagatgctaacgaacagttgatctcaactcctcaagtcgaagtcacggtgttgtgactttgttattccctctgcttgcatcagaggatctgcgttcacggcacgcgcgcatgttcggccatgcatgtgtgcacggtgcaggccctcaggccacacgtacgcggtacgcgttaacagctcgatcgatcgccgtcgcgtgtgcgggccggacatctgattgcgaggttggcgatagatgggccgtgtcccgtgggcgtatgtgacgagatcgctaattagtttttttcccaccactttcctttttttcttttggcacatatagttttttttcaggttaatttaaagtttacgcgccaaaattttataagttaaaagtttatatattcgattcaaatttaaatttaaatattttttatatagaatatatatatatatatatatattttatacgtacgaaatttacggtatatatttataagttctatgcacgtgtataagggtattattatttttattttattttctaacttgttttttattaatttatggtgcatgaggaggaggagcgtgggggttagggaagggaggggggagggggagggggagggatcgctgtgggtgatcatccgcctattagccctctcccgtacgtgaggcgtggactagtctcagcccgcgcgctcgtctccacgagtgtttcggcagctctaatgtaacagtctatactatagtaatggtggtgtctattctcacatcattcctaccattaacatttggctcccataatatatattattacaccctttgaacaagtcctctctcatttcattataggctcctcaaattttaaaattatctacttgtataataagaaaaatcatagtactactaagactaaataagtaagctagaaacttaatttgttttctgttgcaactcacggactctaggcttactagctaattaacgtacccttacgtcacgtaggatcaagttatagtgctttcacagcctactatatagtccttagtttttttaaaaaaatgtgtattaaaacttagtccatcctatctaacccttgaattttcactaaaatttgagacctatttccacaccctaagtacagtatgcacgcttgtccattctccctactcatgagggagggacacagtagataacggtatccatgtcgacccggtttaagacttaattgtttgacttatgcttgtgcttttaagctaaattttgaattttacaacttaattttaaatttattcattttcttatcatagtttattttacaatatttatttttgagtcattaagaacacgtacacaaaagtattactcgcaaatacttttttatttgctaataagctgtttagagcatcaccaaccgtatctctatattctatccccaaataatttttatgggaatcctaaataaaatttaagatataaaaatagtgttccctcaaacagacttgctaaaactgacctcctaagaactaaaaagtggacccatgaaaaattaccaactgaaattggcttctctctccctcccatgagatcataccagccacgcgtccactgatcgtgctagatcaccgatcggtgtcggccctctctatatgatatagcatgatcgatcccatccagtggcgtagctacctaggtggcactgtggtccatggaccacctaaaaattttatcgagattaaaactatagtatatgtgctagttaatataataaaaattatatagtgtactacctattaaattgacctattacatatagatggaccacctttactctaaattctagctacgccactattcccaactccagttcccctgtagcttcccttgttctctgcatgtcttgtgtcttctgctccttgcccttgctgggtaatcttcattccccttcaaaggaacaaggaaagatagccaaatgctatggtcaaaaccttaacacctataggaaatacatcaccatttacttcctttaaatatttgttgttataatattcttgttcaggctgcaacttgcaaccatcaacaggtctgctgttcctccctggtctttgtcgccaaagttaattgtttgattaataagatgcagctagcacaattgtactggttgatcatacaatttactgcaaaatgacatggcagtgggtatagccagctgctagctatactattgaccttgctctaagtgatttcatcatctaaacaccagcacacatcgcggttggctaggaaagggaggagccaacccaactcgagagtcaggcagtggggcaccaggctgattcacaccggcgcctcgaatcgaagcggcagtggtgcttgggggagcgatgacggctgtccactgccaggcttcggctgaagtgcagttgccaccatatcatgcgccgccacgaggaagaaaaattgacactagggaatcatgggggagctacagacttattccagccagccacgggaagacaatgctggtgacgggatagatcgacacggcggtgtacgagagcgcgaagaggagaacatgtcgccaaccacgcgcgaaggagtgaagtacgatgtattgggaggcagacctcgtccctagaagtggagagcaaacaatccagaatcgggatttccaactattgggagcttcgctagggactctgttggagtcattttttgaacaaaaatctgattggaaatcatatacagacactattggtgatgctctaaacaacgtgacacttaataatagcttgtcaagtagccttcttcctggaataatgctatctttttctcgatcgcttcgtacgtgcctaccacatagctgttctaagagatacttaggttgtgttcttcccctattttcccaacccacatctctcatttttcgcacgcacgtttttcaaactgttaaatggtgtgatttataaaaaactttctatatatgaaagttgttttaaaaaaaatcatattaatccatttttcaaaaaatatagttaatacttaattaaccatgcaataatacgtgctttgttttgcgtgccgggaaggaagggttccagccttagggtgtgttcagaatccccctttcccaactcacctctctacttttccgcgcgtaagcttttcaaactgttaaacgatgtgtttttttaaaaaagtttctatacaaaagttgcttaaaaaatcatattgatttatttttgaaaaaaagctaatacttaattaatcatgtgctaatggactgctccgttttcggtgcagatattttagttccaaactccccacagcgaacacagccttagatactcctactctatatccattcagtttttttttctttttgaaaactataaccattcgatcaatcagcgattcaacggttacacgcacaagtaataaagaaaacaacgtacgagatctagtactgcgtacatacacggagttcccaaatgtttggcgatcttatctgggccgtgctttgtggacgagagcaactattcagatgtactctcttttttcttttcctttggaatgccagtacaaactttatatagcgtgaaggaatcaattgggctgtgtggacatgagtagatcatgggccgtattcgccgcactctgttggtactgtggtgcatggctcataagcttgccagataggacaggtgagaacgatacgagacatcacaactcgatcgcaagttggcgaaacgaacggtggaatgggcattcgaattagaggtggagcatgcgcactacactaaagtgcaataagctccaaactaagtaacaggctcatcgtttgtcctatactcctatatgaagtccaggcgttgctaaaaaacaaaattcaaaacttagctttgaagttgattttaggatgtttttcacgtagttttttatattaccttttaagtcaatcaatggtacatatataagtaagtcattggtttctaatcaactcatggctaatcgatggggcttttgccgcgctgtgctcgcctagtcgccttgccgttcatgcgttcacggttggagctttggtccgattgggtttcacatctttacgcaagttaggtcatgtttgtttcagcttataattattataatctgaattattagaagtaagctgaaacaaacaaatagcttattatctataaactagattactataatatgataatctactctaaaaatgtttttttaattattggatggttaacagctaacaaacatctaataagccagagaaacaaacagctaacaatttattctatatcggcttattataattcagcttatagtaatttggatcaataatctagattacaataattttaaattgaaacaaacagtgccttaaatgtagggccgggttaagacggttttaattatttgaatcgaatttgtggactctaaaatcctcacgtgtaggacggttctcaaatatgaattcagtaagatcccaggacatagtagtactagtaatttgttattaggtacttgagttattttgtaattttttgaataagacggacaattaaacgttatacatagaaacccacaactgcacttaaaatgagacggcgggagtaacaaactctttgaaatattggaatttcaaatgtcgatgaaaattgcccaaaaacctgtaagagcaaataaaaattcaattaatgttcccagaggaatctattctgcacgctaagaacatattctgcacggtcagctccagcacagtggcacagcatttcgcgtaggcatgaagtcctaaaatactttagtatttttcatcttttaagacatgactaaatctttttcatacccgttcagcatggataaaaatcaaagtctctagaatcttcaaggctcccaaaaggcacgacggaaaataagcaaaaaggtggtaaaaaaaaagaagaggatgcaaggaaaaaaaatcctcttgaacctcggaacgtgccatgtgatgtggaccgcaacatattgtgttccgtaccggcgatgtgattaagatggttttaggtcaaaattaaggggcccattccgtccactacgtgacgtccagatcagaggagatcacgcacctgttctcgtgttggcgtcaccacacatggaaaaggagaatacgagtatcacagaataaaaacgagaggactaataaatagtttactgttctaaacatggtttattagttcgtgagtaaatgtaaacaaatatgacccagagagcatcacttgttggaatttggaaagtggcttgactagttaagagctatgacgtgcagtactatcggattcgtccaagtctctctctctgttttttttttgggaaaaaaaatgggggtaaaatgagtgttcgatctgtagtacccaccgtacgcatagtcgtcagtgtgtgctacgcgtgctacagcggagactggaaagttgcacgctcaaccgtgtgacgaccgtaagtcttcgggacccaggaaagtgaattggattactacatcgatgatgggagtccaggaaaaatctgttcgataaaaaagaattggccactctctgttcgccagattgtattaggcaggtgaatgtaggtacaaagcacatattccaatcgtacgtatctgcaacagcattacaggtgcaaaggtggttagttctgggtaattttgttcgattgttcttcttttatccttgtaatcaagttgcaccgactgaacagatatgtacgtagaccattatctaaagacaaaacagataatgtagacaatgcaattattctggcctctcgatatatgcctcaatgtactaccttgctgctagcgatggatctgattaaaatgattattttgtgctgtttgggaattctcggtgatgcctcacatctcatccataataaatttctcggtactaccttgctgcatgctgaagtctgagtactatactccgtacttcataattcataaacttcattggcagattaggtcatagacagcgaagcggtgcggactacagaaacatatacagaggacccatgtcctataatcatgcatgaaaggaaccaatcactggtggagaagtgctttttagttccggttcgtaacccccctgtagtcccggttttccaaccgggactacgaagctatctttagtcctggttcaaatcgatctttagtcccggttgcacaccaaccgggactaaagattttttttcttttttttctgtttttaatattgaatattgatttcacaccatcccctcccatatccaaatcatcacatatcacagaacatctccaaatcctcaaatcctcaaacaaatcatctccaaatacatcacaaactcttaaaaaaaattatatcacagggttctaaaaaattcatcacagattcacatctcacacaaaaatgcatcacagattcacatctaaaaaaaaaatccggccggcggccactgcccgcctcccctccgcgccagccggccgg

SEQ ID NO: 9944 - DNA, 27447 bp, Oryza sativa
ggcatgctcctgccgccgctccccacgaggacgagggagagcgaagaggaagagaaacgagagccgaaagggacttgtggggcccacgtggtccccaccatctttattttttagctgacatgtgggcccacatgggccccaccattcttttcttgatttatgtgtgagactgacatgtgggtcccacgaagtttattatttttccggatcaaattgccacgtatgtgccacgtcaataccacatcagatgaagaccaagtcaaatttgccacgtaggcgccacgtcagctaaaaccaccctcaaaaccgccgagggatctcatctgcactggttttgatagttgagggacccgttgtatctggttttccggttgaaggacgagaatcgaattcgttgacaagttaagggacctcagatgaacttattcagcagaaaaaacaaaggtgcatatgcttggttgctctgaatgcatttttttttcacaagagcttcgatgtatcttgaacggacattgtgttttactgtttacatagtttagatataatatgtttttttactaaaaatacaatatttgctaatcttaaaaaataaagcaggtgcagatccagaaaatggagtcattgaggtcactactcaaatataatggtgtcaatacatatataagagagtaattcttgtttctatagtgtattagcaaagctgacatcaatgcttaacactatggatccgccactgttggtaagaaatgaacgtgctctgcgttcacccatccaaaaacaaattgaagagctgacacggtacggtacacaacgtggggacaaaaaagaaaaacgagttcagaacatacggcaacgctgatgcccgatcgaccgctttatagttgcattctggctggcatcttgcgaaccatgcggttcatgcattcgcgttatattaccagcgtaatatcatcatcctgtgtctctgctgccttcgtactcggtgaacggcccgagctgcgtcacatatgttcgtctctacacgagtgtgactcctcattagtcatttacacgatcctttcaaatggaaacgatccaagggatttataaaagtcgacttgtcctttgtgttcggtgagcagctagctggttgtggtggtgcctctttatagctgaccgtcccaaacgctagctcagaaacagtttaacaaaagcaaaggaatatatcttacgcatctcctttttaattagtcgacactagacagcttatctcctatcgtttctctcctaacccgaccaaatcagcaaaagtcatgcgcatcaccatgggggataaaatataaacaaaacgagatatcataaatcagatgcccagtcgttttctgaactctcctccctgctccgcttcttccattgcattgcatcttaattctgactcgaacttgtttcgtggctcgtaatcacaagcaagatgtctcggaagcaagaaggcgtcgtagagagaggaggagatggcaaggtggtatgggacatggggagctcgctgtacgactcctacgagctggcctcgctgtgccgaatcctggacaggcacatcggcaccgacctgccgtcgttgcacggcgagccacggcaggaggggctcgccgccggagcgccgccgccgccgcctacggagaggaacgggcagcaggtcgtggtgctcagggacgaccgccgaggcaggaccgggaccggcaggaaggtgacgctgcgaacgctgttcagggcagcggcgtcatgggcgatcaggcagaggaaggcgcatgactgtgcctgtgttggcgcagctaccactggagcaatccaaccggttgtctctccgggccggccggtaaaactttgatgttcgccgttcgcgtcagttttttttttctttttttctgctggcatttctatatgtttagtcagtttgtttctatatgtttagtcggtttgttgcaatctgtgcagcttgtaatgtatcttattctcttctaaatggttgttgatcatggagcaacaatatctagtccaacggtgcacatcaccatccgagctagcattgtgcaccacgtgttatccttgttagataatgttagttagtttgttatagagatagattagttctgttaccgcatgtactttcttgtatctatctctatatccaggattgtctcaggttgttgagattaatcctatcctttgtacacgccacggtagaggctctttctgcctatatcaacaaaggtgcggccccgtacaggggttcaacgcttctcattccgttttacatggtatcagagccataccgatccaatccaatctcttgagcgcgacgccatggcgagttcgtcgaagaacaataccggcaaccccctagttggccagcccatatcagagaagctaggaaaatcaaatcacgccgtatggaaggcgcagattctggcgacaatccgaggtgcccgtttggaagggcatctcacaggagatgatcagccgctggctcccatccttcgccggaaagaaggagaaaaagaagttgtggtcagcaatccagaatatgaagaatgggttgcaactgatcaacaggtactcgcatatttactttcctccatgactaaagatctgcttgtccaagttgcaacctgtagaacagtagcgtcggcatggagtatgatccagggcatgttcgggtcaatgacccgagcacgaacaatcaacacgcgactctccctctccacactgcagaaaggtgacatgaacatcaccacgtacgtcggcaagatgcgtgccttggctgatgatctgatggctgttggcaaacctgttgatgatgatgagttgatcggctacatctttgccggtcttgatgatgagttcgaaccggtgatctcgaccatcgtcgggaggccggatccagtcaccattggagagacctatgctcagctaatcagctttgagcaaaggctcgcacatcgccggagtggagatcaatcttctgtgaactctgcaaaccgcagccgtggacaaccacaacgcggcggcagcaggagtggtggcgacagcaaccgcggccgaggagctccaagcaatggcgccaaccgcggaagaggaagaggcaaccctagcggtggccgagcaaatgcaggaggaggaactgacaatcgacccaagtgtcaactttgctacaaaaggggacacacagtacgtgattgctggtatcgatatgatgaaaattttgtcccagatgagagatttgcagggacggctgtgtcgtatggcgttgataccaactggtatcttgataccggcgccacagatcatgtcaccggcgagcttgacaagctaactgttcgtgacaagtaccatggcaatgatcaagttcacacggcaagtggtgcaggtatggagattagtcacattggaaattctgttgttaaaacccctagtagaaatttacatctaaaagatgttttatatgttcctaaggcaaacaaaaatctagtttctgctcataaacttacttctgataatcttgccttcatagaattatatcgtaaatttttctttataaaggatctggccacgaggagaactctgcttaggggtcgatgccacaaagggctttatgctcttccatctccatcctcgcaccaccatcaagtcaagcaagtttatggagtcaccaagcaatccttcgagcgatggcatagtcgtcttggtcatccttcctacactgttgtagagaaggttattaagagtcaaaatttaccatgtttagatgtgtctgaacaagtttcagtttgtgatgcctgtcaaaaggctaagagtcatcaattaccttttcctaagtctactagtgaatctaagtatcctttggaacttgttttctcagatgtttggggccctgctcctcaatccgttggcaataataagtattatgttagttttattgatgactatagcaaatttacttggatatatttgctcaaatataaatccgaagtttttgataagtttcatgagtttcaaagtcttgtggagcgtctgttcaataggaaaatagttgctatgcaaacagattggggtggtgaatatcagaaactccactctttctttaataaagttggcatcactcatcatgtatcgtgtcctcacactcatcaacagaatgggtccgcagaaagaaaacatcgtcacattgttgaggtaggtttagctcttcttgcttattcctctatgcctttgaaattctggggtgaggcgttcctttccgctgtttatctgataaatcgcacacctagcagagttctccatgatgtgtcacctttagagcgattgttaggtcacaaaccagattacaacgctcttcgtgtgtttggatgtgcatgttggccgaacttaagaccatataacaagcataaactccagttccgctccactacttgcactttccttggctacagcacacttcataaaggttttaagtgccttgatccatctactggacgtgtttacatttcagagatgttgtttttgatgaaacacaatttccttttaccaaacttcatcccaatgctggggcaaagttaagggccgaaatagctctagtccctgaactagctgcttctttacctaggggtttgcagcaaatttcttctgtgattaatactcctgaaaatgctaatgtgtctaatgagaatatgcagcaagattctacatatgataatgaaccagaaacggagaccgacggtgcaccagacacggtctcagctaacgcgccagcagagtcctcgggatcgccgccgattaatgaaccagcttctccgttcggcgaatcggacagcgccacggcgtcccctgcatctgcacctgtcaactcggctccgcatccggacgctgcagcctcgggatcctctgcgccacgggggagtacaagtcagggaggaactccttcagtcgccacagatgggatccacacccagccacgacagtgacaggacaggaggcacagcgcccgcgcactcggctgcaaagtggcatccgaaaagaaaaagtctacactgacggtacagtaaaatggggtatgttaacctctacaggtgagcctgaaaatttacaagatgctttacaaaataataattggaaatgtgcaatggatgctgaatatatggctttgattaaaaattaacacatggcatttagtcccaccgcaacaaggtagaaatgttattgattgcaagtgggtctataaaataaagagaaaacaagatggtagtctagacagatataaggctcgccttgttgcaaaaggatttaaacaaagatatgggatagattatgaagatactttcagtcctgttgtcaaggcagcaactattagaattattctgtccattgctgtgtctaggggatggtgcctaagacagttagatgttcagaatgcttttcttcatggtgttctagaagaagaggtttatatgaaacaaccaccagggtatgagaacccttccactcctgattatgtgtgtaagctagataaagctttgtatggattaaagcaagcgcctagggcatggtactctaggctaagtggcaagcttcatgaacttggcttcaaggggtctaaggcagatacatcactattcttttataataaatgtagcttgactatctttctgcttatttatgttgatgacattattgttgtaagttcaaggaaggaagcagtttcagctcttctccaggatcttcagaaggagtttgctttgaaagacttgggagatctacattacttccttggtatagaggtaacaaaaatcccgggtggaatacttatgtctcaagaaaaatatgcttctgatttactgaaaagagttaacatgagtgattgcaaatctgttgctacaccgttatctgctagtgaaaagttaattgctggtaagggtactattttaggacccaatgatgctactcaatatagaagcatagttggggctttacaatatttaactctgactagaccagatattgctttctcagtaaacaaagtgtgtcagttcttacataatcccactacagaacattgggcagcagttaaaagaattttaaggtatattaaacaatgcactggacttggtcttaggatatgcaagtcttcttctatgatagtaagtggatactctgatgctgattgggctggatgcttagatgatagaaggtcaactggtggttttgctgtttatttgggtgacaatcttgtttcctggaatgcaaagaaacaagccactgtttcaaggtcaagtacagaggcagaatacaaggctttagctaatgctacagctgaaattatgtgggtgcagactttgttgcaggaattaaatattgttagtccagctatggcacagttatggtgtgataatatgggagcaaaatatctatcttttaatcctgtgttccatgcaaggactaagcacatagaagttgattatcattttgtcagagagagagttgctaggaaacttttgcaggttgattatgtgtcaaccaatgatcaagtagctgatgggtttactaaagctttacctgtgaagcagctggaaaatttcaagtacaatctcaacttagggaaagttgtgattgagggaggatgttagataatgttagttagtttgttatagagatagattagttctgttaccgcatgtactttcttgtatctatctctatatccaggattgtctcaggttgttgagattaatcctatcctttgtacacgccacggtagaggctctttctgcctatatcaacaaaggtgcggccccgtaaaggggttcaacgcttctcattccgttttacaatcctccttcttcctcctggtgttggaaattcgttgatcgagttgaaactctcatccttcatcatgtgctgcagaaactaacgcgtgcacagatgatggatgggtgtggtgtgacatgaaagtggatcaatgacacgcggcacatttaggggagtgtgtcgtgtcttgacttcttcatgcaaaagtataccaaccctgtataaggccagtcacaatggctagtgtcattgcacggctacccaaaatattataccatcttctctcaaatgaaatcttttatgaaacaatccccacagtggaggggtttcactttgacgtttccaagactaagcaaagcatttaattgatacaagttgctgggatcatttgtacccaaaatccggcgcggcgcgggagaatgcggaggtcgcacggcggaggcggacgcaagagatccggtgaatgaaacgaatcggcctcaacgggggtttcactctgttaccgaggacttggaaacgacgctgacgagtttcaccaggatgaaactctttccttctctctcatccccatttcatgcaaataatcattttttattcagtcttacccctattaaatgtgcatgacacaccagtgaaacccccattgtgactggcctaagcatctttgtgcggtgctgatgttgctgtataattggctctgtatttatgttctggttggtgttatgctgaatcgctgataagtgataactagtttagccttcgggctggtgtgttcaacaaaaccggtatgggactagtattcggacccggactcgcgtcggactcacaggctcacagccggtagtttccatataaagccgagaccaaccacgcacaatagcagcagatcgatcacgtattcacgtctcccgtagtcccctcttcatcacacccggagaagaaagcgatcgaccgaatcaagcgagaagatgcaggccgtcgcgcgggccgcgtctcgctggtgcagccgctcgctgctttcccggccaccgacggcggcggcggcggcgggctagcgcggctactgcggtggtggtgatgtgcggtgccgatgcgccaccgccgggacgggcgagaccctcgagacgattgcgacgaggctgcgtcggcgcgaggcttacaccaactgtgccgccttcgctgtctccggcatcgtcacggcacaggtgctgcgctactgtgatctcaccagcggcgaaggaaaatcgcgtgctcgcggtggaggaaaatcgcgtcctccactctacatccacctggtaacaggcgttgttgggctagcattgatattcaaaagctctctttgaagtggagatctaataatgcttttttagataatagttttttcattaatccgatctctatagatatacacagccaaagagacctaataatttaccttctgttcttgtgctcactgttattgttcgtctaacaaaatttatactactagtgtgctcgttcttactacgcgttttgtacaagagaggactggaaagttggtggagacacgtctcaatttctattctttacctgtttaagccgggtttataatataatacatacaatttctttcagaacaaatataatatatatgttgcacttgcatccaactaaatagacatttattttcaggactatattgaccattcctctctccaatttataccgcatttgaggcctaaaggacctcaatttccaggactttacactgtccactcctttctctagtatataccacatttgatgcgtaaaggacctccacacaagcggacatatacgcatctaaccaaatctattgtgtttctaagccgccacatgtcaactctcgtaaattagaaaaatcttaaaaattctgagaaacaaaagcatagccgccacatgtcaactctcgtaaattagaaaaatcttaaaaattctgacaaacaaaagcatagcatatctagtcatttattttcacttcaaccgatgggtccactattttagtccacactactatgggactaatcttgaaaataaatcagcatatcattacaacatatcatttttactcgcatttgagaaagttcaatgtttggtctcttatagtattagcacaagtatgaattgccgttgagccgcttcttattatcaaagtttcactttattactttcaactagttaacttttatgcttattgtactttggaccaccttaattctctattttctagcaatgtttagccttacttttaggtcaaaactaatttaattataaaacttttatgtgttcgtagtgatttaaaaatcaatgctgaaaaagaaattacgttgaaaatatcttaaaatcaacatcaaaactaagattgaaaatttaaaatttgtttttttttctttagcttattagacagccaatgtgtggttcttagcaaagataagtctcccatatagggaggaagtttgctgatgtgccagattcgacttaagatcgttgatgtgttaaaaagtggtttaggagggtcaaaattaggacaaaggcaaaattacctagtccaaaatttaaaaagtagaaaaaaaatggtttaaaacaaaactttgttaataaaagatggtcaaactttcatatactcttaatttaatatagagggaaaaaattattatgttcattttgaattctacgaaggaccacaattattgcaaaaagaagatacatatagtacgatcttgatggtccaaagtataacaatatagattaatcgatgaagtggtatatagaataattgtacactatttattaaatctcattctatttataaatcgagctttatacaataaaaaatccactagcctgttttaaaaggacaggacagcgaatgttggaaggccacaatttaacccccgctgaggagagcattcattgcaaatttgcaacacatgcttttgcatgacaaaataacagtacgatacatggaaccttctcttactagcaagaaaagctatgtgccagaatctaagagtacgcgaaaaattcagtagtctatttccaaagacaggaaatggatttttttttccatcgagggacatctttcgttttatgcatgtgttaacaaccaaatttggtaatatcggcatcggagaggaaaatgggatcgaagcggaatcaaagataaggattgtcgtataaacagagtaagaatcggcgggagtccgaatcggctacgattaggatcggctaagtctgggtcagattgggttaaataattcagccgattccgacaatacgacttgtgtacgacatcgggttcaggttaatgtgcttcaagatgattaccacgcacggatagagtcctgggaaggcaattgtatctattaattaggatattttatgtaaattccttataaataaatatgggcaaaagtctgccacaaagacttatggtatcttagagtttcttagagataatagtcgtatccggtatggacatatcttgtaattctcgggtataaatagactccgagtcctatgtaattgataacacacacgttcaatacaatttcggcgcatcaccacccttttgctttagttttattttgacgagttcttgctttcgggttgagctgcatcggtttcgatcttcaacaagaggtaaaacttgttatgacggcttgtatgctcgggattagtgcttccatctttatgatactctaatcttgtttatgtaattcgtcgagttatcatatatcttacataatctctggcaatatcactatctaacctacaatcggctaacatccgttagtagagggcagccgattaggttagattttgacgttgatctagattatataagatatctaccactctatgaaacttccatcggtttgattgtctagatattgtccttcttttcatacttaatgctgcatcagttgagtttgatctattaagtcgtgcttagaatatagatctctagcctgccttctggttgtcgattagggtagcatcggagtttcagccgatcttatctgatttagctatatttgttttatatgcctcattaacatgttaaatcttccctttacgtcaagatattgctatatttaagtatattaagattttgcttgatatattatacttgttttaatatcctgatatagagtagtatcggagtattagccgatacatgctaggtctatctgatcggctatgctataaacatatatagtcccgttattaatatatatttcgatctaagtgatttatactgtctcggcatggcgaccgatctatcccaatcacttgatttaaatatatatcgatataagaactatatattggtaatatctacagccgatcgagtaggtttagttctttattatctatctataaccgccgatcgattcacatatgacatcggctcaaaaataaatgatatgtcatcggcacctagccgatcggctatcatttatagatttaatcacggttcctttgcttctatttcttgttgattacaggatcaaatcaaccggcatgctcatacatccgaaggcgagctttggatctgcactggagttaagcagatctcccaggccacgtgttttctgtcaacagcatgtcgttcaaagttattaaaaatattttaaaaaatatcaagatatatcaatatatgatatattttttcacaaacatgcgagttaaaattcgacttatacaattcgaaacaaaaataaaaaatttgaccagtcaaatttgttatttttgtttctacttgtataagttaaattcgaatttgtatgtttgtaaagtgacatatcacatattgatatatcgtactttttttttctaattttttgataactttttaagtaacatgcaaaaatgaaggaatatcccttaagggatgaattgagttttccccaaaagacaaaggaatggatgttggaagaccacaatttatacctttgctaacaaaacactgattgcaatccatgcataagaaagacagaaaaaaaaaactgcggtacaacgcatcgaagctgatcttactagcatgaaaaaaacccgttcattttcaatccacaaggattcctaacacgtgggatttcgttccacgcaaatgagtagcgtgcaaaacctccattgatatgcccctgcaggttcgggttcccctggcaaaaagacgctgtgctacggaaggaaagaggaaagaaccgtctccatcgaacgcgttctacccattaaactcgatcacgaacacgaacacgagagcagcttgcgctgctattctgaggccatctcgggcgtcctccggcgggcggtgggagcgccgttggtctggaggtgatcgtcgggcttcacgccgagcgcccgccttgccgagtgcggagtcctcgccgccgtgttcacgggtttcaccttcggctgtggccctgcaagcgaaagtatcagcccaatttatcatctcgcttgattgcgctagctatgatatcgatgcgaaatgatgtgaaattgtgaatgatctaaaggttcttgcaaagtgaagtgctttctggtacggtgatagctactccaacgatggcaaaatggcaaatcagatatgtagatgctggtgtgcaagaaacatcggaacggctgtaccataaatcagattatccgaatcactttttgggtacggccatccatcatatcatacgccatcttaccaaacaatgcatgcattccatttgatgttctacaggaaaactgtataaattttatggattttcagctgaaaatcatacgttccaatgaattctatttgcagttcatggaatgagatttaaaaaatgtggtaggataaatacctgcttgcctgggcgccttgccgtccgccttcttggccgtcggcaacctgccgtcgctgctggccggccgcgaccgcagggtgccgttcgacacggcggagaaggtgtgctccggcgacattgcaccgaacccgttctcgtcgccgtacagcgagttcccgtcgctgcccgaatccgaggccctgtccttggcgacgtgcacggcgccggcggccttctccctctccatgaccctgtacgcgaacatctggaacggcacgtcggcgacgcgcggcgcctcgccgccacgctgccacgccgggagcttcttcagcagctgcgcctcgatgtcgaggtagtcgacggccggcttgggcgcgtcgtcggtctggccctgctgctgctgctgctgctgctccgggttcaggatcaggaaccgcttgacgtaccggaggacgcggcagatggaggcgaacgccagccgctgcgccgggtcggcgtgccagcaccgcttcgtcagcgcggtgaggtacttgggcgcctggaacgggaacagcggccgctcgccggcgcagatgttcttgctcgtcttgtcgccctgcaggtggttgtcctcgaacggcaccttgccggtcagcagctcgaagcagatcatggcgaagctgtacacgtcggccttctcggtgcacctccccgccgccgcggcgtccgcgacgccgtcggacctgagcacctccggcgcgtaccagatgcaggagttgtcgttgccgttggcgttgccattggcggaagcttttgcgccgccggctgtgatgccagctggctgcccatatccggcgaccttgacatgcacgtagccgccatcgggttggcgcggcttgacgagcacgttggaagggttcagctcgccgtggtttatcctcttcgcgtgcagatactccatcccgcgcgcgatctgcagcataatgtcgacggcgacgacgagcgggaacgggatccgccgccgcgggcagctcacctccttgacgtagctcccgaggtccttggccatgagctggtccatgaccacgaagtactctttcttctcctcgtcgtggaagcagtacgcggcgtgcgcgacgttcgggtgcgccaccgaacacaggagcgcgacctcggcgccggcggcatcggtgtccccgatgaaatgcttcatcgcaaagctctcccccatccaatgcacctccttgagccggccgccgagccgcctccggacgctgtagtcgctgccaagaaggacagatgccgggtgcagcttccccatcgccgcggcgaggagctcggcgaggcggtgctcgtttttgctcagaggtttcgacgccgcagggcctttcatttcgtcgaacatttgcgatatcacccatctgtcctccttccacgccatgtccatccttgcaacgagctcttgggagaccagatatagcttgccgaacgcgtgctcgaacagcttgggatcgagcatgtccctgtcgtacttcctggcgagcaccagccgccccctggcgagctcgtccgggtcggagccggcgatctcgccggcggcgtcgatggcctcgagcgcgacggcgacgcaccacaggacattgtggaggtgctgctccacgcactcggtgccgtgcgccatggccgcggcgcgcgcccaccagctgccgcgggggtccaggcactgcctgacgtacgcctcggcgtcgcggaaggcgcggtggagctcgcggagcggcgcctcgatggcgcgccacttggcgccgcgctcgtcgaagcggagctgggcgcgaacctgccccgtgacggcggcgagcgcgcgcgcgcaggcgtcggcgaggaggcggcactgccgcgggttgatgtggaggtcgtcctcgaacgccatgagcgcgttgatgctacccaccgcctcgccgagttgccggagctgctccatccctatcggcgatcagccttgcctgccgataggacgatggatcaagtgcgcgcgctcttcttgattgcttctttcttcctctgcttctttggatggcacggattgaattcctttcctgacaaggataaaaaaaaagggaagaaactgatgtcaaacgtgcgaaattttcatccaaagtgctttgatcggcgtatgaacacgaacttgattgtggtttgatgatgacaccaaaaatataaggtaataaatgcagaaagtaaattttatacatttctgaacattttacagttgttgtttccatctgtttcttccagcctccaaccattttaggaacattttggtgtgaaccgagaagcatcgaatcagcaaaacaaaacttcatcaacactgcacaattcagtacttttcatctgaacggaacatattcaaacaccaaataattcaacgaaataaactaaaaaactattcaatccatcaaacacaaaaaaacatactgtaggaaacaagaaaccaaaagatgaaatcgaaacaaagaagattaaaaaaaaaacatgcacatgaaagatgccactgaaagataactcacacaagcttgtaggatcgcggcaccagggcagcagtctgaaatccttatccgaccatggaccggcgtcttgcttcaaggatcggccagagaagaaaagcttaagagagaggtgcgagagctctgacgtagagatcccgcaagagagacaacaaggaaagggggaggagtctccaaagcaaaaggaggacgatgaccaggatgccgacgaggagaaggagaagaaacaagaagaaaaaggagcaggaaagcgccgttttggaggggcttaaactgcagggagttatggggagcagcaaagcaaacgcggccgtttccttcctgaatcgtgcgtgctgctgctaaccgcgagaggtttttcgcagccccatttttaagcagcacacagcagttgctaaaaagaaaaaaaaatctctcccgtttctttcttttttttggccatcgctgtacattgactggctaatactagcacgcaggcgaatggtgtgctgtcactggcccaaatgctcaattgttgcctgaacttgctgaatttaccgtgatgagaagagtttcccgaataggcgttctaggtaggtttcacatgcagaaattgcatggggtgtgagccgtccgatcatgcatccaacgggctctaaccactatacacaatacactaacacttaagtattcagtcaggttcaggctgttttgagacttgcgacaggttgctctacgctgtttgctttcacaaactgtatacgtgatggtggataacgtagccgtcatcgtcaggtgctcggtcgcttggcacgtctccaatgccgcgcacgaacggggtaagtgtgtgctctaactaacggctttgtactttctgctggtgtaacctcctctcctaccgcctttcagccgctgatacaagtagaaaacgatgctgtacactgactctgtggcacggcactgaccgtttctcgcgctgacgaccaactctgaactctgtaccattgaccggtatgatttaaggtatttaatttaatccatgccaccacgcaaaaaaaaaaatcaaatatgtcaacgttctccacttctcctcccagaaataatgggagagaaaaaaaaactatcggactatggaactggagtagattatctagtgaagcaaatatatttagttctctctttggtgacattttgcgttgcttgtcacggcgccacttttcttgctcacggcacgattaggccgccgccgccgccgccaccgcgccgagagcacaatgagaggcagcgagggagcgccacgtggcggctcacggcccggacgacgtgggggagggggggaggccggctaggttcgttggtatccgttgcggtagttgacgcgtcctggtccggtcggttgccggcccaaccgcgcaagaactgccctttccgtgtggttggcaggcagcaccaaacacaacggctcaggtcacagaaaagtcgcgcacgacgcaccccggatcaatttatatttcctttttctgacttagctcggtcagcagagtaggtacaatagcaaactattagccggctataaacatattttaatgtaataaaagataagggagaaaagcagcggactatagatctatagccagctgtagtacggactccaagacacagtgtgtatgactggtggaaccatatattaataatatagtaaacaactattatatgaattggctattagattgactatagataaattgaagctagtagtagtggactgtacacttgctctaaccgctctggtgcgatcacaggcaaccaaatggaaaaggatttttgaggatctgccacacaatagtggtttttgaggacacatgaactacgccgattccaccatactcatggacacatgaagtggcaggccattaattagagtctgtttagtaaggtttaacttttaaatttaactctaggagttgaatttagagtgaagttatagaataatttgaattcagtttgacctatctagttcattctctgttactagtatcttatcgagtgaagctggaactaaagctatactaaatttgtccttgttcaagcttctctaaccacattgagtggttaactacattgtaatataatcaatgaaactctatgtaaaaaggtactttcgaattcattctggagaaccttattcgtacaatggatgtcgttggatttcctacaccgactcttagcttgtcgatagtagtcatttgctatttcacaccttccgtagctgcatatgggcaagcgggcaatcaatttgcagttcagttgtcctctgatgataacttcatctttgacgcggttgctatgtcactactaggaaaacgatttttcatggcgttggtctataattttcgctgacggaaaaataccaaaaccgctagcaaaattgtaacgagggggtaaggggcaccgaccgccagcgaaaatagatctttgctggcggtcgcgttataccagccgccagcgaagatatgtctattatcgctggcggtcacttaggtgcgccgccagcaaagatggataattttcgctggcggttgtgttatacagaccggtagagaaaatgcaattattttttctggcggcccacttaagcaatcaccagcgaaaatagattttcgctggcggtagaaggacagcttgcatagatggaccaccatctattaatatagaccacgtggcccaccacccacccgtcccctctctccagctcccctccctcccttctctccctcgcgtctctcctccctctcttctccaccgcctccggcgccatccatcctcaccaaccagctcctcccaccccacagtcggcggcgacggtttaggcgtgacgacgacgacgcgaggtgggcgtgcggcggcgacggtaggcgggtgggcaacggcggcgggaggcgagctcgggcgcggcggcgctcgggagcgggcggcggctcgcagggaggccagatccgctgtcgctgggccgcggggaggccggatccaccgcctccgtgccgcggggaggccagatccgccaccgtcgaccttgctccgtcgtcggctagatttgattttttttctttttgcatgttgttccagatgatgcacatgttttgatctgtgtaaatcatgtttgattgtgtaaatgatgtttgatatgtgctgatgataattttgtatttcatgtttgaatttggaaatgagcagcgaatctagatgttgatttgaaatttgaaattaatgaatcactgggcggctgcatgagtattttcgctggcggctgtcttaagccaacgccagcgaaaatgtatttttgctggcggctggcttaagatgaccaccagcgaaaatgtatttttgttggcggtcaataaccgctagcgaagatcttgatcttcactggcctttgctacattttcgctggcggctggcttaagatgaccaccagcgaaaatggatttttgctggcggtcaataaccgctagcgaagatcttgatcttcactggcctttgctttgtggcggctgcaaattccgccagcaaaaatccaaaatggccgcaacgaaaaatggttttcgtagtagtgtgtgatgtcacacacaacatgtaggtttttcaccaactatagaaggtgtgtttctgtgtgttccaaattccaattaattttctttgttatccatcaaacaaaccgtgatcggtaatacatagtcggttgaactacaaactatatactaattggttgtaacctctttgaagtagagaccgaaatacactccattatccctactactataaaagggcagtcgtatctttccttcatcacattgcacatacaactaccccatcctcaagaaaatcaggaaaaacaaatcaaacgattggttaaaaggaaaatcagaaaaaacggttgatcttagagcaatcggttagatccaatcccagtatactcactcatatcacatgagccagttgcaatgcacgggcggcaaaacgtagagaaaaccgctctgtctctaaaaaaaaaaggaaaaaaaaaaagaactcttaacgaaacaaacaggccagcttatataaatgctactccattaaaggcccaaagccacgaccgcaaattgggcccaaaggcctaaccgcgttaacctgacggcccaaccaggcgaccgctctctccgttttcctcctttcttgcgacttccacctcattcctccccctccgacgactccgatccgtagagatggaccggttccgaccgctcaggcggatccaggtggaccccgagcccgccgccgccgccccgcccccgccggcggcggccgcggcgaacggcggcgcgggggaggacgtgtcggcggcccccgcggcggggctcctcatggcgtcaagggtgcggcgccgctcggcggtgtaccgcgactgcaagggcgactacatcggcgtccccaacgacccgtgcctcaccaagatcctctccaagcaaggtgccccccgcccctcccgtttctttggtcggaaattcgtgtgctgtggcctgcggggtgcgatcttgggttggtaggttcggatcgtgcatgttgcggtggttcagttgcttggatctgatccgtggcggaggtgtgattttcttttacccctccgatgtggcagtgctagtttggataataaatttgtcgtgaattgtcaatcagctattaggtgttgattcgatcgatagctccatatacaagttaagcccccgtagcaaagtgattttgattgtgcgatttgatgtgctgaaccatgcagagattagagctgctgtgcagtttctctctgatttttactctcttgagtgacatatagaattggctaatactgctcaatagttggttgacaacctgatttgatgcaacctagctgctaaaggcgttttaaatcattcgtttgcgtgaatgctgtactagtttctaatcattgatgtttaagagcctattgtagcgtgaagaatcatctccaagcagaggaaattgtttgcggcacggcaattgttggttcctgctgctaaatatgttgtactatgcacagcatatgatattctcactgtaccatgttctttttgtatttagcatcaccagatttctaaagcaggtcatgacctttgatacattgcaggggacaacaaagttctgtttgcagataaggtattgaagttcactcaatcaggaaagatgaaaaggcgcatccttgtgatcacagattttgctctctaccttgttgatcctgatgctgatatattgaagaggaggatagcgctcgcggctgtcgataagctatgtataagcaagctcagtgataacttctttgcaatcatcgtgccaactgagtatgattgtttaatggccagcactagaaagaaggaaatagtggatattataattaaggctattaagagcaattctgaatatcagcctcaagtggcttcttctaacaggtatatggctacggtctttgtgatgaagctttggtatcccatactattaaccataggatgtactctgaacaacatctcacatgtagctaatttttctgggaatgcaaacgtatgagattttaaatcccaaaaacacttggaagttagaactgctattgatatctattttcctattagcatctactttatgagagcaaatgccaactgtcgtgataacattattcgtgattagttgctactttttactgaacctctcagcattggttagtgtcgttgggttcagtcttctgatctagcacctcagatgcctttagacatttactgcattttgttgccagtctatgatagtctaatttgtcaggttcttctctctgtaggtttgaataccatgctgctgctgaagtgattaaagaagttgagtttgaggaagctgaaggtatgtatctcatccttcatgagcgctagatgatatcatttgcttggttattgagaaattggaataggtctattgtagtgattctatgagttctacactcaatcgtgtgcattttcttccggtgccattgctgatttttgtttagctaatgctggcgatctatcctgtttccattaaaatttaaaagaaggatgcaatgcgttcttagatgttattgcttcatacttgacattagattcgaaacacttttgcttgatgaatgctcacgttgctgatttttcaatacaggaggcgttaaaactaggatcacgcacaaggcgaaggcgaagtcatgattgagaaattatgtatgattgttccctgtaaaatgtatagttcttcgagtttcaagggattcttatcagcgctctttatgcaaagttcaaacagacaattctttgatgtattgtgccttctattttctctgatgtttctctgggaaaaaaaaggtgacctgtcgctgactatatacactatcgctagatttttctttttatcataggctattgccacatgcttttgtgctattggaatttcgattttggctctgttcgttacctggagttcccaactcccccatctcattttccgcgcgcacgcttttcaaactgctaaacggtgtgttttttgcaaaaagtttatatacgaaagttgcttaaaaaaattatattgatccatttttttaaaaaaaattagcaaataattaattaatcacgtgctaatagactgcttcgtttttcgtaccggagggatgggatcccaactcaacctgtctgttagagtcttgacggctcactcttttggagaatggaataatttattcatggctagctctgtttgtagtcaacactgggccacataaccattgatacaatcgagaccaaagtagaaaaatggaatatgtggccagctgttaaactgttccagactttggcacaccacctttgatttgggacgctgttccaccaacttatatgccataaaatatctgcaaatggtgcgctaccacactgtataacaaaggctgtccgtccaatgtctgtccagatcaggggagaagttcatctggagcactgcttcttatttaatagtaattcattttttttctgtataaacaacacaatcacaaccaagcatggcaaattagatattgggtatagatgctccgtgaaagctgccacgcaactccgcgaattaagccatgtttaagagcgtacagctgatctgttatttattagtcgtacaaagcatgtatggaacggccacttagatgagatcgtttcactctgatttcccagagaatcactaatcaccttttgattaagtaaatgacccctattgagtgagtcacttgtccttgctccgtacttgcctaggattagaacagcatgattcaacgaatgtgctatcaagtggcaacgtttgcatgagaaaagtcactgaactatatggtttcttaaaatattcattcaaggagctcaaagagaagtgtgctttggctagctagtctcgcgaacgcgtcgtcgttggctcgttccagttccactgcacgcgacgccacaaaattgcatcgcatattcgcatgcatgcatttttctcgtttccagctaattaaaatagcaaagtccacagtctactgtattttagaaacacgtatacaagtcattgaccatacaagaagtacgtcttttccagcaagcgtatacactattttctctgatttctttttacgataacataatacatttgtcttaaaatatagtaacttagtactcgattaaatactacataatattatgaataatgttaagtggtatctaataaaatgctggattaccatatattttattttaatacggagagagtatcggttggaggagggatctgctaaagtttatcacacgtcgagatcagtagatatgtgccctttttcttcatcctccagacagatatgtgtctattggtgctacagaattccaccaactggatcctaccaatgagttactaccctatcacgagcccaaaggccatcatactcccatgcatcatgcatgaacctgaacttcctgaaagaacggggagaatattgcagagggcgaccacgatcgaccacataaccgcggggaaagaaaatatcactgttgatctatctacgatctccacatatccatccatcctttctttctatcctcggagaaaatgatggaatagaagcgacgaacacacatcactagccctgccaacctcacgaacacaagatcgccttgacagggacggccaccttcgcatcgcaacacattggcctcccttttgatgcaaaccacttgtgaaattgtgatctccgccttggagttttgcgatgaaaagaaaaaaaaaagagggagatgaaaagaaaaaaaaaagaggtagagattgattggtcaaattgcgttctggtttgcttgctaatccgagcctagctaccgagattttcagtaggagtaatcgttaagtagtagtaagtagtacttcctccgtgtcataaaaaaccaacctagtactggatgtgacaaatactagtactacgaatctagatataactagacatatctctgttcagatttattgtactaaaatatatcatatgcagttctagatttgtttttttgacggagggagcagtacctaaccagcgttcgatggaatgtaaccatgcaatattcaggccagagtgatggaaatacgagttgatggcacaagaaatagtggtagtgatgctgacagcacaatatccaaccaacataagcacatagccttatgatatcagttgctctttcaccggttccaatcaggttcccaatttcattagaatttcgtcgtacaaatttcgaagctctcttaaactgcttgtttttttttctatcgaattttgaatgaaatttggcggagttcattcagaattcacgaaatttgacatctcggtagtcgctgggctcgcattttaaccccagaacggaattgtgaaccttgcttccgacatggtgatgagtagcagagccatcactctctggctctctcgctcatgagaaaattcaccaatggataaaggtaactgaaagtatatgaaacagtaagcagtatatttcttgtccgggatcagagaaaggagtagacagggcagcagcagatagacaggcaccatgtgtatcaacagcaacatatacagtacatgtacagaaagctaacatggaaatctgcacatttacagccaaagatcagatcagccagtttttttttcccttctctgttgccatcttgctatcttttgacaaaactaagaccttggcatacatactatcaaaatattatatccaaaatactttccaacacgacaagatcaggagctttttggcctacagagttgccaatgaaaggggttataattttcttgcatatttcttcaaacgataactcagcatatataaagtagcatgccactttacacaaatgcagatgccacacggctcatctgcattgtttgtgcgtgggttgtggttgttctggggtgggtctctcctctggccgctacagctttcggctttggcctgactctaatccacactaagagatatcctaagcatattccttggagattgggtgagcaaaactgaaatagttaaagtgttctttcagtaatgccaatagacatgcatgccaaatggaattttagcatattccttaggctatgtttgatactacgggtatgtacagattggtgtcaaaataaaccttagcaaaggggctgttcagattgatgctattttcaaccatacatttttttaagttgccaaaaaaaatctacgtttagtttattgccaaatttggtaatacataacaaatcctgtcaaaattttagcaatattgttatcttcccaaaattttagcaatgccaaaatttggtaaaagtttattttggctacaatctgaacaggcccacaatgccaaaattttggcaaattggcatcattgccaaaattttgataggattggcttaataatattgccaaaattctatacacatagccaatatttggtaacaaattaaacgtacccacataattgtcaattttaccaaataatgatatggatgaaaatatcatcaatctgaacaagccctacaagttggaaattaatcctccatacaagtaaaacatagcaacttattagtacataagcaattaagtattagcttaaaaaaagtgaaaatagattaatatgatttttaaaacaactttttatagaattttttttaaaaaaacacattttaacattcggaaacatgtgtgcggaaaacgaagtagtaaaggttgggaaatgttagtaccgaactcaatctaagtactactacctctgtcccaaaataaatgcaaccgtgggtatccgtgtccaacgtttgaccgtttgtcttatttgaaaaatttatattttttttaaaaaataatcatacataaaatactattcatgttttatcatctaataaaaagggtgaatagtcaatacggtccctaaagtttcgcttcgggctcaatttagtccacgatgtttcaaatcgtccaaacgagtcttccaaattaattatttgggttaatatagtccttggacccaaaaaagtgccacgtgagcacgccaagtcatcctcgcatgcagcggtatgaataaaatgaccattctacccttatataccatatagaaaagaaagaagagacacaaacaaaaaaataatagaccagcccaagcctagcattgttatggatggatggcagacaaaggaattacacgatcaatgcttggctacaacaatcataagtgacaattctaaaacgatcatacacatgtaaaacatttatcttctttttttctttcttttatatatggtatataaaggtagaatggtccatttcattcatacctctgcatgcgatgatgacttggcgtgctcacgtggcactttttgtggatccaaggactatattaaaccaaatgattaatttgaaggacttgtttggactatttgaaatcttaaggactaaactgagcctgaagcgaaacttcagggaccgcattagctattcaccctaataaaaataaaaatagtaatcataaaaaaaatttcaaataagacgaaaggtcaaacgttggacatgaacgcaaaactgcacttattttgggaaggttggagtactaatatagtgcactgtacattatggatccacagctttttactccatttgacgataattttttatgtttaggacaagatttagttaaattcttaaaactttatacatcaataatttctcaatggttagaaagaatgagtaaatttgcctttaaaagtagtataaagtaattatattttataagattattctaatacaagatcaatcgtcaaatttatgcatacctttttttattactccctccatattttaatgtatgatgctgttgactttttaaccaatgtttgaccattcgttttattcaaaatttttgtgaaaatataaaaatatttatatcatgcttaaagaacatttaatgatgaatcaagtcccaataaaataaatgataattacataaattttttgaataaaacgaatggtcaaacgttggactaaaagtcaacgacgtcatacattaaaatatggaggtagtactaaaatataccgaatgatgcattcgagaagttatggatggttgaagtctcaaaaggttgccagaaacttatcgtagatgtcatatatctatggaccatgagtgataaaaataatctaacttcagggctcctttggaacaaaggaaaaaggaagactttgaagtattgaaatcctttgaaaacaattcctatatgattgtttggaacaaaggaatgaggcccataaaatcgtttggaattcctaggaattttggaagaaatttaccgagaggcaagatcttatgttttctctccttgtctctcagaattctcctatagtgctaccaaacaacaaattttgcagcctactatggaatttagtgagacatgacatcatattactatttctactatctgtattttcaaaaatcacgcgcttcaaaaagtcctcactcttttttctccccgtgttattgattccagaaaacaaaagaaacaaacgagtttcatggaccatgcatctctactattataaaaaaatgaacatgtttttgtcggtattttgctatatcatccgtgtatgagtcagtttttaagtgggggatccact

SEQ ID NO: 9945 - DNA, 82412 bp, Oryza sativa
aaaaaactcgcatgctaacttgagacgatcggactcctaactgcagttcattattttctaaaaatatatatatccaagcgaactcgcacagtgaattttatcttaactaaacaatataacaataatattattaaaatagaattcaccagttgcaacgtacgtgtatttttttctagtaaaaataatatgtttggactcgtccacgctacgcccatgctttgtccaatgcttttcactatggtagactccaactcctgccatgtctcatcctgttttctgtttttttattttacttgaaaaaagaatatgagacaagctagagattaaaaaaaaacagaaaagggaaaaaaaagaactcgacaaggccttcatggctgtttttcacataaagtgatccccatcatcatcgacatgtccagcgtgaggaagattcttggtatcgcgcaacataataatactaaatgatagggggaaaaagacccatgtgagcggaggaaaatagtaaccttgaacactatatcaacttatttagctttaaactctcaatttagtcaagagcgagtacaattagataatacaaacaggttataaaagctgccatattaaatttgtgctaaaagtgaatgagagaggatgcagtacgtatctataactaactattgtattagtagctaggggtgaaaacgggcaagtacgattgaattatgacattcacatatcataacccatattatcttttaaattcagagccgggtacaggtagtaccgaataacatatcactcatcctatatcctatcccacactatttccttccaattggattcgggaacggatatcaatttgtatctctaattcataggtattaaatataataaggtaattaaagtattaaaagagatgcatcaagaaaaaaaatatataatattacatgtgagcacgtaaaataatgattaaccaatatttttattatgttttaggtggatttataataaattttcatacatattttataatacgagacatacgggtatatacatgtcttcccgtatcctaacccatattttcctaacaaattcggattcgaatcgggtaccctattttttctctcatattcctcccgcaagccttgggtcgtgcgggcggtcggtcgggaaatacctgcccctatttgactggtttaaaattatgtgtcttttttttatagcgagcagtattattgatctagttcctagaaatttaaacagtataaattcatatattagttatatgtacatatcttagggcgtaaatcacacaggactctcggataagttatttcaagagtgtttccattggtcaaataaaatgttgttttacgatttatcagtggcctgattttttcttatccgtcaggttagtcacctatacttgcacaggttatgcaccaaacttgaacgatataaaaaactgcaactctcgtacaaatgaagtgcaactttttgcttgttttatatttttggattaatctacttaaatttttatgtttatataaaccatactaatttttagtttcgtaatggcaaaaatttacagggaagcctttttttaaaaaaaactttcaggttagaaaagtacttgcttcaccacaagaaaacaattatcatacgtgtgagttgttgatattggtctaatgttaagaaaagagagtaaaatataggtctggtccttaaacttagactaagaatcttaacaaggaaaaaaagtcaattgcttaacaaataatctttgagttaaataacttagaagagggtttattttaagaatattaaagttgaaatttaagaataatttccaatccccttaaaaaactaaaaagaattccaattgaaacatgatatatctgttttgtttcgaacttccaagagatgaggcatcgaagaagaatatgctccagcaggaacccgacgccgctcactttttactccgaatttgtccacgccaatccttaatatattttttttaacctgtcgtgttggctcatctgatttggacgttcaaaagaattaaagaattactaatactagtacatgcacgtcgagaaagaaagatcttggaagtcgcggatgaatcgctttcagcgtatatataccaatgaaactgaaatatttactgtaccgatgtggaaagagttcattgcgatatcgccaagtacaacactgaaacaaatcttaattttgttccattctttttttgcttatcttgtggcgccctaaaagttttctaacaaaatcacttgaaatacagtttgtgtggctcatgcatgccctcgtggcacaatagtgcacacgaaaacgctggctatgaataatgagaaaagcataatcaatgacaaacgtcctgctgagtgcgagtgatgacaagggaccggccgtagcaccgttttcgcgaaaatcaagcaaaaattgatagtttccaaaccaattttaaaaaccaaaatttgaattcaaatttagagtaccttgaaatttgagtggtttcaccaaaatttctagtgaaaatagatttgggacctaggttggcaaggtcagttttcatgaaaatcaacccgttcctatcagtaatgaaaacccttcattagcaactcaatttacatatcaaaatgaaaaaaaaacatgagaaagcattgtcatttttctctatatcttgcccttgtttttaacatactcttgccatgaggtatctctcttttataacaaccatgtatgtactttttgaagataatgttttggcctttatcttaaaaaacgttgcatacaattacttatagagcccgtccgcaaattacaaatcgcatctcaattaaaaaaaaaacttaaaactctagtctagagagagataacttctattgttaaaccttaatactctctatcccaaaataagattatttttactccctcttatatttataacaaaataagtttatctttgagtaatcatcgcatcggtgtttatgaaaaatataggatgaatgtattggaagtagagaaaataggggatatttgcattatgatttaataaaataaaggtattttttatatttgtttatgcgtgagatgtagctactcctatcgcgatcgagcggttgatgatggactgattggattcgcggctagctattgctagggcaggctctcgtagtagttagctatagctagcttatcggatcagccaaggattggcgtgtggtaagctcacgctagaattggagagcaaagataggagcagaatttgttcggtcgccgcggaaacacaaggcgaaaagggcggtcctggattgctgatcaacgggagccatcggtgttggtcacaagggtaaacaacacaaaggcacgtactaatatggccttgtttagttctaaaaacaaaaattttcacccatcacattgaatgtttggacacatgcatagactattaaatatggaaaaaaaatcaattacacagtttgcgtgtaaattacgagacaaatcttttaatcctaattgcgctatgatttgacaacgtggtgctatagtaaacatttgctaatgacgaattaatcaggcttaataaattcgtcttgcagttttctggcggaatctgtaatttgttttgttattagactatgtttaatactttaatacttcaaatgtgtatccatatatttgatgtgataatcaaactaaaaaattttccccaactaaacaaggcctaactcgcgtatgtacgtttggcataactatgatctttatatatacgcgtgcgaattgttcaccgtgtacagtgaaagttgtccggacatcctaatacgacaaatccctctttcaatatacgacgatattgactttaagatattagttagaccatctatcttatttaaaaatttgatgaaaacacatgaaaatatgcttaaagaaaacaagtcacaaccaaataaattacttaacatatttattttcgaagaaagataaacggtaaaacgttatatcaaaattgaacagtgttatatgctccattctcggatttcatattgagatatttgatttgagattagaaaactgggaagaagaaagaacatgttactaacgtgttatgctggcaataaatcacaccggatcgatgagtggcctctacgcgtgacacggcagtcgtgacagacgagtgaataaaaaataaagaaaaaataaacgaaaagtaagcgcatgtcatccaatccgagccaacggacgcggcgccctgccgtccggacgagtccatggtccaattcttgtctgttaaataatcatggtggctgcgaccaaaacagatcaaaactagtacacgtcacaaaacaaaagaaagagattaaggtgatgtttgtttgatgtctaacattgccataactagttaaagtatagtggcataagtgtggcttagaaatagttagccaaaatgtggcaagcttaacttcaaatttaagagtatgacatgtgggtccttaaggttatgaaagtgtggcataacacaattgccatagcgagccaaacacatacctaagaaattgtggcataactaaagtgtggcgtagcaaagtgtggcaaccaaccaaacagccccagtcccattactactaggtctacctccttaaaaaaattggtttattttgaaaatatccaaatttatgtatgaaagttaacatattttaggatagagtaattaattaatgacgtacaggtactaaaacacctttcaaatttttattacgtgtactagtactggcaataagagtgtacgactgtacgagaaatctcatctggtaatcccaaaaacatagcagtgataactcagctgaaaaaaagaaagtaaaaaaaaaagtacttccaaaacaaattttttcaccctgccacattaaatatttgaacacatacatgaaatattaaatatagataaaaaatcaattacacagattgcgtgtaaattgtgagacgaatcgtttaggctaattgcgccatgatttaacaatgtgatgctacattaaacatttgctaatgacgaattaattaggcttaataaattcgtttcgcagtttttatacggaatatgtaatttattttgttattacacaacgtttaatacgttgaaaatgtatccttatatccgacaccttaaaacaattttttttctgccacgccttagcaaacagacaggcaggaggggaaaaaaagaattgaaaagaaaagaaaaaaaaaaagaaggtggcagcacgaggccacgagctttggggggccgtgggcggtgggccccgccccgcatcccccgcccagcccagcgcaccacggacggtggcgaggcgagggcgcctgccgcccacgtggaccctgacgccccgcgtgacgtcgcgccccgaggccggaatatgacacgcgggcccccccttcctccaccaccaccaaacggggcgcgcgtcggcacgccaccccacacaccacgcgagtacgtacgggacgacgcggcgcgcggctgctcgacggcttcggttctgagcccagcgcgcgcgccgggtggtttggttggttggttgggcgaagaagcgatcgaagccgggggtgtagtacgctcctcacccgactcgtttccgtccgggcgccgcgccgcgccgcctcgcctcctaccgcacgcacccccaacttgcgcccgcctacgctcagcgcacccgtttgagtgtacccggacgggaacctgggcggataaatggtggccttttttggatggatggtgctgaaagggccaggttcaatgaatcttcgattcgtgcgtgctggagtatactgtacagtgcagatcaggtgccactagcaaatgtttttgacaagtaaggtttggtttggatttcggtgattgcttggagtggcgcattcttgtcaaatgagatttaatatatacatataagatatggattttttcatgtggatgcaaccgtttctgttttcacgtggattcttgctaaatgagttatcctagtatattttttttccattgttgtgttcctcataaccaacatcgccttgtttggtagccaccgttacaattgttaaaagtcgctaaaagctgtagcacttataaaactgttgcaaccgcaaaatatcgtctaaacacggcctatattggatttttctaaaaaggcatgattctactttgtttccattaccttttctctaataagacaggtatatgcatctactccctccgtactcgtaaaggaagtcgtttaggacagcgacatggtcttaaaacacaactttgacttcttttttctataaaaatatttattgaaaagtgatatatgtatacttttatgaaattatttttcaacacaaatctattcatataatttttatattttcaaactcaacaacttgagagttattcatgatttatattcccaaggtttgacttaaacattgtcctaaacgacttcctttatgagtatggagggagtactaatatttaaaatccacatactctaaaacttcatttttgttataaacaaactttatattcgaagtttgcgaaacattcatatgtgattaaaattgtcgcaaactttttgttgcaagaaataaattttgttaccaataaatattcattatgtttttggaaggatgcatatttcattgaaaagaagcaactttcctccaaaataacatatcatttccatcatgttaacgcgaaaacatctattatataattaaagaaatagaaaaaggagcctccacgttcgctctcatggtctagaaattctcacattaatcggagaaaaataaaaaacagagtccatatagaaatacaatttagaaatagctaaaattcagaattaaaaaaataaggaatattaaaagaggagactagagtccatatagaaatacactttagaaatagttgaaattcggaattaaaaaataagaaatattagaagaggagtatagagtccatatagaaatataattaagaaataatagaaattcggaattaaaaataaggaatattagaagtagagtatagagtccatatagaaatataattaggaaataatagaaattctgaattaaaaataaggaatattagaagtagattatagagtccatatagaaatataattaagaaaaaaaatagaaattcgaaattaaaaaataagaaatattagaagtagagtatagagtccatataggaatttaaaactaactaaaatttggaaaaaaaaaagaagcctccacgtttgctctgataacattaatcagagaaaaagaaaaagcagagtccatatagaaatacaatttagaaatagctaaaattcggaattaaaaaataaggaatattagaagaggagactatagtccatatagaaatacaatttagaaatagctgaaatttggaattaaaaaataaggaatattagaagaggagactagagtccatatagaaatacaattaggaaataactgaaattcggaattaaaaataaggaatattaaaagtagagtatagagtccatatagaaatacaattaggaaataactgaaattcggaattaaaaataagaaatattagaagtagagtatagagtccatatagaaatacaattaagtaaaaaatagaaatttgaaattaaaaaataaggaatattagaagtagagtatagagttcatattggaatttaaaaccaactaaaattcggaataaaaaggagcctccacgttcgctctcatggcctagaaattctcacattaatcagagaaaaagaaaaggcagagtacatatagaaatacaatttagaaatagctgaaattcagaattaaaaaataagaaatattaaaagaggagactagagtagttattacacattagtagttttgaaaagttattgcaaaatttaaaattatgttgtcattgtaatatattttataataatataatgagaaaagatatatgcttttatatgagagaaaatataatgatgctagccgcgcaatctgcgcgggccaccatgctagttagcttctaaaacatgagaaccgtccaagattataagcaacaccgaagatgtaaaaaagctgtaccaccattcgtacttagacagtatgtcgtgctaggtgcaaaactaacattcacattcacgaccacattcaccgccacgacactggtatttttaatgaatatttttggcacttttttcccatcgcgtcccatttaggtgcacgcccgcggggtggcctcagcgattttgtggtgcccccgtgctgcctctccatctcttttatagcaacaaccagcgtatgcgttctcggtttttctccgcggcgctttcaccgctctctctctctctctctctctctctctctctctcctccgcttcttcctacaaagccgtgggcgctgctcgccgcggcgggtctctctcgcgcgcgcaacaacagcagcctcaaaaccctagctgccctcgcgaccgggtcagggccttcgattggatcggccattcggttcgttcctccaggtgcgcgggggctatcgaatcctctgttctctcttccctgttcatgttgattttttttccgagttctttttttttaaccgtttgatgcagcggtgggtcggggctgttagtttttttttgtcgtttcccctgctcaaatctgtgtatgttcttgtttggatctcgtagagtttgtttcgaagctttctgggcgattctttttttgaaatacaggttggtgttcttcgcctcagcctcttgtaaatcgagtgatttctcggtaggttgtatttttttcctttgcgatttgtaatagtacaagtttttgttcttttctttgtatttacaaggatctttttgctcttaaaagggccaaatttttatgggttccctttatttggacggtctgtgttcattccggaccttttccttttgccctcttttatggtttctgttcagggtgagcaatttggtgatatcgccaccaaatttgatggtttggtccttttctctcatggttctaggtcctttttatgaatccttcactgcaggatgtgcaaattcatctgatatgtttcagtttctacttgtttggggttacttacgttgatttgatgacaccactcgtaagagtggcaaatagttaattattccatttgatgagggaagtggaatatcatttgcagtgttaatctgctgtgctaaatggcactataatatattatagtataatactcttaatattttcggtaaaaacaaaactctttagtagctgatagaaaatgtcacttagaatagtataataggtataatgcctttaatagttgatacttgatagaagtgagtgtttagtggcttcacacacctactgaagacatttgtttgtttcgatggagactgcaaaactgatagatgggctatctagtattagttctaatggaatctgaaaagaatttggtgttcttctaattaccctgtggctaatacctaaccagttatgctgcacaataccatggggtacaaataacctgacttatatattcgatgttacatagattttgccaattccctcctcctatttactttacaaataaacgaaacagtgttatatacaagtatttgatataagtcgtaatgttttgttactgatattcacaatatgcttttttttgcaggatattgttggtacttgcattcctccgtctgttattcaagaaagccagtttacactgagagaaccttgctttatttggtaccactcacctttcctatcttctattttctgcccagagtagctacaattttcttcattggaccattggtactcacatcgttaatcatggtttcacgttatatgcaacgacacactaatctcagttctttgtgctttcaataacaagaaaatgtgttcatagtcgcggttaaagttgccaagagtaataacttgatatggtacccatagtcagggttaaaattgcgaagctgttaggtttagctacctgttaagtaagtgaaaccattcaattcagtccagatggcatctaccaatggagcccaactttgagcattagcatgtccataatattgtatgcatgaaaatgataccgatatagaagtatacattataaaagaatatcatcaatcatagtatttgaaactttcaatcttttgttaacatatgcatgtaaccactaatggttaaagttaattgtggagacactaatgtccgaaatgattcacttacagacgaatgcagtatatttgagtaacggaatgttgtacatacacaaggatttgctttaaagatatgcaaacattgaattgaatccaaattaaactgtaaagaccatttaccatgtgatctactagtgttgatcatgtcaaaagtccactgaattttttaaatagattttggtttccctttgttcttcaactgtcatgatccttcactattatggccctctgtagacattattttcaaagcattgcacaggatgagattcttgactgtggcttaactttttaattagcaggttcattggccttttgttttgcctgagtgaatgcaattggaaccttctgggtagaagctgaagcttagtttggaacttcatcatactgatttcatactcagaaagtggcgagaaatggatcgtgatgatatagctggtttcgtaagtggaggttgcaaggccttctgagttttctgacgaagcagatgataatagagttatgatatacagaagtcaggcaactggttcttttcatttactatttggttgacgtttgaagtttgttaactggaatggacaaagcatcatgtggccttgggtttggtgatagtatcaactccttagacacgtcccgtcattggagcactgttcagcatacttctgggcttaaagctactacaattgactattcaacgtattccagtttttctattgcaagctcaaaaacactaaaaaggaagcgaagtgctatggcaggaccagaaggtactggaaacccattacttactttgggtttagggcactcaccaagttcatctgacaatagcaaagttagttctgccacagcttatgcaatgtctccatcttcattgaaagaggctgatgaggagtcatcagctgatcttggcctgaattttgagctttgccttggcaatgatatggtacattgtcaaaagaaatcccctgttggtgctgagaattcaccattgacaaactctcataaattggatcttcagctgagtttgtctactggatcacctgaatcagctgtcaccaacacaaatatggtgtcaccgattattcacggtggcttggagatacctgttaccaactgttcaccagctattataggggaaggatctgtaccctgtacttgggttttcgagaagtcagtgatttcatcttcgtatgcctctgaagcaacatataccttcccattttcgaaggtacccaaaacaggggatgctgctatgtcttctccagtcatatcgtcaaccttggtaacaagtatgaaaagcccagttgcctgtacttctgggtcaattaatccccaacaacgcaacagtatcactaaaaactgtcagtttccaggatgtgttaaaggagccagaggggcatcggggcattgcatagcccatggcggtggtaggagatgccaaaaacctggttgtcagaagggtgctgaaggaaggaccatatattgcaaggcccatggtggaggaaggagatgccaatttcttggatgcacaaagagtgccgaagggcgcacagaccactgtatagctcatggtggtggtcgccgctgcagtcatgatggttgttcccgggctgcacgtggcaaatctggcttgtgcatcaggcatggaggtggcaaaagatgtcagaaggagaactgtatcaggagcgccgaaggtcattcaggcttctgcatctctcatgggggtgggaggcgttgccaatttccagaatgcacgaagggtgcacagggaagcacaaagttctgcaaggcgcatggtggaggaaagcgatgcacattctcgggttgcaacaaaggagctgaaggcagcactctcttttgcaagggccacggtggaggcaagcgatgcttatttcagggtggtggtgtgtgcccgaagagcgtgcatggcggaactcaatactgtgttgctcatggtggtgggaagaggtgtgctatttctggttgcaccaagagtgctagagggcgtacagagtactgcgtgcgccatggaggtggcaagaggtgcaagtttgagggctgcgcgaagagtgcgcaggggagcaccgatttctgcaaggctcatggtggaggtaagcgctgctcatggggccaggttgacttgaacttcggtgtcggcgcaccacagtgtgataagtttgctcggagcaagactggtctctgttcagctcactgtgctttagtccaggaccattgtgtccgtggtggtacattaggcgctgcaaccttccagttcgcaactgatgccaaattcgacgagatggaagtcaccccagtgaagggagatcctcacgcgcaggcaagcagcgacgaccagtctcatctcggtggtgctcatcctcctgctgtaccggcgatcacctcggatcgattttctgaaggaagagtgcatggtggtgggctactggccttactttcacggggtggaaaccatgcgaatgcaggtaactcaaagaatggcgcccttctaccatgatgacatgggagtgagattctcttcaagaaattggtggctcgcagttttgatctgtttccaagagtttgtgctgtgacggacgggaaaaactagtgttttcacatttcaccagatgttcttgtgatgcttggatttgttgttatggccctctcccgtgtgctatatataaataaggagctcgtagagcgtggagtaccgggctttctgtcttccgtgctattgtagttgatgtcgttgaactgcccttctgtcagaattcatgtaatcttggtacttcgtgtttatttgtattgtcagtgatttgccttgctgctttgctgttggaaaattgtcgtgtatttttgttgatagattatatatattgccttttcgttgcaagcctagctgttaatacgctcgtttcttgttttacaattattgcagctgatcgttctgttctttcttgccgaagaggctttctcatagatacagcaaggccataatacaattattttttctttgcaatttagcacggacagttgagtggaatctcccgttattgagttgataatcttcggtccagagaatgacaagaaaaagtatgcgagatcaacacaaggtccggcgcaaagccaaatctacagaatctaggattgcaactcgatgtcctggatgatcacacccatcaaatgggcaaatttacaaagcctcgaacatcagcggggcaggacaaaactggacaaaaacaatcacacccatcaggttgcgaccggttaggacattagtcgaggcaaagaatgaacaaaatttcctgctgaaagaatcatcgccctaagtatgtggttaagtgctaccgatctaccgtcctagtatcattcaagctaccagcgtcttctggcggtggctttatatacctccctaaagttttttgtcgagctctcttcttgattctctggatcttgtctttgctctgctgcttcctccgctccttctcctgctgcctcatgttccgctcccgctcgtacacgccttgccagaacacttcgccggttttcggccagagccacctccggtcaggatgatcctcgtcgaactcttctgccaggtcctcgtccatgctcttcagagtggcgagggagaaccattggattgacatctgacctctcctgccgttgagcagatgttgctcctgcatcgcaccagtctcggggtctacataaaccatcctccttgaactgtggaatgcccaaacgtttacgatcaactcaagaacacgggagtaacagtgttggtcctgtgcaaatcaacagagcaacgagacagaattagagaaggccataaagaaaactaatggaagtataatagtatccattcgaactctcactatgttttgaaattttcagatctatacatgacactacgtgtgagcatatttcattgaattcagctgaactgcgctgcaactgaaagaacattaaaatgaaatttgtttcatctaaataaagtaagagatggacgcaccctgtgaagactcaatatgcaatgccctgtttcatgatgtttgtcgtacatttgtgcatccagagcatctacaaacattctggaaaattgcagcatatcagtagtggcaaccaagtagctaaaactgtactacctccggtcacttttatttgtcgtttcagacaaaagttttggcttattttctttgtaaattccttgtctcaaacgtcaactaattatgaccggagggagtagattataagacaatcacattgggtggggtataaaagacgagcaatgcagctatataacaaatcaattgaagaaaaggctatttagatgcctaccatgatgctactatagcaagaattactttgaccacatgccaattgaaattgaaagagtttactttagaccgcccaatatctgcccaggtaatcacaggctacgctgtaacatttgaaagtattcatgttaacattcattgccaccacaccaattctgcgtactttaatgttatacgtttcagcatattgttaatctctaatttcagtctctacagcaagcttatcactgtgatacaaattctaattttacaagtttttaaaaggcaacagtagttggtggcagtgaatcctattacactttagtctttctaaatattgctaatttcatatttccatccctaaaactcaagtttatcaaggaaaggtccatgattacaaaatcatcacatatacatatcacagaaatggtaatttgcaattagaacaatgtaaaaagaagttaagtgctccctataataacaaaagtaacaataatgtgaagtgtgttcactgaaaaaactctttgtttcaaacaatattatcacatgtacgattcatttttctctagtagaaagataacaggcatttagctattttgagcaaatattagtagcagtgttggtgtacttgtgctttgaaatgtatacaccaacagttagctagtgacatcttccacttaatactgctatgttgactattgaattccaaaagagataatgtgcaccttgagaacattacaaattccaggaatgatctcgtaggcaaaacccagctttgcatcacagaccaagtgtctccatcattaggcattagtggcagggtatgcaaatcatcatcaagctgcacgccatacatcctttgaaaagctttcagaacagctgaccttcaagatagtaattgtgtagtggattagttcatccataacagcattcagttcagtttggcagcatcatcggaaattctatatgatgaagctaactgcttttggttggaatattgatattcataaacagaaaagtaatgaaaaaagtcttgcggtttagtaataatagtagaataaacttatgagttatgtccaatccaaacaaaatcattttaaactggagcatttgtaatactggaattgcagtctatgcagcatgtataaatggttaacctgcaattcccagcattgatcgcatcacagaaggaccagaaatcttggcttgctaggttcctttcatcttggtccatccgaacccaaaaatagaaggcatctccatgcttttgagtttgaatagcttccaaaagtgcagtttcagcctttttcgacaagtttgcctgttcagtataaattgttggcttaatcattatgcaagacctctctgctttgcattcttaaaaggatcaaagcatatgaataacatggttaaccaatgattcattcatcaagtaaattcatgatttaccaatcatacacgtcgattaaaattaagggggcttaaatgcaaataaaatttgatcttctacctttcttgctgtcactctccacgactgaaatcctatccaagaatttttatgaattcgatcaatcctgttggctagagcaaagaaagctccaaattcaccaagaatatctctgtagtacccattgttcagcagtggaagacgagaagaagcatcaatgtcatctgcgccaggccttcgaccttttgaagactaatcaaaaaaataaacttcattgatcaatgtaagtcattggaatatttggaaacagtcaattatatttggctagccatatatatgtttcatcaattacccttttatgatacatcattcttctcagactttaggataaagtttagatggattagatatacagaagcttgagagctaaatggatttataattctggaataatcccctcaaagattgagaaatcatgaggatctctccctcctgaagtggctcttcaagccacatgcgacagtttgcaagttatctccaagttaacatttagaaatactgttaggttttcatcaaaagttggaaattcccactccatattaggtgaacatatgtaacaagtcatgaaatcaggtatataccagtttagaaaggagtggtccaaaattttggaatctacaactactgctctttttttcgtttataacatcagaaatggtttcaatgaactcctagttcgaccattcaggtaaagcgcaaagagacaacaaaaacttaccagaccaattccacgataaagggagcttctatgcagaaagggccaagtcccctccccaaagaaaggttcgtatatagaaagtggctgacctgtccgctccagctccttatcatctctttcatgcaagtcattcttcatcctctctactcttttgacatttctatacacttcctcccatgttccatgaggctgttcactcctctctttcagctgcataatatcaatccatccacttacttgcaagtgttctttccaaaactgtaaactgcatgtcaaatttaaaagcaattgcatttgtagtttgtacttacctcctcttcttccaatctctttttaatgtttgctatctcatctgctctctcttcctcccatgccataagagagaacgtatcatcaatctttgatgcattactgtgatgatcttccatttggttgctgcgccacttctcctctagtttctggagtatattgtagccagccaaagtcccattcatatggtacaagtgcttcacatcctcaaaaagatgccatttccactcttgtttcaaagcaacaggaatctccccagcagttaatggggttagtacttcagcaggaaacttgataacgttttccaatagcacagcatacccttcaatggtttctgaagccataagattcttggcatggacctttccagctgatgcaattttttgccccagaacagatatcttcccatttgatactgcttgcaatagaacttgtgttaacttgccaatgttcttacttggaaaaagaagtgcattcatcccatcatcaatctaagacatcaagataaatgtgtcagttagcatcttaaaatctacaataactggtatttgagctgacaagtacaatcctgatagaatatgatatgtatccgtgaacatacatattttctgataatttcaaggtctggagctataaccagcttctcaagacacatagcttggactagcacactcgggaaggattgctcgttaaggcaagaaccatatataacaaggtcagatataccaaggaggttgtccttatcttcagaagcaacatgttccactgcaccccttggaaagccaacatttaaagaaacagcctataataatcaaacagcacaagcaattagaccaaattttaaagctttaaaacttctgaaaagcaaatttagtgaagaaaggcagaaggagcgctaaataataacctcaagggccatcctatgcttctcagttacgttttctgccaagattctcactttgagttcaagttgtgtgctattctcagaaggatactgttgtaacagagaccctactgcttgtaagacaagtgcttcttccatcaaaaaaccaccatatgaaaattgactaccaacaatagaaattacaaaatcactcggacttaaacccatactgactctcacatcttggtcataacttttggctgaaattctatcttgaaatggtactgcaggggaacctggaatcacgaaatagttaccagaatcaaatgcagcatacatcacctgcaggatgcaaatacagttaaacagtctatttttaggtcgtacgactatattcaatgacaataagttatatgatccaaaagtaaataccggcaatacatagttggggaaaacaataacattcgccctactgaaggcctctttccaaccatctaagatctggatcattccactagaattatattcactaatacgatgagcaagagaactttcttgaacattccaaatgacgggtatggatttgaaaggctcctgcagaagactgtagatagtctaaatcaaacaatagattttgtgtaaactttaaggtatatcataatgctaaacaaatcaacaaacagctatagaacctgttgtttcatacctaccttgaaaataccggtcttgcttcaatagaatttacaagtatgccatcatagctgcagaaataatgcaaataaacctgatgaggaaatgattacgaagtgaggctgaggccacatgttatgcaattgtacaaagcgagaaaaaatgtattgcaggatacaacaaaatgagatatatacttcagaaacttactctagccaatctacagatatatgtaagtctgtgtcctcaggtaaaaggtcaactgtgaccccgatagttctccaaatattagtacaaggaccatccttaaatgtgaaaacctgcaacaataatttgtaaagggggtcaagggcaaaatcacaaaactattttttggcgaaattatagatcaaataacaaatgttaggtcagattctagcacccaacatgctacggatgctaccagtgtcagaaactcatgcataatgttctcattcagcacacttctcttcattccaacttttttttctttttgcaagccagaagcccagaactgacatattagcatatgcaacttttacattactggatactatcacaattcacacatgatggaacctgaacttattgcaaagtatagaatgcgataacaaaagcaaaagcaacaatatacccaacttctacgataataaaaaaactaacggaaaacataacaagagacacaggttgcactcatttcgttcgaccggtaagttcactacgcagtaatgaattcagagcgaaccagttcagcacgcaccttcatttcgtagcccatcgcctctagcaccgaggcaacgctaaccatctgaagctgcattgcaccgggagagagatccccaaacacctacaagggagtccaaacacaaacagcgaacgaatcaaaaaccccacgtcgcgagaagaaacttggcccaaatcctccacccacaacaccacacaacccagctcaactcctcaccatggcaagtcgcggcttccggaccccgaacctcctcacgggattcccgagcttcgccaagccgtcggcctcctccctccgctccctcgcccacctctccctcagcctcgtcggctcgaacgccacgccctcgcctgtctccaccaccccgaggccgcggggcagcagcgcctcagctccccctcccctcccgccgccagctctccgcgagggtagcagcatcgtcgggcgctcgaagacggccgatccggggaggaaggcgacgacgaggatggtgacgaagaagaaggccgcggcggtgccgatccactggaggtagtccaccttctcgaacagcaggaaccgcgccagccgggatctcgcgctcccccgccgcgtcggccccaccacggagcgcagcagcggcgacggcggcggcgggtggccacgcttgtatccccccgcccccgcacccgcacccgcacccacaccgccgccgtcctcgagggaccccatggctgctacgctagggcttagccgaagccatgaaccagtagtagcagcagcaacagcagcagcggcggcggcagcggtggtggtggcagtcgactgtgctggactcgtgagcagtacaagtctctctctctctcttctctcctctccgcgaggcgttccgttcgctttggtcttggagatggggatgggaggaggaagacgaggaaggtggtggcgtttaaggcaacgcgagcgtggcgaggcgagctcgcggccgtccgatctcgatccgacggctcacggcgggggattcccgcgcccggagcatggaccccgctgtctcgggaaccggatggggatgggggccacacgggccacggccgcctggggctccgcgcgctgtcgccaactcgcctcgccggggtaggtatggcaggtgggaccacgcaccgtccgggccccagctgcagtgtctgggtaagcccgtgtagcaggtgagaaatactactcgcggctcgggcgggggtcacgtttcggtcttttcgacgagatgtttttctcgagcagcgctgtggtggaactggaaggtgatggaaatggaataaataattaatccgggcttagtaagataattccgtgtcattatcgtttcttggcacgcaatggaaaagtgttactaccacgaactaaatcttgagaggaaaggattctgcaggtggtggcggcagctttgattggtccgcccgtaaagtttttcagcggggtggggtacacgggggtttagatctttatttttcggggaaaatgaggctgtgactgtgaaagctcagcacagccacagcagaagcgtttctgtgaccgaaaggcggaaagatcgcaaccgtggccgtgccaaagtgtggatgtgcaggcggccggccgatgcagagcgcaatggcggctggagaatgtgtagaaagcatcgcctttgtagtttggcctccctgggaaccgaggaatttagcggaaatttcaaaagaaacaaactaatttctgttaaaagaaagttatacaaaattcttgtgttctaaaggagactttttttttagaattacacagtacaatgcagacactcacaacgcacgcgcattcatccctatgaaaatatgcacgcaaattctacccctacaagcatcttcgaagactgccggcaaatcctgaagagattgacgaagtcaccacagacgcctcgctgtcgacggatacgtcgcctaccactgaaagcacaagtcagcaagaatatactaacatggattcaaacttaaagagaatccgctggaaatttataatcctgcagctgtaagtgggcattttagattacgcagttcattgtctttgggaattaagaggattcgctcattagactaaactaagtgggacggtacggtttgggcgttggatgcttagttcttaatgacgttagcgactaacggagtagcgtgttaacacgtgcaaacaaaatcttcatgggtttcctagctactaatggccaatatgagctggagaatataagcatgcaaattgcgcggtcatgtgcgtgttgaatgccaaagcgtgcaaagaggaggacctatctgcacggcagctgacattgatttgctcatttgcatagtggtagactggtagtggagtgagattttggacaaaaggggctccatcacaagtaggctagagattgtcaccatctcttaggcagcgttctagagggtgagagagtgagtttgtttgtttcgtttttcgcgtacacgtttcccaaactactaaacggtgtgtcttttgtaaaaattttcaacggtgtgtcttttgtaaaaattttctacagaaaagttgctttaaaaaatcatattaatccatttttaaaatttaaaatagttaatactcaattaatcatgaactaatagctcacctcgttttgcgtatcttctcagtctcctcaatcccttcttctcaaacacacccttagatctgctcgcactaaaaccactcatcgtcgagactgatgtatccgatcagtaatcagtttgctttacaatcaagtaaacagtcagtttaatcatggcaatccaagcacaataattaagcattcaacaatgcgctctcccatcatgaacgtgtactgtagatcacaacagtctattcaccgccccagtcgtgtgctgcagttctagaccaacggcagctcagatgacagtttgcaacagaatgcaatacattctcagtttctcacaggactggtcggaataaggtctcctttcaagcggatgaattttggagaattttttttatgaattgaactaattcatgcaaattcttgtaaaattcatgcttggttatttacgacccacatgtactaatcatgcaaagttgaaaatgtttgtggtaaactaaccagtaatatcaaccagaccaccaggacgctaggaaaaagcaaatggagcaggtagggcaataccccacaggaatcaaaatcatatggtccattctccgttgtgctgtttctgaaaaggcaatcatatttgatttatcgagacaaagacaccaaggcgattgacccacccctcttaaaagttgccgacacttgtagttcctgctcagcggcagaaccacaaatcgcggacaccggtggcaaatatcagtatatctcagctccgagcttatcctgcactgtagcaaaattagcttgtggataactctgtatatccagtgattctatttcagcccagtcctggtcagcattccacgagaatccaagctcatgtgctgggaacagatgctatcaaacatcaatgaacatggcaattttagtatgggactcaaatatgagaccaaatgctatcaacgagattataatttttcttaaagaaaaaaacatatgttagttgcaaaaagggcatcagtcttacaaagttacctcatccattccaaattatagggcgttctctttttaaagtaaatcaaacttgataacttttaactatttatcatactaaccatatacatgctaagtattatgcatgttatattactagatatatattttaaagtactttcatgtgatgctaatttcatatttattaggaacataagttggaataaattaatggtcaaattatatcattgaagaccgtataaaaaatatagagcttataatttcaaatggagggagtataatctaacaaagaagcccagtatcaaacagttattaggcacaatgagataacaggaacttagaggaaaaacaaactcaagctaatgcatcaaagatgtataacaatgcacgactgaaagtgacgtgaacttggtacaaaggcagtaaacattttcttttgtttagttgttgcatcatccttaatgtccaaacaaatggccaaaacgaaagaacggtgatattttatacttggacggcatgtcaacacatgggcatctgacactggaacaaatagtttcacaggtgatctggtactaatctaattaatgttaggtaggttaaaatataataccagcgaagaagatatgctacaaatagcagtaactgcagcatattcatcctagttccaaacttgaataaagacagatgcaacgtactcaagaaagacaaatggacaaaacaccttgaacctactctggcttttcttgtaaaaccaggtggcatgcctttttgtttttgttttgtggatggatgaaggaatacagctattaagagtaatgaataaaattgaattgacctggtcacgaatcgtgatattcctacaaagacatggccaacaaaaggagcaacatagcttgcagacaaaactacgatggtacaccatggatcagctgattaaaaaaaatatctgacaattggccattgttaagcaacaggctccaaaacttcagtaacacaaccttggaaaagtgtgtcatatctcaagctcctcgtgacatcaaagaaatgagctacagcttcttctggtgtttttacaagaacaccatggcccaagtttagtatatgaccttttggaccagctgatttgacaaccctgcagagcagaagattgggtgaagaaccattagcagcctccagtgctggttccagaaatgtatttggaatgtaatgaatgagtagaaggttcagtccatcaacagatacaactcctactagaccacaaacaaatatcaagggcttaacagtgagcatagctgtatttatacatgtttcacatttataccacagtataaaaaagcatgagatttgaaattgtgaaataactatatggttggtacacctaatccatccaaaatatttaatcataactgagatctgtaactatatggttggaactatatggctgctatttaatcatatatctgagatctgtggttggatccttaccaccaaatccatcctaaatatttaatttgtacattaattctctttcttgattaagtcatactatccagcacaccttgacaccacccacctgacacccagtgatgccacccacacactgagcgaaaccaacctcaacacctcctcacccctcctggtgcccatatccacatcctacacctccccctctagtgtattttcgttttgctttattttcttggctgtgcgttccgtgcgcaagctgactagtaataataaaaatgcatggtgttcatctattacttgttctataatcaagagtttaagacattcaagggtaaatgctgcaaaaaaaaaatcattcgtaaaccacaaaacacagatcataaacgaattcacttgcgcaaactgtacatatatgaaccaagttaatcaaagatggcagcactagaagatgaatgatatgagtgccataatcacatgatacaaaaacacagtgtggacaatttggagacctcactgatgaagcattctcaaatgtaagtattagaaacttaaatgaacagaaaatgaaaatgcacaatgaagttttaactaacctatgaatttcatcggtcagtactggtaatggagaaaatagaaatgctgggtcaacattcccctgtacactaattttgttaccaaggcgtctccttccatctgccatatccactgtccagtcaagaccaataacatcgactcctgtgtccgtcattcgctcaagcaagcctccatttccatttatatagagaacaagtggtacattggggcattcaatcttaatcttattcacaatctgccaatgaaatggttccatgaaattcaaagaacagaatgaacaacaaaattcaaactcacacaaactttacaaactggaatgttttggagggcaagatgccaagatcaatgggaaactaagtcaatatgcagtcttgcagatcagctaaactatagtgaaacattgcattcaaatgcatgtatatgacaacgtgaagctagcattagcattttacatttgtttctgattgcttacaacggattggttctttatgcactccttgtttatttatgtgtttcttcacaggttatgtagtaacttgcaaccataaccataccaagctcgaatgcgctgccagaagttgtgtggaatccaatcaattgataaagtatttgtttaaatacatagaggcatatttctcaacattttaaagaacttcagaaattttagggggtatgctcattgatgcagtactatacattgtagatccaacctgattaaccttagagcagccacccatcatgaaattagtcataaggattaaggaagcaaacaggaccgagaaaagtaaaagtaagctacctgcttgatatatggttttgaccactgctcccacacatgaggtggaagttgtccaccccatgaatcaaatatttgtatacattgagccccagagtttacttggtaaataatgtattcagatatggcgtctgcaaggtgagacaaaagtccccttaacacatttggtgctgtgtggcacatgctctttatatttgtgtaagtgttggtcatccccccttcaacaacataagttgcaattgtccatggggcccccacaaatcctagcaaagcagcttgtccatcaatctagagggtagaggagaaagtgagatgtatcggtaccaaaataatactggatcaaattgcataggaaaactgaatttaatccaatacactctcacagaatgatacttatacattgttgatgttcccaaacagttatgaaattggagaaaaatatacaagtagagcagacaccagtaaccaaattaccaatgtttggtcacaacctggtctaacctggtctgcaactcactggttgctggaaggatttaagtgaatcacacaatatcatgaatcccaaaaatttaaaacaactattatcacaaacattcaaatcaagcatagtaaaggagcagactctggaaataagcatgtgatcgatgtttagaagagacggtgcagcaatgataggtccacaaaaatgtcaagacttccttaacttgcttagtgtttatgaaagccaaattttcctgatatttaattttagtcagttgtcaggaacggcagaagaattactcgactctactaatgaacaccgggtaattccactaccgttttgttttgcagatgctacacagcgggcttgataataattatgcactattgattccaaatcaccttagtctataaacatgacacgctgccagcaaatacgcatactatatttcagcaccacttgcaccaacattaacaaaattgtatttatataagtaggtgagtttagtggcgacaatacaacgccactagcctaacgaagtagctttcgtgaatcagctaactacgccagcatagaactagaatgtaaaaaaacctctatcccctattagcattttcataaaaataatgctgaaccaaattttacttgaatcctgtaaaggccaacacagcttgtcgttttactttcacaataactgccagctcatataactagatttacattgtaccaattcatcatgagcccccaaaccgagtttcatacaacaaattttaacagaaagggggttttccataccacaaaaatggctgcgcattacctcagtgcgtagaatcttgagcgactcaccgacgaaccggagcttctcgaagtcaatgggggtgagctccctcacctgctcctcggacctcacgggagactggatcacaggccccttggagtcggagatatcgaatggcaccccaatggccggcagcggcgtgagtatgtccgagaacaggatgacgccgtcgggcgcgaaggcgcgccacggttgcagcgtgatctcgacgatgagttcggtcgtctcggaccgctcccggaacgaggggtggcgcttggcgagcgcctggtactccgccatgtaccgcccggcctgccgcatcatccacgccggcggccgcggcagcccgtcctcgcccctcgccgcccgcaccagcagcggctcctctggacatgcgggaggcccagatgcaggtcagattagggcgaaaatggaggaaaactggaggagagagagagtagtaacagcagggcggttggttttaccagtggaggaggcggttgcgagggacgcggagatggcgggaaggccgctgcgccggcggtgggtggtgcaggaggaggaggaggccggcgccgcggcgaggaaggcggcggtggccgtcgcggagatcatggcggtggcggcgacttcgcggcgtgggcttaggtggctgttttgcttatctaatcctgcttggggtcgggagtttgggtttgggtggagaaggagcaactgctggtgcggattccgcctccgcgccctcgtggcctcgtgggccaacggggaaggacctggcatgccaccgtggctagtacgaagagaaaaaaaaactcatttcaagcctttatttattttgtattacaaacatttcgaataaggtccctttttacattggccctaatccattttgttgccaaaatttgacccttttttggacttttattacgtggcattggacacccacaactctagcaacatactccatgtgttgctcttatatgtggaaactttttgtaaactagtacttcatccatcacaatttattcatcacataagattttagagatattctcaaaaaaattattattttaacaaaataccttatgtttatttataaatgtgcatcgtggaataccatgcatgcgtgcaactatatgcgtgtagccaatcaatattaacttgaattggttcaactcatgcaacatgtagcgcccgttccgtcatggcgcctagcgggaaaactatctcttaaaaaccctatttgcgaaagctgtttctttgcttgtgatctagtgtccgtgccatctcagatctcaaatccccgatctatcgtcgaattcaatcccgaatccaaatccttccaaatcaatccctccgcaaaagtctatttcgcctccctcgggttcgatgggccgaatccctctcggcccatctcccatctcctctctctatctccctctctctctccgctcgcgcgggcgtgcgcgtgagccgcgccgagcgcctcctccctcccctcgctcccccctccccgcctccatccctggcgagcaccccgcccgcgaaatcggcccccgcgcgccgttgttcgcgcgcgcgcccgcgtggtcgccgcccgtgccacgcctacgccgtctgcgtcatccggccccgcagccctgccgcgcctgcccgcgcctgtcgcccgtgtcgccgcttcgctccacaccgcccccgccgtcatcgccgtcgtcatcgcccggcccccgccactccacgcgctagcctccaagggacggaggcagagctccttctccctctgccgcgtcgcccccgctcccctcctccttttctcaaagaggcaacgggcaagccccctttctctccctccttttcccttttttcctcccgccggcgtcatcctccctccgccctgtcgccgatttggccgctagccggagcgccagctcgctggcttgaccgtccaaagtcggttcccctctcccaaaccgacattgccatcctataaagcccaggcgccctccctctcttctcctctcgttgtcccatcgcctccactccattgtcgccgcctcccgtgctctgttcgccgtcaccgtttgtcgtcgcgcgtgtcggaggagccgacacgagcgaggacgcggaaggggactccgggcgcgccctcttcttcctcttccttggcccgaggccgaaacgatcacgtttcgcgccgtcggctctcgtcactgcgcccgcccgcacggtagtgcatccctccgttctccctcctcgttccatctcctccccttagactcgggtagtagcacgagtagcctcttcgtagctagccagcgccgccccgacctttgccgtcgctcgccgtgtgctcgccgctgtcgccgcccgagctcggaaacgcctctcgtcgccggccttcctcgatgcgtttcctcctaatccggcgcaagggacggattcccgtagccgcgtagatgctctcgccgccgggaatcggcccctcgtgacctcgtcgccgttttccccttttctctccgctggtggccgccgccgcaatccgccgccgtcgagctccctccagcgaatccgagccgttggctcgactcccctcgtcccgcgcaacttcccggtgtgctctctttcgcctagatcgccgtgtttcgctccgccgctcgccaccgccgtccgccgtccgttccggccggcgtcttcttcaacctcccgccggcccgcgttgctgccacgtaggcgccagctcggccaagaccgggtcgagccgaccccggtcagccgctccctccggccccgctcgcgggcgcggtccaccgcgagccgtgaggctgcgcgtgggcccgccgcatccgcgtccaccgcgaaccacgcgcatgcaccgcgccccgctccacaccctagcgccgcgccacgtgctccctccgcacggtgagccgagccgctggcaagcgggtcccacccgggaccacgcgagatggactcggtccaccggcgccctctctctcccctccccgcgccctattgggccgtgtcctcttgggccggccggcccatttagctcggccgagccgccccttttctctcgggccgcgccctagccgcccgagggaagtctacttcccctccatcttccttttcttttccaaaagggtttaattaaatcctttttcctttagaccaaaaatctaataatcttagaaattcaatatcttcccaaccgtaagtccgtttgactctgttcaacttccaaaattcctcgaatctcgagatctatctaatggcacgctgagaggtcattaatagggccttattttcgccgtttgttgagttgtcccgtttcgcgtgtagtttcggagcccgaagacccgcagtgcgaggatttcgaggatcaagctcaagatctcgagcaaggcaagccacctttgaacatcttgagcctataattgaacttaattatgttgcttgaaaaatattatgcattgataggatcacacttaatctgcttgtcccgtctgcaaggcagattggcggacctacctattttgttgcattgatccttcctctgttaattgctatatcatgttcccttgtaaccacatagtcgtgcctcggtaatcgtgcactctgcacgagtatcgacggtcgccttcaaacttaaaatctgaaaaacatattgggtaaaacttgggttttacaaaagacttggaaaacccgacacctgggtcggtgcttgcgaactaaatgaatttccaaaaccgcggaccggggaacgtaccgggtgtacggtttcccgctcttgcacttaaggatcgtttccttggaatttcatccgaacataagacaagtacgaccacatgggtggaatgggacacccctggctgagtaactagcttatcaggggagccttgatgccgagagacatgtggattcaccggggtggtgtcggggaggacccccgggcttcctggcacagtatggtctgggacctaacctgttgttggtctgggacccctctcgtcggcatatggtaaacctgtgtcggctttcgaaaatgccttgtcatgaaagcttggaggtctcccgacgtggctgatccccacgggctgggtgatccaggttagtaatgtcgtgtgggtaaagtgtacccccctctgcagaggttaacaaactattcgaatagccgtacccacggtcatgggcggatgtgaggtgattcctagcgtagttttgttttactactgcttgtgaaattgctgttgtggaaaggggatcgatgtttggaaaatctgcagctgatgggatcagctaggctcgggtggccgtttgaaagttgtaggcccgggtggccgtttgaaagttgttggccgggtgccaatcttgaacaattcaaaagactgatacattgcacatactccgaccggacgagacgcactgtctcatccgtgtcgtttgagaagcactcacttagttgatttcagaaaagagttcaaataaaatcaattgcaaaaacaacagcctttccttgaagcctgcattaaacacttatttctcatggcttgctgagtactcccgtactcacccttgctctatataaataatcccccccagttgctggagaagatgaagcggatcccgctgacgaggagttcttccaggagcaagccggctacgatgagttttagggtttcggcctagttcccaagtcgcgcctgtgatgtttggtccaagtcttggcttccgcttcccttttgtaatgcagttgtgagctcgggatctgtccgcagcccaacatgactgtactcctactctataataaagagacctctgttgctgtgatattctgtcttcctgtgataccagcactgtttcctgggactggtatcgattaacaggttaatttggagcgtcacgggctagtctcgctcggggctagttcagggcgtgacacaacatttaaagtgtaagttattttttattggaacgaaacaatagagaaccgccttaaatcaatttcaaaatgatgaatgtttggtgtcctttcgttgctctttgtttatggaatgatcaaaatgggatggatgggactatttgagatggccaaaaaaatatataaaaggtttttttatagacaatatggctcaccaaaaaaaccttcaaaatgattattttcttgttttagttcaattcaattcttccatgaacaaaagaaagaggaatccaaattactcatgaagcatcaaggttaactaagctctggggagctttggtgctttagattttttttcccaagagaaaaactactgtcaaacatttgacatgctcaaaagtttcaaggatgggattaaacttgtgttagtggaaattactaaacacatgtaattggaaggtgaaaaacaagaaactgttcaattattgaagatttgtgaaacttgtccgattttttttaataaaacgaatgaccgaacatatgtcaaaaatgttaactgtcttatataaaaaaatatagtttatataaaaaaatgaagacagtataaaggagtataacacagataatgtttcggatgaaatcggttatattaaaacctactgggaattggcgagctgagagcgattcggagcggcgtgttcgtacgcagaggcatccacgtcgcccgcgagcgctgggaggcgggcggaatccgcgccctctcgtgcgtccgcgccgtgcagctcccagccgttcgattcgtcgcagcgacggctaagatcgatcatcgtcaagagtgtggtggcaatttttcaaaaaaaaaaccctccgttgcattgttaatgtgtttagaacccaagaaatacggtgcgacgttgtggtcttttacgtataagccctccataaccaagaaaatcttacatgaagaagagagaaatctaaaaataggaccgcgctctgaaaaacgagcatcaaagggcttttttgaaaaacaatatatacctataccccttcccccaaaaccctagaatcattgctttccttcccctctccgccccattgacgccccgcgccgccgcttcattctccagcaccaatcctcgcccctgtcggcatcgaaaacggagggaagtgcgcgtgctgatgtttaatcatgcgatgccaatgatgtaagcgcccgacactgccgcgccctgctgcccgtcctccattacctctctctctctctccttgccgttggttcctctgagctcaagctcgatggtgagaggccgtctccgtccgtcggcgacgagtcagtctatctggctttcaatcgggttaggtcttcgtcctctgcatcacctcgtcgtcgatttacctgtctccacaatccaagcccattctgccttcagatctggtgacggctgccttgcagtagccggatttggcgagctcggggggagggggaggagcccacgacgatggtggagctgaagcggatgacagccaccgtggtggtgtagactgattggcccaggaggcggacgcctcgagcttgcgagaagatggcgtcggcacggtgttctccaaggtgggggtccccctcgcgcctttctctcgcctgctttagacaatcacgagccgcctcgcatcgcctaccgccgccgctgcatcctccgtcctcccctcgctgcttcatctggtgccgcctcccataatccagaggagggctccatatggtggtgcagcgcttgatccggagcagctctgatgttggacacgatggcaagccaagggattttaccaccagcatctcctggccaccctcatcacccccctgctgcctcctctaccatctcctgctttgaatcaggtttgtccaaatcttttgcttgctccttatattccatcgatctgtttctctattcttaattggactatatccattaggaaaaaaagttgtattagcttattgctaatcttctacaagtagaataatataggttggtttcccttgctctagaatgatctagcatctgctgttatgcatgcttggggtactgcattttaatagttggctgaaagcctttatctagctttgcagtgtaatgtttacattttcctttgatcaatttcagattttttttaaaggaaacaatacacggtgtactcaatctctgaatgatgaggtcagtgacaaggtaccatgtctattgataaatttgtgccacagtttcagatttcataccgaactgtgtcgataaacctgtaaactcctcaccatcaaaaaatattgtaaagataggggactaaaacatatgcaaaatagttaatatggacttatatttttcagccgcctaagattttctgagtacaccaatcatccaactgaattttgaatttactctaagtaccagatgtgcagggtgttcattacacttaagattgacacttaccatttattttgtatgcatgcatgttttatttttggtcatgagctcagagaatcgatcattccttttctgcatggtcaacaaggcctttaattgctagcttgctgatgatagtctagcaatttggtccagcacaaaaatgttaagtttatgaggaatctgtttatttggaaaggaaaaattgttgttagtcatagatggaggctatagcccaaactaatgtttttttctaaagaaaagatttctttaatttagtaatatactagaaaatagacgtggctttgccgcataatggaccaaccagtataaaataatccatctgtttcatattgatcaacgtttaacacaaattaaaattttcaaattgatcatcacccccttcgttagacatgtaatattattgcatttaagcatcaaaattgagtttgcgcatgaatgtaggaatttgaggtagtaaagctatcatttcttatatatggggctcagaaggagttaaagtgtgcgtgtttcttgatttttccctatcacatacttacattaaaatgaaatataggaaagttaatactttttgttggtctaggtgaaaaaagttatataataatcaatatggaatgtagggagtctgatacgtacacctaatttctttatttatttaatgcctcaaatgatgaaactttacccttttattcatatattaatttaaagcagcaagacattgaattcatggacataagttggaagtcgaatatatgcgcaaaaattccaaattcctatgaaccaaagtaatgaaacggcttattcccattttatctctcctcacagtggcggagctagaaagatttttaaccctaagcaaacttcacttctagtaattgttgtataaatttcatcatcaattcattcaataacatataaatttagtggagtttttgtcggtgagcatgcgcggccacctgggctagccaggcggtggctccgcccttgcctctgtatgtctataaaaatcgagaaaatctattattttaataacacaattcgaatgcatctgtctataaatgttatgcaattcaaatgttttctcaaaggatttttttcttctgtaagaaaatactgcattaagttttaatgcagatatataagtttttggtagtagcatttttttatggtgagaaataatgcattacattttgaatgcacgtgtatactactgtgcattcaaaatttgcacgtgtatattactgtgcattcaaattttaagttattattaagaacattttttccttgtgcaaaatgtacatagaacacaatgcatctatatatgatgctgtaaagataaatgtattctgtgttttctggcaatgtcgtacatatatttgccttttgagcaattcataagtgttgcaatttaaatctaaatttaaacccaagcaactagtactcatggtacaacaattttcaaaaagcgggagaactctgaaacaaaagatacattaagagcatattttgaaacgaagtacaccattttttttgttgaagaaatcattactacgcaatactctgcaatttgaatgtactttgggagatcatattttttattacatttctgaatgtttgtatgcactactatgttaaaatgattttttttgtgatataaatgtatctgagagttcatttggtatcagcataatatatactgttcatggaaatgtatttcacttccacattatcattttttaacttctgtgaaaagggcgtatggaaaatgtatatatgtgcaccttggctctaccaattgggtcattgagcatttgttttttaacattattttaaatcatgcatcatgcacaaatacttgtactccatttttgcacagtggtttgtatacgcatgcaccgtggtgcagtttaaatttgaaatggccccgtcccaaagacatgggtcccaagcctaacaattgaatctaatcgcacagtttctggaattacatgccactctacaacactttaactgctcattggtataaacaagcacgtatctcaaagcgggctaaatggtcaggataacaggtgcaactgcagttgggtgctcatcggcgtttccgtgtaggaaatggtgcgggagagagcaaggtgacacgtggcagattttcacgagaggcgaagcttgatttatatgacgctacgtggcccaatctctggtccgggttaaaaccctgaaatcggtattaaagaaagatatgtgcatactttggagggtgaccatattttttcctcatagttcctagcaaatatatagaattgtcctctttgtttaaacttaattgagaagacattatgacaattttcaagttaaagcactaggggcttcccatttggaggtgtgagtccccttcacctctgtttctccttgacgcgatctacacctttctttttttggcttccaaatcttctatggtctttgctctccatcctgatttgttgtatgcttcttctgtgcaatgaagctaacaaaaagtccaaagcagagctttgcttcagagattctaaattcagttattttagctattgtaacatgtaatagtcatttgtttattgtgttcttggctcaacgtgcagctctccaattatgttccctttttcgttacaacaattcagtttaatgtggacccaggttctagaatgttttatgtataatgtttttagttgaataaatatccataatccatatatgactatgcataatttccagtgaagaaagtactattgattgctactacaaattaatagtagtgtcatgctgtaggtttaggattcaaggaataattggattgcgcttttgtaaggtaaccagagttagatagtagttatcttctttctgaaaatgatggcagtgccaacatccattatttctaaacacacatttctattctttcagttcactcccatgatactgaaggatctgattctgattgcaaactagacaattcaagggtataccctttgttttctcctttagagaaggaaactctgaaagattttattcactatcggaataataatagttgttattctttgttacaatccttacaaaaataacatggtagttcttactttatacactcaacctatttgtaggtatgtttagcttgaggatttttcattttccaaaaaaattactatgcattttatattgtgttgttgtaggtttgtagaggtaaagtcgatgttctttacagagtttgccctacttgcaaggtgtggcacatctttctggccgatctcttacaagttatagttatgtggcataagaaagatgtatcagtttttatgtatttggtcattggattacgaatgatgtctgggagattttataatgatacaacatatggagtgcaggttttattttttagattcatctccaaagagacctgcaagatctcccttttgaggtcatgaagctcccctttcttgcctccctaggcttggggcctcgactccctctccatcgatggaaagctactgaggcagccagccgacagaagacatagagttgatcaagaaacaacagcacatgcataacaagtgatgattgttcttaaaaaaaaagacaagtgatgatagaaatctaaggatgtttgggcatatgctatgctgtatatgtattatgttatcgtttcattggtttttacctgtttttcttttaactgaaggtggttggtatgtcaactccgctgctaccacaaaagataatcttagcatgactataaaaccccgatagagcgcgcatcgcgtcgtaatgtctagttttgtaaatggtaagggagattttacccttagccgtcgctggcggcagcgtccaaccggaccacaccacaatacacttgtccgtggcacacggattcgctgtccaagaaaatatccacgccgagtcgctagtcgtcaccacccgccgcggcccgcgagcagaggaacagcgaatctccatcgacaaccgcgaccgcacccacccaccaactccccactgactccgcaaccccaccaccaactccccactgactccacgaccccaccataccctggaggccgggaccacccacgcgtttccaccccacccccacccccaagccagatccgaacgccacacgcgatcccccgccggcgtcgccgtcgcactccgtccgcacccgatccccactgtcacaactcgcaagtcgcaacgcgcgcctcgtcacgcgataaccgcagcggcgggtcgcggtcgcccctcggtcgtctccgcggagcgcgtctactactcgtgcgcttctgcttcctgttcaaacccaacgctccaccacatcgcctgcgttccccaccccgactgacccagcctccagtagccatgggcaaccgcacgtcgcgccaccaccgcgccgctcccgagcagccgccgccccagcccaagccgaagcctcagccgcagcagcagcagcagcagtggccgaggccgcagcagccgaccccgccgccggcggcggcgccggacgcggcgatggggagggtgctggggcggccgatggaggacgtccgcgcgacctacaccttcgggcgcgagctcgggcggggccagttcggggtcacctacctcgtcacccacaaggccacggggaagcgcttcgcctgcaagtccatcgccacgcggaagctcgcccaccgcgacgacatcgaggacgtgcgccgggaggtgcagatcatgcaccacctcacgggccaccgcaacatcgtcgagctccggggcgcctacgaggaccgccactcggtcaacctcatcatggagctctgcgagggcggggagctcttcgaccgcatcatcgccagggggcactactccgagcgcgccgccgccgcgctctgccgcgagatcgtcgccgtcgtgcacagctgccactccatgggggtcttccaccgggatctcaagccggagaactttttgttcctcagtaaaagcgaggactcgccgctcaaggccactgacttcggtctttccgttttcttcaagcctggtgcgtgctcgaggcttcactatctcattacagaggaatggatcgcgagatatttcattgttccagtgtttgacttcatgaggattttgggtttacttagatcgagttgttgggtttgacaggtctgaaagtttcaccgttactagaattaggggctagatgcaacgctgcaagtgccattatgtttatacttatagatgttccagatgcagtgttctagttagcattggatccatccaccttactccactatagcttgggcaatctctgtgtttgcgtttaccgagatggcattgtacatttgcatgatttgcactttaggcactggatattttccccactggtagctaaatgctggcggcatagcatgcaagatcttcaaaaatgcactcagcaatatcagaaatgccatctgaacttagtgggtgaagcttgactcttcattatgcagaaatgttggtgacggtggaggattttgttgttttagtgtttttcttttacaatgatggtgggggattcttcattctgaacttggctttatttttcttacacttggcatgtgcaaactgagtgctatatgtcccgtagggcctcgttgctaagtgctacaagatctattgcactggaactcgtggttatggacccgaattctttagtatggaacaatgtctttccaagtaaaaacccccagtatatgaaagaatggaaaggtgttttcgttcttttcttgtggaataagaagcctcataccttagtggaaggaaaataagattttttttttcaattaggtatttgaccaaataggatcgtctggttcctatagaacctatcactaaaatactcaataggactaagtggaacgaaaaggattttccttgagatggtaaatgaaaatgcctattgtggatgttgcaggggagcattttaaggaccttgttggaagtgcgtattatgttgcacctgaggtgctgaaacgaaactatggagcagaggctgacatatggagtgctggcgttattctttacatccttctttctggtgttccacctttttgggcaggtgaggtgacgtttgccgcttcttatttcagtcaactttttttgcttctgttgctaacatagatgttctaccttcattttttcagagagtgaagatggtatatttgatgccgtattacgtggtcacattgatttctcgtctgaaccttggccttcgatatccaatggtgcaaaagatttggttaagaagatgttgcggcaagacccaaaagagcgccttacttctgctgaaattttgagtaagtccaccatagctctttaatggcattcttatcaacagaaaaatgcacacttgtctagtagttcagtagcaaattgagatcaaacaattcttctggtttcttcctattgtactttttcatgcaaaagccttgacctgtagctagtagttactgtagtatctcagagcgaagacgctcacttttactgtcccatttttttttaaagagtattcgggtctttttaatagataatttctgctcttgtttctatataaaccgagttatcatttttactgtttgcaaatatagttaatgcacctaatactttaaatatacagaccacccatggattagagaggatggagaagccccagacaagccacttgacattacagttatcagcaggatgaagcagttcagggcaatgaacaagcttaagaaagttgcattgaaggtgtcttctgagtatttattttcgctgctaccaactagtattgcatcattagataattctgacccttttgtttataaaactaggttgttgcagagaacttgtcagatgaagagattacaggcttaaaagaaatgttcagatccttggatactgataacagtgggacaataactcttgaggagctaagatctggtttaccaaaacttggcaccaaaatttctgaatcagaaattagacagctgatggaggcggtatgtttttgctctgcaggcagacacttgagctttcaattgattttttttttagataatggaatattaatatcccagtcactgcacccatagatgcacaaaactataatcacttattacaagttttccacagaaagcgaaataaattaaacataaagcagcatcctgccgaagtgtttggcctttacttcggagcgcccgctcatggcttggtttcctatcgctcctatgtagtggtcggccttaaaagtatctttggactctggcaatcatgtgtgactgcggagcgcctattgcgtgcacgtgcgcgtgcacggcgagagagaatactagttatgctttgcccaaagggaccggaacagtctagtctctagctacctagcttcggctatttcaagtgcctgctgagcttcttccggatcaatgttagcagctgatcctacttagaatgaagccacattaagcttaatgtagactgagacagtaacaacatgctcatttgaaaggaatggttatatggaagaatttgagtatttggcagtagcatgtatacacaactgttctggtggttccagcacatgccatcatatcattatttccttgttttcccaaacaggctgatgttgatggaaatggaaccattgactatgctgagttcatatcagcgacaatgcacatgaacagattggagaaggaagaccacatacttaaagcatttgagtattttgataaggaccacagcgggtaacttcaaatcgattttttttgggtcttgttctatctgttgtttgttagttctcattaatttgctaattttaaatctctctgagcagatacataacagtagatgagttggaagaagctctgaagaagtatgatatgggggacgataaaacgattaaggaaatcatcgctgaagtagatactgatcatgtaagtatattccgtaacacatcttaaagcaagctctttgataacaaaatgtgcatgtcccaaccatcctacaaggagaatgccaaagatttccaatcctaaagtacctttcttaagtagaatttgagctcaaacacaggctgcgaggcccatttattacagtgctaatttttccattttttgttttcacaggatggaagaattaactaccaggagtttgtcgccatgatgaggaacaacaaccctgagattgctcccaaccggcggcgcatgttctaacttcctttacaattgttgaaagaatactgtttggacatctttcctcattatattccaagaacaccccttaagaggcttgatcatctgagatccatacacctgttgccagggcttggacccatttgtactcaaatggagttgcgcgatatatcatttgtagatgcctggaccatcatggatttctgagtgctgctttgttattcgttgcctcatcattcaatttggagtgtaacctcaacgggatgatcagttcaactgctcttccgagcgtgttgcgacttgtgactatatgccacttgatcgtttgtattagatcaggtgttgtaaaacagattttagtgataagatcaggcaaggttatattattctggagaaacagtttaatcttgcttctgaatttcccggccgtatgagaacgtgctattcgagctgaaaccgttcgatctgtccagcagtattgctctcgctgttcttgtcaggacaaaccttgcgcttgcgcgtttactggagtttcgctttgcaccatactctcacctcacactgcgcaaagaacaatttggtcatctacagtatttaactatttatctaagcacgcgtcataaagcaaccaatagatccctcatttccgagcatgcttcaaggaggcaaaaattcagtagtctgcttttcttttttggctttttttttcttctgtacaaacacatcatacaatctacatgaatgaaaatgatggttgacatactccttttacatccacttatactgaaaactgttattctatacccatatattaaacatttaagtcatcagaaagatgacattaacattaagatataaaaactttatccaaaagattcatctctagagcactaatatacaagacacagacatattgtagatgtaatctgaattccgtggttgtacttcgttgtgacagggctggacaaactggaggcttgaaattgatcaacgaacagaaacgtttttcatctttcccgacttgtgcttgacaaagaaagcagctagcatacttttggtacggaggggagccttttggatttgacgccctcttgggttgtcaaaagaactaaatgacgatagatgcctgacaccaggttgatcctgcaaatacagaacatgtgatttcacattagtgggaaatgataatttgaacctggaaaattaagaattcctagagaatgtaatgctcatttgcaagttttacagcataaaaatagtcaggtcttaaaccactcatcaagttgtttaccttcatgccaacattatgcatagcaaaatcagagctggccaagtttgtctgcagatgcttgggcaatggagatgttgatggttccttacctgaaacaaaagcaattccaaatgaggtgttagccacctgtacaaatattataaactatccagaagtctgcctaagatacactcagtgccaatcatgaaagtaaatcacactactggggtgtactaagcaataaaagcaattaaatagaatggtggaaaacctctcgatgcaggttttgtagcctttgtttcttctaggctgaaaaaaatagagacaacagaattacacaggaagaatcatagagtaagcgaccaacttcacaataggcaaaatagagctggcatgcttacacaaattcagattggcgtgctccattggttttggagtttttctctgaagccaaatgccagaaaagggtttttgctgaagagaaaaaaccattttagtgcaggtactttatatcaagatttaattgtgtgctgagtgccaagaaattgcacctgagggataaggtctaggccttgagtcaatatcagcatcagtttgcatctcagagaaagcctgcattcttttgttcgccaaagctgagctcatagagaaaaaatagcaagttaaattaggtgctaatagtttcttcagtagagaattacatctttttttacacgtccttactcggtacaatgtaatgtttgtgatgtcttgtggcggttccggtcatctgctgctgcctaatgccttctttatccgtgtaagtttggcaggtgaggacttgctagatattgagcaataagaatgtcagtttaactcctggtctgcatcaacacaaattcctgagttaaacagcagtacctggttcaagcatgctactttcagctcaagagtggaaacttctgaagcctgttgttcatacaggtctgtcagtttgtaggcaactgtgccaaggtggtcaaccgcattcaccaaagccctcacagcataatccttcaagttgtctagaaccctgacataaataagcatatgaaatcagatcagactcccaatgattgtcacattttcgtgtactcaaatcctagcagccagatgcagaaaatgaacacaaccatttgacagcaagtgatatgcagtgaggatatcagaacttagtacaaagtagactgaaataaacaacggatggattattgcaagtaaactcaacatttccagaccctatgctgcaccaagattaattatctaccagtgtctcggtaagggatcgttatgaatgcaggaatttcgcatgcaaaaaaaaaaattcagatttcgcaagaattatttaaggtccctgtgttccaactcgcaaatgtggcccaagtttctagttcacaagtaatttcctcatccatttctgctatttgtatatgctcagctaactctgaactgattcaccatttaaacctactacacaccaaccgcaacctttctagcaccaaacgagaaactatgtggatagagcaatcataaacaagttcatggtcccatagtagcatcaagcaaccaataatttgcccacacgcacaaattcttgccacaaattttgcctgctagagctgggattcgaatcgcagtagaaacgaaaacgaaaacaaaaaaaaaaactcacatctgcttctgctcgctgtggaggtacgacttctcgcagtactccgacgccgagtagagctgcggccgcaggttcttgagctcctgcgcgacatcagttcaaccaaaagaatcaagaactgcaattcatttcagagaaagaaaaaaaaaacgagcctcgcggcgccgcgggatctctcccggatccgggtccccggccggccggcaggcctacctggagcgccttgacgaagctcttgctccgctccatggacgcctcgtcgacggtggtgggagcgggacctcccccgccgccctcctccccgaccccggcgaccgcgaggccgccaagccccgccgcccacgcctgctgctgctgcatatcccctcgccttcctcctcccgagtcgctcgctgcagttcttgttcggtaggaagccggctacttagcggcgggggcaaggcacgtgaggaggaagcaaggaagcgatgctcctcctcctctcctctccctgccggcgcgcggcagcagcagcaggcaggcaggcaggagaagcgtatcggtgggggtggtggccgcgtgcgcgagtgggagcggaggcaggtgggggcgcgcgcggatggcgacggcggccgcggcgtggtggtggtggttactggtcactttaagccgctcgtagtaggagtaggagtcaatgcttcgcttcgcttcgcttggcggatggcggtagcgagattagggaatcgattgcctccttttccgcctgtcgatggatggatcgatcgaccagctagcttgcgtggttcggttctctgccggtggatggatcttgattcttgcggccactagaaaaaggcgcgtgtttgtctctcctcgtcatctcgacgacgacgacgacttggagtgaggagcgcatgatttcgctatggccacccaggctatgagagcaagtttcacggtagaggtgatggtcatatggcctggcctgtttggtagagctccaaatcctaaatttagttacaggagttgggtctagagtagagttgtggagctacctaaatccagctccacctctctagtttattttgtgagagagctgaaactgtttggctagttatagctctaggagaagtagagctggagctggagctagagctgtgctaaacatgcttctaattttataaaaaaaatatgactattagggaaagacctaatatcaaataaatagagctaaccagaaaaccctataggcgtttctcctaattttacacacaccatcttcttattaattaggagatagtttatacgaaataaggaattttatggtccttcagaaatctcttttaaatatgtgattcgaattttgggcctacaatatattcggattagtttcctaatagaagttgactattaggattagtttcctagtatgactctaagtctttccccactaggactcctagatttctcctatatatagggcctgtttggttgggtatttcaacttaccacacctcaagttagcacatgccaaaagtgtggcgaacgaaatccttgccatagctttggctcaaaaatgtgtggcaaagcagctagaagctgcctaactttctttggcaggctaaactatggaagcaaaacaaacaagggctaagcggttgtggctgactaacatgaggtgcggcattctgtggcatggatccaaacagccccatactcttgtaagccgcacggggagggtgcgacagtccaatgtaccccatgcgtttgtatccaactcctctgtagtgatcattgccggtcggcgcccgtggttttttcctgcaaaggttttccacataaaattcgtgtctccgttgtgtatctattttattaacaacctcgaggtaactaaattttactctaaatttttttggtactttaaggtactcagtgcctagaggcaccaaatattacactagaaaatatggtacctctaggtacattattaaggatgataaaattacccatacaacatattgcctctaatgcacttgtcccaatatactactcataccttattttttttaattcaatccattgatttttttcccttatctatctaggagtttgtatagagactaccctttacataaggggtggcaactcctctctttctttctttttttctcttttctatctcattatgtaattttagagcctcatcggtatgcctaataagccaaagcaaaagggcaaaatatgaactttcaaacttgattttgaagcattttcaatgtaatttctttttagtattggtttttaagccgttacgaacaagtgtataaaaatttacctataaattaattttattccctaataagtctaaacgatttattaagtaatattggcaacccatgaggctcttacatggtactcccttcgtttcatattataaaactttctagcattgcccatatttatatatatgttgtctagattcatatatgtgattcattagtgtgtgtgtgtgtatatatatatatatatatatatatatatatatatatatatatatatatatatatatatatatatatatatatatatatatatatatatatatatatatatatgaacggataatgttagaaagtcttctaatataaaacggaggaagtactatatcaaacaagaggtatgaggtccatagtacttgttctgaggagggaggagcaatgtgtcctgggcgtttgggccacttggctgtagcagtgcagtggtagtactagttcttgggttggagtaaactacaagctgcagggtacaagcacggcgagggagagctgtcaaggggctgctggagattagtccatgacagtacttatacctcgtaacagaggttttaactatgttagcacagtgagtgtaaaagagtacggggcctcctttcaaacgttgatttaaaaatgtatgtgatctggtaccaaacctcttaatgttaattcgtattttgaggaaaaatataaactctaaaacaatggcttttctaggtagtgctggtcgtggctactgcatattacaagaagaaaaagagtattgttcaccattttatttctgaaatgaactggtttagagcagcagctaccacagcgaaaagaaacctaaaagaaacaactgaaataacataaacaacattttgttcaatttctacgcatttcaatgtttatatacactgaacaacacaacagatgactagagcaacgaacagttaaatgaaagactagattgtcccatccttggtttcatcttttctcccttttagctatgatgcccttctagctcccatttcatctcttttccaccatcagcctagcctcttgatgtcatgtaactatgatgcggcgcacctaaccacgttcaagaaatagcgtagatgggtatgcacgagatcatggtgtttgctcgtacaatctttatttgctttggtatttgccttaacttgcatgattagttaagatttctataaaaatcctccattttaaaggacactcggctctatatattgtgtattctacgtactaatagaaaagtcaggtatttggtaaaaagcccaggcaacaaacaactagcactacaacccatgttttcacggcagttaatttccgacgatgaaacatggttagagcccggtcagccgttcatctagcctaagaaacggatccaccagtgagcgcatgttgcattattgaattggagtcctaccaaaaagtccaacgggacagtcggacacatatattcaactaattcaaagtccatgacttaccgcttaaaaaaaaattaagaaagcacatgggttcagagcaaagaaattttagcctggacagtgagatgatgccggaccctatgtacctgcagaaatagccaataggaaacaggttttaatttagatcggttgctgaaaaagcaaggaggggagtcctgtcccatgtttgttgcaagtacaaagtttccatggggcaaacccggtggttgccaggtagagtagttcatgaatgctcttggttttggctgcttgatggattgactagatgcatttaggtgcacctaatcccgcaatgacatttaagaactcatcaagtgcagctttcattgtcaaaacaaaaggggcatacactattagtatccgttactgttcatgataaatacatttcaattcatggagtaaaacagacacgtccaaaccctatagaagttgttccaaaccctatacaaaatctgggttgtgtttagttcctgaaaaaagttgaaagtttgagaaaaaattgaaagtttgaaaaaaagttagaagtttatgtgtgtaggaaagttttggatttgatggaaagttggaagttcggggtagttaggggtgaactaaacacggccacacggccctgatgatgtggaattccctagctcaaacgcatattagatctaagtggattttgaatggacaaaagtagttacacaaaacgccacaacttagttgagaaaacgaacaatatgccactctataagatgggtgggataaaatgccactcaatacaatgcaccggataaaatgccactcaatacgttgcctaccggatgaaatgccactttagagatttttgtgcccaaaatgcccctagagagagagagggaacagagggagaggggagggccggccgggcggcgtggaggcctctccgggcggtggcggcagcggccggctgggaggaggatagggcggcggccggtggggggatgaagaggcgacggcggtggaggcgacgacgcgggaacgcggcgagcctacccgcgcgttcgccaggaggcggcagcggcgggggtagggggaggatgaggaggcgacgcatggggaggagcgctggggagggccgggctggcggcgccggatgcctcgcgcggacagcggcggcggcagccggcggggacgacaggggggaggagtacagggtggaggaagagacgacggcgatggagcctcagaccgtcgtccccgtcgccgcgccatcctcctccccccgtcatccttccccacttcggcgccctcccccgatggagccggcactgtcgtccccctggcggcgcagtcctcctccccttctcgccgcccacccccgcacgctcgctgcccaccggcgacgagcacgaccgacgtcgttcgtctctcccttcctctctctccatagtaggggtattttagtctcaaaactactcaaagtggcaaagtatactgatgataagctattgagtagcattttatcctttgcactctaatggatggcattttatcctttgcaatcttgtggagtggcatattgtctgtttttttccaacttaattcaaaatttgagatatgccatcatgacccacatgtcattgacttatgtgggtcctacatgtcattgagatactgatggcatatctcaaactttgcaaaattataatgacattgttccaatttaccctttaacctagaactagaaggcatggtgaaactctagctgcagaaaaaaaaacaaaacaaaatgtgtcctaccaacaccatcccttgagggcaatggtgcatacagtacattttaaacttattcacttaattgtaacttttaaccttattaaattttggctttataaaactctagtagggtaacaaaccaaacatatgttagaaatcttagtagtttttcacatcagctatgttaccaaactttgataattctagatatttgcacttttcaaagttcaaccaaattttagtaaggtagagttgagagtggctacaaattggacaagtcctttattctatgtcaatcctaggctttcaattttgttttttttttgtctacgacaagatttaataattaccaaaactttaacgaagttgtttggagtgttccttttttttgggcaagatcaactagccctagatttgtaatattgtaaagaaatgaatgtcaaataatttttcaataccatttaaaaaaacaaaaccaaatggatgatagattttttacagggataagtccattttacacccccaaactcttatgtttgcctaaaatataccccgaactacaaaatcaggtataatatacccctaactatcaataccaatcattttacgccctcgagcaattttaagactggttttgattcatttgaacgccacatcagcatagtcccaccagtcaaaccatctcaccggtcacgtgtggagaggggcaaggaagaggggctgtgatgaggaaaatgaggaatagaaggttggaggcagccaatgagctccctccctccactccccgctagcccatccatgacaaggcacatgcaacggaggggggaaaagctacgtcaagcggcagcgcggtatctgacaaggcatcatcgcctggtcaaggacaaggtccagctcaagctccgcatccgcttcttccttgtttagctcgaactcctcatctcaaagcctagtcgccttcgctgaactcggcatccccaagtagctcgagctcgtgtttgtgctccagctcaaggaagtgaggcaggatgttggatctttagcttgtgctcgccaacgctcggcccagaatggggcagtgacaagggggcggcgacgggggagggtgatctagagctcaccggctctcagaagggtagttgggagggagagatcaagctcaccagcgctcaggggtgcggcaacaaagggggagtagagagaaggggaaaaaagcgctcatcgtcagccgctcttgaagcctcactagccgcactgtgtggggtaagagagacggaggagagggagaaaggaggaagaagatgaagtgggtgagccctctattgtttagatgatgtggatttattgaacagttggcatcctatgagatatccacgtgtagcaaaactatagtaaaacaactcgagggggtaaaatattcagtattgatagttaggtgatgcattatacctaactagcatggtggcccgcgcagattacgcggctagcatcattatattttctctcatataatagcatatatgttttcttaatgtattattcaaatatattaaaatgacaacataattttaaattttgtactaactttacgaaactactaatgtgtaatattcatattgtattttatatgcgtgttagttattaattatttttaatatcaaattttagttatttgtaaattatattcctatatggactctagactcgtctttcaatatttttttaattccgaatcttcgttatctgtaaattgtatttctatatatagattctagtatcttcttccaatattatttatttttaattcttattttttttattatttctaattatatttctatgtggactctaaactcatctttcaatattttttaatttttaatttcaaatttcagctacttctaaattgtatttctatattgactttagactcttcttcccatgttttgtttaaattccgaattttagttatttgtaaattatatttttgtacgaactctaaactctacttttaattttattatgtttattccgaattttaattagttttaaattcctatatggactctatactctacttctaatattccttatttttaattccgaatttatattatttcttaattgtatttttatatggactctatactctacttctaatattccttatttttcaattccgaatttcagttatttataaattgtatttctatatgactctagtctcctcttccaatattccttatttttaattccgaatttcagctgtttctaaattgtatttctatatggactctagtctcctcttcctatatttcttattttttaattccgaatttcaactctttctaaattgtatttctatatggactctagtctcctcttccaatatttcttatttcttaattctgaatttcaactatttctaaattgtacttctatatcaactctgtttttctttttcttcgattaatatgggaattttaggccgtgagagcgaacgtggaggctcatttttctatttctttaataagttaatagattttgtagctaggaggtgtatttagataaacaaaaagcttagggatgtaaaatgaacttattccttttttacctggttcatttgggcaatgaaccaaacatgcccataataaccgtagtcataatttaaccatgatggcttgccatgtacgaataatattgagcatgaagatacacatgtatggtcagtgtgagcacatcgtcattgaatgtgcccaagcaaggcctacacatggcatatgctatgctccacatgcttgcgctctcgtacacctacgcgtgcccacttaacccagtgtgtcagttttttttttaaaaaaaatacccagtgggtccaaggctccaagcctaatgaaaattaaaacgtttcaaaaaaaaataaataagagtaaatttcacgaaactacaggtattttggtcaaattatcagaaaactacagatttaacatgatgtattacaaaactacagatttaacactaattttatcacggaactacagatttaagataaaatatctcaaaactataaattttagtaacaaagatatcacaaaactatatgtttaatatcaattaatcataaaacttgaacattttcaactcaaacataatattagtgcaacgaatttaacccccaaaatatgtagttttgtgataattttattattaaatatgtagttttgtgataattagtcttaaacatgtagttttgtgataaatttgttgctaaatttgtagttttgtgataatttggtcaaagtatatgtagttttgtgaaatttactcaataaataattttcaccggttttctagaagaaattagcaaaagtatattattaccgctgaagagaggggagggggcgagttttatatcaggacttagcgcgatgagtgctcggctttgcacgaaggaaatcggacggatgcgaactcacagcactacagaacgaacttgcacgattaaataattaattaccatcataagcaattactccctccgttctaaaatataagcatttctagcaatgagtctggacatatatatgtctagatttatagatagaagttgttatatttgagaacggaggtagtaatcaattagccattattttttcatcacgtcgtaagcatttaattaatagctaatttatcctaagacgatttcgggccttgtggctgacgtggcgtctacatagcaggtttgacttggttctcgtcctaatataaaaattaaaaagtcagtcagtcggtgacaatggagctcgaggatggccgggaggaagagggaagaaggaggcgctgacgtgctatcgatcatggagatagagatgagggtgggacccactgacatgtgggtccaacttttttttttatcttttgtcttacatactatttaatctttataatttgcttccggtgccatttcaccgtcacgtaagacaagaactaagtcaaattagtcatgtaagtgccacgttagccgaaaccgtcatccaaaccacattggaatcttatttgcactggttttgactgttgatgtatatggtaatttggttcaggaacgaaaatcgaactcgctgtcaagttaaggaccaaaaatgaacttactccaatccacatcgttataccgcggatgggccaccatgggcctaatataaacgggtcagacattaactgcaaaagacaggcgacagaagcaaaccagaacgacaggacagatcgaacgttccctttatttcctgacgaaacaacaaacaacacctcaatcagcaagaacactgtacaattcctcctgatcaaaatttccctacgccctaatttacaccatggaccttggtcaggtccatgcgtgcagcccacgctggcaggcacgcttcaaccaacacaaggcagaacgttacaacctcgcaaggtgcagcgacacgagaacgccgacgaaaacgtgccaactcccgacacaaacgcccgcgccgacgccgacgctgggagcagcagccgccgccgccggcaagccgccggtgttcctcaggcggcctcccaggtgctgcgtcgtgcggctcctgacgctgtcgcagtcggcgacgccggccagcgcgacgacgccctcaaggccctgctgcttggcgtcgtagcagagcccctcgttgccgccgacgcggagcttcttgcctagccgccacatcatctgcttcccgaacgggatcggccccaccagccggttgccgtccacgcggagctcgctcgcccgctccagccgccggaagctcgccgggatcaccccggtgaactcgttgttgtccagccgcagcacccggaggtggcccagctccccgatcgactccggcaacgacccttccagccccatgccggagaggaccagcgtcgtcagcgccctgagcccggcgaagatgtcgccggggaccgtcgtgaactgcatccggttgtcgccgaggatgagcgaccgcagcgacgacagcctgccgagcgccgccgggatcgggccggacagcgcgttgtggctgaggtcgagcaggatgaggtcggacaggtcgccgagcgcgtcggggatcgtgccggcgaagcggttctggctgaggtcgaacttgagcagcgaacggcattgccctaggctcgccgggacgccgccctgcagcgcgttgtggctgaggtccaggatgcttaggtgctggaacttgaagggtggcacctcgccggcgagctggttgtagctcaggtcgagaagctggaggtgcgcgagggactggacggtggctgggatggcggatgtgaggttgttgccatggaggtcgagcacccgcagcgccgtcaggttcccgagctccggcgggatcgccccgacgtggccgttctcccggagcaccagcgaacggaacgccgggccgaggcggccgaggaacgccgggacgggctgcgggttggccgtgaagcatcggtagaagaagagcgacctgaggtgcggcagcgcgagcacggccggcgacagcgtggcccgcgccgcgtcgcacgccgggaaggcggtgtcgtcggagagcgcgccgaaggagagcgacacgacgtggtacacctccccgcggtcgggcacgcactcgatgccgtgccaccgcccgcggcacacgtcggcgatgcccgacgcccacccgttccccgtcgccgccatcacctcctgcaccgcgcgctgctccgccggatcggtgcgcgcccggtccgacagccccgtctgcggcgcgttcaccagcgccgccgacgacgacgagtccggcaccaccaccgtgaactcccccctgcacaccgcaaccagcaccgccacgacggccaccaccaccgtcgccgccgccgtcgcggagagcgcagaggccaccatatcaccttgcacgctcgtgcgacgcgatgcgctcggaagggtcacgaccgttgggaatttggagggaagagggtggcagaaggcgcaggttttatagtgtcagaggcgcgcgcgccgaggccgccgactcgcggaggccgcagtgttcgtggcgggtgaatgcggcgagagacgagtaaatggtggtcacgggatatgggggagaaatggagtaaatgaactgaggatttgcctgcattcaattggtttcacgggaaatcggaactgaacaatattgcgcgacatcctggtggcatggagcagtgagagcatgcctctgctagcaattttgatctggtaattgtattgtttcgctacaggcgacctgcggttcagcggttcagtggcagtgtaaacagttgctgtttgttcgatcaagacgttcgtgcgttcgcgaaaagatcaagacgttcgtaatctggagcctgaagttagcgttgtggatgaaaaatcacaagtaggcagtagttgagatgcagaggaaaggttaatgctgttcttgcagactgcagagtactaccatccctggctcactggtctacctgactgcatttcgttttactcccagctcgcattttcatgagaaaattgcaatattcggactacaaacatgggggcttcgctgttttgagactccgagtggatgataaatgggcccatctatgtctatgaaatgtgggtccagtgtcattatagcaaaggctaatgtttgcagtgtcataaccctattgatgaactgaaatgcagatggttatttcaagattactattacagcaagactgagaaataaatgatcaaatatttgatctttcaagccatactgacgaagacatgggcaaaaagaaaaaaaaaacctctgataagttattcttcctcgttgtcctatccaaatgtagaaattcactagttccttcctcttcacaggtcatcctgacgtttcagtctttcaggtttgcttgctgcactttctcagaccccaggtcttcagaattcagcaacgaggaaaacaaacgaaaatcaacgaagagaaatgagaagcaagaaagccaggtagcccaataagaggcccaaaggcctccagatcatatagctggctcaatgggctcagctatggatcaagaaacaatagttctccgttaccttacagctatatccatcctgaatccttgatttctgaacatacaatgatacaattaatatcttgtcccctacactgtattcagtacttcaagacgacactatgtgttcagtatctttcaagaggactattttcgttgcaaattttctcgaagcaattttgttttgtccccgtttttttcgattccacctggtaatctggtgtgccgcaaatgtgtagcctctgactggatacgcacctaactttgtgaaggggctctgaacctgagctaatcactaatggaccgatttgcgcgatctcatgcttcatgccttagccatgctgcccagtgcccatacagaattgtgactgtcacccacagggactgccagactagacaaagaaaactcatcctttggttgattactatcccgctggacaacactacctgaaagtacagaacaatcagcattaggtaaactttggagtgcagattaatcagccttgacagtacagtcgcacgtgatgacatcaattcttttatccttatttaaaggcctccttgcccagtcagacagctcgccgaaaatatgccaggagaaatgcacacatccaagggtccaaccgatgccaaacgtacactgcagagaaatgcagtcaaattaaggctgcgtgttctagaattgggaaaacgttcagggaattcatcattcagtcattcagtacggaggataaccatgcatgcagaaagtgtttttataaagcttgtttagcgtgttgcgacacacaacacattctccatctgaagccggcgactttgtcagttactacagatcagaccatcatcagcatctgctagatttccacaagaatttggtcgttcactgttcagagagatcggttgctgcagtgcatgtcaacagcatgtagtagtgcactactcgggaacgcactcaatgcgtgctaaatgcttcgtgctatccggctgtgctcagtccactttctgatttctgaaccaggaaacatcgtctttttttgtatgtatgaatcgattcaactaaaagaggtcgcaaacttgaggtccaagttatttactccctctgtttcaggttacaaaacgttttaactttgattaaagtcaaattacttcaagtttgactaagtttgtagaaaaaataatatcattttcaacccaagacaaatttattatgaaaatatattcaattattgatttaatgaaactaatttgatattaaaatattactatatttgtctataaacgtagtcaaacttaaaatagtttaactttgaccaaagtcaaaacatcttataacctgaaacgaagggagtagttgccaacttcttgtccccgcgtcgctctcgcgcgggcagctcgggggcgaaaccctagcctcccacgccgccacctcccaccaatcctcgacaccttgccacccctggagctcgccgctagaaaaccgggcggcaagccaggaaggcggcgacgtggacaaggcggcccacgaaactcgtcctcggcgcgggaggacggagcgtcgccacgacggctagagatggcaagggagcgacggatccggtgctcccggagatggatccggtgtttgccaagacggagacgcaggcggcggtggagcttggtcgcgagagcgaagatgacggcggtagtgctggatctggagctcccagatccagtttctgcggcggcacccctgctcaatcctaggcggggagcagccggcgtgggcagcggtgccgatggcgacgcgcggcaggaggtcgcaacggcgcggcgtggacaggagggcatggacgggaggtgcggtgcggcgtgcccgtgctggtggcggcgcgagggcgacgccggtggagtcactgtgacgccgtggacggcgatgcatgaggctcgtagcgacacgtggccatgcctggcaggggtctgcgtgaggaggaagccggcatgggtcgcttgggtgctagcagtagcggtggtgactgacgacggtcattgactgggtttgggtgctaaagggttggtgtggtggtccgacgatggtcgttgtacacgatggttgtgtggacctttgaataggaatcaccggtgaaagccttgccaggccatgggccggcatgacgacgacgccattaggtgtcgttccccttcttggaggcgtcgttttggcgttgacatctcctagcatcaagaacctttcgcgcacaatggtagccatcgatggactcctgcaatgtctccaaagccctacaagtctagctgtttgacgaggccttcgctgccttgcttccgttccttgctctaccgtgggtgttcagcattcttatttggttgctgctgggtagagtcagagctacttcattgtaagggtgcgacaaagcttggcaacgatgacacagtactgcaatctctttataggattgttgatgctagttgcgtgcaggaaatggttctttggtagtttggactgatgtccttcatgagtatcgtttctgtttgctctttttggcgttggagtagcattgcagtgaagtcgaagctgttgtgtcgcttgggtggcaagcttggcaacgataacatatgtgggctattgtgtcgtctctatgacaaacttggcagatgccttgtgtcggttccgtcgtggtagcttaggttagattagctgttggtgaggcgttgtaattatggtttgctcatttttcccaaattaactgggcactgtaaggtttggtctcgtttactccttaaaataggacaccttattcttaatataaatcgtcggtaatggcctgtccgttaaaaagaagaagcttgaggtccaaaattgagatgcacttgatagtgtagtggcaaaagatgtgtggtttcaaccctaaggtctcgtgttcaatatctaaattgctcacaattgttttataaaaaatgttcggagggatgtctctccctaggtctaagattgatattataaggtcgtaggaaaaaatgatcaaaattaattctcttattaataatataattcacatagctcacacatccgtagatttacaaactgcccgttcgacctctatatcctcatcatcacgaacttgctccaaggatattatactatatgtgatcgtattatattatattactaactactcgtaatgtccaaccatattaaggcgatgatctttgtcccaagacatcataatttaaagaatttatgtacagctaacgacgagatagctatacttggggtcgatttagggctccgccttgactctggtcaccgacggatcggtcacggtggtggccttggacgacaccgacgagtcggagtcggagctgggcggcttggagatggagagcacatactccttcatgtcggagctggatgagcggaagtgcgcgaggatcttgctgaacttgggcttcttgcgggtgatggcgatggagacgtcgttggggaagaggtccttgagcacgaaggcgtggaacatggtggtgaccagcaggccggcgacggtgacggtggcgatgccggagaggccgatggagagcgccctcgtcagcacgttggtcacctccgtcgcgtacgtgatcgtcgcgatcgccgcgccggtcatcgggaacgtgtacgcccaccacgccagcgagaatcggaatcccctgaagaagttgatcctcacagcctggtcacaggattaagacattgttaagtacgcatgcagagcttagtaatactaattaattacgtactgtagtagctagtgtgctcgttgcacgtaagtgttacgtaccagtgacatgtagaggaagagggcgatgaagtaggcgatgcgggcgccgtagtcgaactcgccgaggatcttggcccaggccatggaggcgacgctgggggcggcgacgaagaggaagaagacggggtggagctccttggggagggtgacattggtggggaggcgctggtagagcgtgacgaagaggaccatgtagtgggcgaggccgacggcgaagtagaagatggggccctcgcggagccccatcttggcgccgagcagcgcgccgacgaagtttccgacgatggagaggtggttggacgggttcgccaccttggacagccgccgctggccgccggacatccactgcccgtagatcttgagctccaggcagaagatgggcgccatgagcgcgtaccagacgccgtggtgcacctccgtcaccggccgcggcacgccctggacgaggaagaggcaggcgatccacggcgcgaagaagaagttggcgcggatcgggtggtagaactcccgccgcaccgcctcgaagtagaaaacgaccttgagcaggtagatgaaggagacgaaccccatcagcgccagcgagatccaccacagcacgtggttcaccaccgggctgacgtgcaggaacgacgtcggcggcgccgacgccagcgtcttccacagcatcgcctggctgctcaccccgaggcacatcccgaacgcgctgatcgggaaccgcagcaggaacggccacttctcgtccttgggcagcaccgtcgtctccgtcgccctcagcgtctccagctcggggccctccagggcgtcgaagtagcggtcggcgccggggacctgctccgtctcctcctcggcgatgttcggctcgggggcgccctcgccgttggtcatgtgctcctgcgccggccggccgcgcagggtggagagctgccgctcgaggcggccggagaaggtcttgaactggtcgaaccgcttgtcgcgcgtgctgtcgcaccgccgcgtcgtctcgtcgttcttggacaggtgcaggatgggctgcgagtggaaccgcgtctgattcagcagcagccgcggggagtgcgcctgcactcgccccaccgccggcgggtgcgcgtcgtcgaacctggtctccgccggcgccacgcgggcctcgtcgcggtggacggccttcgccttcgccgccgccatcccgaactgcgagaagtggaaccccgatggcgacgccggcatgctcagcgacacggagtacggtatctgcgcgccctcgtgttcgtacgccgccgacaccgacacggatcgtggagcgtacaccggcgccgggatgctaatcacgacgtccttctcctcgcccagcatttcgagttccttgctctgctcgctgagcgtggccgtggccgtggcgtcgccaccgccgccgacgcagtcgaagccgtcgatgacctgcgaggggacctcgatcagcagccgcgggagagcggcttccccggacgattgctcgctctccccgtacacaccaccgtccattctgatccggacgtcgttgccgaactccataccgttcacgaaacctgcacaccatacaacgacagattgactcgtttagcgatcaatctcccaagtaaagcaacaaaaaaaaaagcaaagttttaataatttctcaagaacgtaatcatcaagtaccgcagtaccagatcacacgccaattcggccgaagcacgggtgggcattcccgtatggcgatcctggccatatcaacctatcctacctacagttaatcttacctggatttctctctacttctctacacgcgttcagcatgcaccatcaaaacagttcacagctcgctaaacgcaaacaacaagtttttctcccgtacgcttccggagtttcgggctcgattttggctcagctcggcacggcgcgaccggtgctcgatttatagagacgcgcgcgagtaaggggaagcacgaggccggaatgcacgttggctacgatattctcctttcccgcatgcgcgccggggtgtgctactgtgggtgcatgccagtggagcggcagagcacgccgccggccggatgacggcgacgggacggtgacggccgttttcgtctccactgttcgtgaaggttcagtgtaccgccaataagcacatcgccgtcggcaatgggaaaaatgaaaaagaaaaataataacagttgtcttttcttgtcaaaattcgacacttcttcctccttgactgaaaagtaggagtaaaaaaaaaaatcttacagtctcccctggtacagtacagtacatcaaaaccggaataaatcagtcaataactaatcggcttggacaagcagggtacgaacgtacgatcggcctccgtcgctggctctgcttggtttgacattatgacatatcgctaattccaaaaggtttttcgttacagatatgagcccggagaccaagatgagaatgtgtggtcctagacggactcgtgtggaaaccgaacatgtacgaccggctataggcggaccggccagtacgtcctacacgattgtgacacacggacacatcaatctcagagatcgatcacgctgagaatatgtagatcaccagtacgacttttttgcggtcgatctccctgactccctgagccgccagattaccggaaaactagctgctgttactatgtgacgcaataaactagccatggaagaaaacaacatgcgaattaacgtcgcagtctaagctacggggcagcattggaccgaccgaaagtgttgaaccgggaccctcccccagatgtgaccgagagtcccccggacaccaccaaacatcttgcctggatgctgggggtaggttggcaagctatccatcgcgtacacgtcgttcttgcacagccatatctgagctagacatgcccatgcaacaacgaacagagaactgactctacaggacatgaggacatggacacccgtgctagaattagagcagcttctaaaaccaaattagacctctcaaagctagcgcaggcaaagataaacttcatcttctctaccgacagggatgacaccgaaacacgggaaaacgccgctgcagagttcctaaaatcatactatactacatactcctctgcatactttaccttgggcctaagaatctgttcgtcagtgcgacactccacggcaggatctcttacgatgtatgaagctggaactggaagaggatgaacacagatgaaagagctcgcaaaggaagcagagcctctagcccagcactcagcagaggaagctgcttgctatgtgctgctgaggaaggtgatagccgcaaccgcagctcaccgagtatatatagaagtagtcaagcagggcacccagggtgtcctcaccattcttaataaaagacggaaaaaaaagaatgggagaaaaaaaaatgagtgacctacagaatgaaaagagagaaaagaataagagggcgcagagacagcgtggaaatacaaaaggtggcgagtcaaagcgcgagcgagagcgcacgcacggacgaacaacaacccgcgtactcctcgggggggggggcccacgcacagtcgggcacagtctccctccccgtgcccccgccttgaccaatcgcgagcgaccgttcgcaccgcgcgacgaaaccaccaccacgtgctccctacgctttcctacgattcctccgccgccgtagcagcgtccccgtctcccgtgcatccgcgagcgcgcgagagaatgagagagatcgcggcgtagcctctgcttgcccgtgtaccgggcaccggccaagggggtacgagaggcgaccgcgagccggttcgtttccgagatgtcactggggcgtcgcgtcgaggaggaggggagagagagagagagagagagagagagaaaggaaaataaaaactgagggccgaggcgcgcgcgcgaccacgacggccgaggcaaacgtaacgtactcatcgtaccctctcccgagaattttgggaggagaatgcactggtgtcccatcgccgcccccgaagaaaaatgggtgagactgctacagtaacaggggcagtggaaagtagaaactgaagctctaagcgatgatgttttcagttggatcgttggaaaaatatgtagtgcaaaccacatatacagtgaacttccaaggtgacgtggatgaattttggacatcaatttctcgatccaacgatagtttccaagttttcactgtatatatggtttgcactgtatattttctctcgatcgtttacatcgtcctaggttcccacgacagctttcctcgcatctcgctgcttctgactcttctattatcagggattcaggggtgttcggagcaagttatctttttgttaaaagaaataatcaaactttgaaagaaaatatcactttcgattatgatcgatacgcagctgaaccagccggagccgtagtgttttgggttattactttaggggtgattgctttttggactgatctggaatattgtacatggttgatagttatttcgtcttaatttgaaaaaaaatagcaaaacttttcagtcgaggaaatttgtgcctgggaacaagggttcacgttggctccagaaaaataagaataatgttttcttcgtgcctgcggcaaacgacggtccacgtacatcattttagccggacaggctgcgtggtttcattagtctttggctacatggtcccttatgtcatttcaagcttgaaaataagtgaaagtacgattagtgcgtctgttgtgaactcattctgccattatgtcaaaattgtgattaattgtccattcaaggacagttcggaaaacgtgggacaaatctattctgatagcatatagttgttgtactctgtcctacacaatttttttaaaaaatcttgttaattaagtcctgataggagcttttttacttggtcttaaccttggagtacattttctagctgttttttttccggaggggagggggtgtatttaaaagtgttggtattttcaagaacagatttggggtaaactcgatattatctgcatatactgtagcagtttttttttcctcggtttgtcctgaatgagctttcactcagacccgaccttaatagtctatagttgtgtgttccatgatgcagtggacaggtctgtaatcttcctccactaaatacttgtggaaatagagaaaaaaaatgttgcaagctctagaaggaaatcaacagtctaacaaggaattccaaatccatcatgaaccaatcctttcaatctgtaccttgttcctaaatgaccctccaaacattcacgtcgcagtttttgtgtgaccaatatttaaatatgctgaaggaattccagcatgcattctttgaaaaacaagtggcacacatgaactccaatgcataggacctggagtactactaagttaattagaaaaatatacatgccgatttattttctttacggtactaactgcaaatgcataaaaatcagcgaagagtatgtataccctggagtactaattaagttagaaaaatatacataccaatgtctctcctttatggtactactgcaaatacataaaaatcagcgaggagtatataccgtccaaaacttagtacaaaatttatatacaacatcaaaaagagatggtttagtgtagtaagctagtatactagctactccctccgtttcataatgtaagtcattctagcatttatcacatttatattgatgttaatgaatctagatatatatatctatatagattcattaacaataatatgaaatgtggaaaatactaaaatgacttacattgtgaaacggaggaagtagtatggatctactatggagtatatgtcatacgttaccgtcatagacgtcgaccaacacaagaaggggacttattaattattatagcttgtatacttgctaaactcatatgaactgattaagcaacttaaaatctgctggcacttgtcaggcccatatatattttttaatgctggaacataaacagatctggatcaatttaaatatgaaagaaggacccttgagtcgatccatctttgaattcagcggatataaaaatacgtagctctccgaccaaccatacgcaaacaaactatttgaccacaacgtgaagctactatctctaattaatttattctatgtatttcggtaagactagtagtactatacgtagagacaaggtgaatgctactactacagtatcagagtcagactccgaagtctccaaggagcttacaatataattacttaagtattttattagtcgaaaattgaaaatgtgcgttctcattaaatattgttgccgaggttattttaggcggcaaaagccagcatgggaccaattaggcttctaatttagaagttacttagtagtttgctagtgctttggctttttagttacaaataagtatatggagtattttatttacgctgattccggatatccaaaacattttcagccaatcaagtgcttaaaagagaaaaatcatgtaattttaaatttagcctatagttctcttttaactttgaattttactaaataacctagaaatactatatttatctttaagaacggagggctagcttttttctttttccttagctgacaatgggagcaaggtcagcagctgaatagatccaaccaagcaaatatatactccggatcgacctagctacatcatctgaaacatgactagtagcaacaaaaaaatcacctacccgtacactatataaacatcagtggtagccgtagcttctatactagctaagctagcgtacgcagctagttgtggacagctatgacacgggattaacttaagagcaattgccgtacgatacacttaactaggctccagagcctggaagtaaacccagcacgatcgagcaaacagacaacaagccgaccaaatccttttgtgaaaacggactaataaatcgagaactcggcaagcgacaagcgggggccgtcctcatctagccatgcatgtatggtacaatacataccacagataaattagaggttcacgtccatgtcttatcgcgtaagcaaacggcagataaattagctagctatagctagcttagcggcagaggagttagaaaaactggggaatgaatgaagtcagtaagtaatatacttcggcgtatatccgtacgtacctggctagtcgccgcccggccgctagcctccaagcgtagccgccgctgctctgcggttaacgttgacgacggcgcggtgccctgcccgcgcgccagatgcgcgaaaacgacgcgacctcgacgacaaatcagcgaccacctgccccgctgttggtagctggctgcgtgtgcagttcttggctgctgctgctgctgctagctgctgccggcgccgccgcgagatcgctagagagatgccggattatggatgggattatttcgcggtgaatgcggaaagatttaagcgaagcaaaaggcagctagctagtccgagctaggcagtggtcgtagtgcttctcgcactctgggagctcgagacaggccgccgtttttatagggtagcttggaaaaaaaaggtgaactaattaaagtagttaattaacttaaaacgacgaggagaaattgaattaccacaactggtctcgacgtgtatggtggtgtgtatctgatgtgtgtttgggatggagggatggtttaattaggtcgtgcacgatggcagccatatgcttgccgatccttcgatctactcctacctcacgcacaaaaggaggatggggggccctctgctacgggagatatgcgtcagccagtcggcaaagatagtggccaccatcttcgtcagcggccattggtcagtgactttgtgatctgagctagtgccatgtaggaacggtcaggatctagccccggcccctatactaccacgcctgtagcctgtgctcgcgacgaggcttctactcgggcaggtgaattccgatcggcgatcgctcttcgatcggttggacacggacatagggccaaggaaaggttatcatcatcagtgattctttttgatgaagaggaatcatcggtgatcctgacatgatcaccgccaagtagtactcaagtgcgtcgtggagcgatgtgtaaaaggtggtgttcgtactgcgtgctgtactgcagagtgtgcaccgcaactgttgcaagtggggaggctagctacgatcgattgatttcgatcatgggcatgggtccggctcatgggttttcccggaggagaggaggctagcttgcaattagcatgcgccagaaccggtccaaaaggcgccactctgcagcctagctttggctttgtatgttgcatggtggtcaatataatgctgaaaatttgcctgggaaacacccgttttcagcccaagttggatcccatccgacccggcatggttagccctagcttgggagctagggatgaagattaagtgcgcacgtgaaacgagacaagttattagcatataattaataaagttttaattattaaaaaaaaataaaaatggatttatttgttttttatagcaacttctatatagaaaattttcacataaaatacaccgtttagtagtttgaaaaacgtgctaacgaaaaccgaggaaaaatcaggatgttgttgaagtttagaacaggaatatcgaaccatatgtgctagtgcggcgtacgtaacagccacggggagtacgtacttcagcgcatataacacgtcagaatggaaccaaattccaaggaacagattggacacatgtggtcgttaaaaaacagtacgactgtgcatttgatatgatcctgtgaaaattcaccgaaatgttttctccttttccttattctccccggccgaccgatgcatatggtgtgtgtgaaaatgcatgagaaaatgtatatctgcttttctttttttttcttgagatgagaaatcgtgtctgctttccgatggtaattaaccacactagctagctagtgcaccggcacctttccaacataccggcgcggccagcacggcggaagaggcggccggccgtcgcagttggaccgagacggccggaaagcacacgacattgtaaaagccacattgccattgatcgcatgccgcgcccgacgcgcctgactcaagacccgaccgaaagagagtcaccgaaaaccacttcgtgcgattcatcagtcgatctgtcgatcgggtcacaaggcggctcgctcacggaacggcgccagggacgccgtgtcgatcgcccacctgaccgggcgtccgcctgatggcccccgaacccggcagtggtcaggcgctgcagacctggccaaaagttggaaggccgcgcctggtgcgcgttgcacaaagatggcacgtacgtacagctagctggggagtagggttgatggattttttggcgtggaaaattgaccacatcgaaatatttgataagtttgtgttgcattagtatggttcaatggttgaaagctttttcggttgccttttatctgtttcatattacaagtcgttttaatttttttctaattaaacttttttaagtttgactaaattcataaaaatatttagtagcatttgaaacaccaaattagtacccttgaatgtaacattgattttttttattatatgtatattttgtgttggatatactactatgtttttttataaacttagtcaaagataaaaaaaattaactattaaaaaaatcaaaccgacttataatataaatcggagtgagtaactttttctctatttctcgttgaataaataatttatattttttatttatagaattaagagactataattgatttcaccagtatcagaataagtaaaacaatgactttatatgtttatatgcgagattgtttactagcagtctttagatgtgaagaacatacagcatgcatgttttttttttcgtgtgtgtgttagatgcagccatgcaggagtctccataaaatcaatgagttttctccttattttctatgttggcaatgtgaaagagctttcattacgtagtagacaaattccttagtttttactggttcagggttcacaaagtcattacttggatccaaaaccactacttagtggtttcatcagaattcatgaaaaccggtgaaaattcagatattcttctttaaaaaaattgaactttactttagtttgattttttttagttgaccggcttatatagcgcgcggtttataccatgatcttgtgaactctgctagtgtctcgctcccattctgctagctacgatacgaccggggcccggccagaacaggtaaagcaatcgatctgacccaacaacgccaacaagaagtgggcgacccaattaacctggccactggccagacataccgaaacagacccaggatcaaagcagcctagacgcttacttaatccctactatatatgaagctggtagtttaattaatcaaccatcttattctttctctgaaatatcatcgtatatgtctgcatgggatcccatgtagaccactagttccgtgcatgtggatgcacacctcaactagttaggtgattattaggccctggtttgcttgcccctgctttttgcacactttaaactaccaatatatattcacatttgtggtgaccagccggtgctttaacaaatcaataaagggcaattttagattaggactgggtaaatcgtaatggaatcacacgtaaacttcaatttgggtggtgcaaacccatgatgcaaagtaagaatgaaggggtgatcaaagtgccatgtggtattggacaagctggctatagcctacaggtgtacagtgtgtgttagggctaccacaatgttaaacaaaagaaggtaagatgcattgtgggtagagacaataactgctactgggctattgtgctactgccggtaacaaaataaagaacaatatttttttagatatgtgaatctttttgtgctagcatggttagaagagatagtttaacaatgattctttttaagatggaccccaccttaacttgcataagagcaagtttaatagtataataacccactactatctccaattcatctatagccaatctaatagccaataattgcttactacactattagtatatggttccacctgtcatacacacattgtgtcttggagtccatgctgcagctggctacagatctgtagcccgctgctcttctctctcatcttttatctcattaaaatatatttgtagccagctaataatttgctattgtacctgctctaataggcatagcacattgtgagctttgtaataactgttaccacctaaacccttggcccacattattatctagtttagtaggatacattacggttgcttgagaggtactaccaagaagtattaatatctgtagtgcaaattttggtattttttaataccaaagataataagagatactaaattttacgctataaaatgtggtatcttttggtaccttctaaaaactgtaaaaatcattcattagtaatacgtttgtctataataatatttcgccaaatcagatctcagtgacttgcaccctagctgttggattgatatctaacggttagggactcatcttcaacctcccgcacaagacatggaaaagtggagctggtggatgagaatactcactatcaatggtgactccctcgaccgcgcgagctgttggagatgcgtgggtggtgaggtagcccaagacaacctgccaatactattagagggtgaaggtggcgccacggaataggaggaagaggaagtatatgaaagatagtagaatggggtggcgatgaagtcttgttggcaccgatacatgcttgcaaggcgaagtgagtcaacgtgaatgacgtgcacatctacgatgagtagcggtggggtctaggtcaggagcaacgggtggaggaaatggattgagatagggttacaaagtgagatagggatcttgatacaatttaaaccattcaacataaataatggaataagattaatcatgcaactcatgaattaagaaatccaaaaacaggtggcgttaaccatatgtacaaatactccatttagtcttaaataaatagatgatatagttgcctttttacacatatatttgatcatttgtcttattaaaaatattgcatatcattttttttacttgtttttcatcgaaggtaccttaagaatgatttatatttttcatatttacgtaacatttttaaatgaaaagaataatcaaataaaaatcaaccatatcatttattaaaacctaatgggagtataataaagcgatcaaaacatgacgacgccgtatgcatatccgatggatatgatctacttccagcctactttccatcccgtgtaacggccggtacgtgtaagtgcaccatggaggatgagtatatattatagatctgatcgatcagtaaacaagttaagatgcatgtgccacaaaactcaattaattaattaatcgaacgtcatatatatcgatgcatgggtagcaagatgcatgtgaccgcacaaacataataataatactatacagtaatagagtactactagtggagtactacaatgccaacgttagtttctgcagatattgcaggataacgaggtgataagcagatacgtgcgcgtataggtgagggtcggtcgcgagggttgtggacaggtggcgtcccggccggcacaaagacactagcccatgcggcgtgtatatcgtcgcgcgcgagaaatcgatcgacagccaagctggtgtttggatccccgccacacattgcctcgccaaacatgcggctgccacaacagtttgactgatgtttggttaatacgtgagttgtggcagccacactttttgctagttcatttgtatgcttattttcgccacagctgtggcgattatttctctcgccacaatctctggcgacgccacaacttgatggctggtttgggctgtgaaccctgagcgtttcgtgcgacgagatatactaaaccggccgggcggcccggtgcgcgcgcgcgtgctgctcgatcgatcacgtcgcacttgttggtcctcgatcgtgatgcgttacaggtgcaaaagtgtacgtggttttgactggttttccacgggggaaaaagagcaggcgcgcgtcgagcggtggctggccgggtttgcgcgtggccgccgctgccctcgtcgcggccggagggtttcagggacgacgacggccgcgtgtatatgccatatagatatattatcttgatcatcgagagagattgcgagtcggggatagcaccgacaggcgagtcttggagtgcacacactgtgtgtacacatactcctacaggcgatggtgaagcacatgtttcatccaatctatctcgtagaatggcgtgtattcacgtgatacctgtggtcgccgtatgtacggtaggtcccctctgcgtacgatcgaacctgcccgttgggcccgggccgcgtcttctaacgacgagtttctgacacagccgtgttgaactggaaccacacagccgcgtcgaactgggctaggagtgggaccactccttcagatatgattgcaattcagtggtgtgtacacccgtacttagcaacaacggtagatataggctgtgtttagatctaaaagtttgtatccaaacttcagtttttttccatcatatcaacctatcatacacataactttttagtcacatcatctccaatttcaactaaaatctaaactttggatccaactaaacacaaccaacccaaactttcaatccaaacttccaactttttccatcacatcaacatgtcatacacacacaactttttagtcacattgtaacaatttcaatccaaacttccaacttcgaaagaaactaaacacagccatggcagatcaagcacccatatttactcgtgcttggcagatcaagcactcattccttgtgcgcggcgcgttccggtaaaacgacaagcgccgaagcgcgagctagaggcagacagccaccggcatttggcctggcgctttgcgtctcgtcgatgaatcccatgctcatccgcaggagatcgaagaactggtaccatgaatgctatccgctaatttcgccggaatgggacgcgcactcgagaatggatcgtgcgcagtagttgtacacggccgtcgtacgtacaacactacaccactagcgcgcggatggatgcatggatcggcaaaatactttccgtttcttttcgtgcccttttatcttcgctttttacgcttttgtctcacacgctttcgacgtcggatgcttgggagcaatgggggtgggagagacagagagatggatcgaatgttcagtgggtcgagcggacagcaacctctcatcctctagcgtttcggcgcgcggcgcccggcccggactctgcgcttttctccggtccggagaaagttccgtatcggaaatttccggcgcagatgtttttgcgtttcgcctttcttgttggtgtcttaagctagcgtttgattcggcaaatcaaagcatgcgaatgagaaaaggttactttcctattttagtaaattttagcacctaaagtttatacacctcaagtttacacatctaaagtttagagaccaaaagtttataagtcaaaagtttatatatccgattcaaatttgaatttgaattcaaatatttttttatatgtagtatttctatacatctaaagtttatacacctaaagtttatagacctaaattttatagacctaaagtttatatacttgtttcaaatttgaatttgaattatatatgattcaaatttgaatttgaatttaaatattttctatatatagtatttctatacatctaaagtttatacacctaaagtttatagatccaaagtttataagtcaaaagtttacatactggattcaaatttgaatttgaattatatctgattcaaatttgaatttgaattcaaatattatctatatatagtatttcaatacatctaaagtttatacacctaaagtttatagacccgaagtttataagtcaaaagtttacatacctgattcaaatttgaatttgaatttaaattgtttatatatagtatttctatacataaatttttctaactttttattttttaaaaaattttatggtgtagaaagagaagaaggggaggaggaaaggggagaagagggattatagggggaggagagcgccgggtgatcgcgcgcattagcagtttcgatggaatagtcggcaagtaaccacgatcgcttcgttggtccggccggtatgcttgcgtagggatcgtggtggtatatttgcaaccttttgactcggcaaatggacactattaataagctagctgggatttttttttcttttcttgcggggagctgggagttaacttagggtgtgtttagttcacgtcaaaattggaagttttgtcgaaattgaaatgatgtgacgaaaaagttgaaagtttatgtgtgtaggaaaattttgatgtgatagaaaagttggaagtttgaagaaaaagttgagaactaaacaaggccttacacagttacacgtgaatgggtgacctttgtcatcactcgtcagggcggacccagaaaattaaaattatactgggtgtgctcattctagcgatcacgctaccatatatctattaactaattaaagtaatgaaaaaaagagccccacgttcgctctcatagcctagaaaatagaaaaacctaagtatactaggattagaatatgaaacggacaagaataaacaaaaatccaaagatatataattataggattgtgtggaaacggacaaataatttttggaaaccgtgtgaaacaaaataaacacaaaccaatcgcactatagatttatatgggattaaaaaactctaatgaagcactatagattatggtcagtttagattaatggctgagatttaatcagttttgtaagcaggtttagctctcggtcatgtagaccagcctaacaatggtcatacacagcagtgtgaaaatcgagagggatcaatgaattgagatgaactaaattgatgcaccactgaaggggtgactagcgatcacatctaggccgcctgtcccgacagcatggagaggctaatggtctcgatggctttaagcaacacgactaatgcattttccggagtagtaaaaacaagttgattaagtttcacaaaactataattaccttcacaaaaataaagaataccaaaagagtctaagagtatatataagaatacaatttagaaataactaaaattaaaaatttaaaaataattaataactatcacgcatatacaatacaatataaatattacacattggccagtttggtcaagttagtacataatttaaaattatgttgtcatttttaatatattttaataataaaatgtgaaatatatatattttagtatgtgagaaaaaaagataacgatcctaggcacgcaatctgcgggccatcatgctagctttttttaaaagaaaacacccaattctgatagaagaattttggcagattttgatcgaatttttcaaagttctattcatgaaaaatctataaaatttagaacaatcaatccatgtcctaatctatctagctgtttttctttttccccactgtttctcttcatctagtccttttctcttcccttgatttgatttttttgacgattacaaaatctccagacaattcatgatcattcgtgatcattgttatattctattttctggtaggattttatttttatgtcctttgattgcatactacatcctagtgtttttccaaaaaaaaaattgggtatgccagtgccaaccggcaaacccctaggtccgcccctgctcgtcaggtacgtaagcttggtatgtgagagatgcaaatttaaataacgaaattgctaaaaagtaactgttgaattctttttcaaaaactttcaaatgtaactacagtgtaattatattgtagtaagttacactagaattgcactatatttatattaactacaatgtaactatattgtaatatatgtataacttacgtataaaattgcatatatatttttaattcttatatacaatttatattaatttatattgtagttatagtatacttgtggtggaattatattacaactatgttacatttaaaagtttgtcattcaaaaaaaattgcggcaatttttttatagtccctttaaataaaaaacactagaaacttcggtatgattgcggattgaaagatatgtcgccaagtattcaagtcaatgtgtaccacatgcatgtagtgacaagtatgttagttacaactcctgcatcacttatcggtagggtgactcaatacaatagccaacctagtgccatcagtgcctcattctcttgccgttaacatcattgtctctagggttccaatggtattactgatttcttcatccatgggagtggcatcctctcaattcgatcgacaagggcacatggagatgcggagctcgctccaaccatcggagcgtgcatgatgatcgaagggaatggtagcgcctgatcagcacttatgatcggcttacgcctaaatggaggtggattggtgagtcaagctcttcgctagtatatggtcatgctcaacctctaccaagaaacgaaccaattaccatcgaaggcaactgtatgggtagtgccttggtttatgattgaaatattagtcaaggaaaattcaaagtgccttcatcgagcacgatccgcctaggcctgaatggaggtgaattggcgagtgaagcacttcgctagttagtgtttgggttctgattctacaaaaacaaccaaaccaatgacaatcatttagaggtaactacacaggtggtgccctccatcattatttggagcgttactcgaggtcggttcaaagtggctaagatggttatggaagattgtgtgaggttttctttgattgtctttatggtgggtggaagatatcaacatgctctctttgttcgtggatgttagcgaggtactgagtggggtagaaataccggtctggtaattatctgggttgacggcattatcatttatttgttattttgttattaaaggcctatggacgaaaatccattactaattttaggttggttcgaatgatatcaacaacaaacgttaagtctttcttgaaagcgcaattatggagagctatataccttttcatcttacttataagagtgttagctgtcactagggaccatgatatttttgtgtcctcttgtttttttatgtgtaatgaaatgtccatttgcatcgtaaaaatgtgatactccatctagttataaatatttaacatttaaaatcagatctaatctaacttttggaaatatgagcaataataatttctcaaatgcttaatatacacacgtatggttgccttaaaaatacttgtatttccatacgtatgcttaaatacaggaatcagtttctcaaaagtaaacttgtcatactgtcacatgctgaaatactagatatagtttattgtgccaatatttcagcatcctgattcctgttcctgatgccatgcatacacgtatttttagtgtgtgtgtgtgtgtgtctatatatatatatatatatatatatatatatatatatatatatatatatatatatatatatttgctttgtagttttcttgttttttaattaagccgcgtagttttgtaattgataaacgttcttcctgcaacctatattataataattggttatatatattttttaagtaaagcatggatgaatttcattatctaacacaaatttgcttggttaattgggggaactcaccttaattacatgtcactgtgacaaagcatgagtcatctaaatcctaaatgaaccctgaacaagtggacagcgcgctaaacctcctactagaaattaaagctcctccttttttttttctttaagcacaacgctccgcatatcttttccttgataaattctaaataaaataaagatcaactttttcttgagagtagaaaagatcaacttgtagaattgaatagaaaagcgatatcaccttgttaacctttgccaatatatgcatatgatgaccttatatgcttcgactttacgtgacatgtgtatgaaatatatatatagttctggccgggctctacttatatatctatgtgggatatatatcagtatacataaatgtagatatagactagacaaataaagccctaaagcaacttccgtccattctgttttaatttcttttctttttttaaccattgttaccgctttttttttcacttctctttccggggacaaaaaaacaatgtgatgtagtatgccgttcgtgatcgactcgcgctctagcctttccttcacatgctatctcgtgttggtctactccgttcgtattcactggtagagaaaccatctttggtcggtcgacccaaattcacaatagtcccggttccattaaaaaccgggactaaaaattcactggtagagaaaccatctttggtcggtcgacccaaattcacaatagtcccggttccattaaaaaccgggactaaaaataatttttagtcccggttaataagaggaagatctttagtcccggttgttgttaccaaccgggactaaaaatcatctttagtctcggttggtaactccaaccgggactaaagttcatttttaggcccggttgattccatgtcaggccgtgtcagggccctaggatcttaagtcccggttagtaacaccaaccgggactaaaaacctatttttagtcccggttggtgatactaaccgggaataaaaattaaaacacactatataatccatagtaccgatcctcttttcccgtccacacaacaaactcctccctctatctctttttttcctctctaacttcttatctctttccttatctctaactcccctcctctccttcctttttttccttcacccatggtgcagaagcgtgccagcgccgcggcagcggcgggtggccggcgcggaggcggcgacgcgggggacggcgcggaggtggcctgcgcggcggtggcggcgggcggccggcgcgggggcccgcgcggaggcggcctgcgcggcggcagcccggggggccgctcggcggctaccggcgcggcggctggtggcggcggtgcatcaccggccggctggcgcgg

SEQ ID NO: 9946 - DNA, 24528 bp, Oryza sativa
  unsure (1)..(24528): unsure at all n locations
atctgtctgtcacaggaccagaccacttctcactctacagcaacacagtctatgatactacgcttctgcctcacctgtcccgcgactctactgcttctgctcactttgtccaacttgacaacctctgtcagaattttggtacgccaggcgcaagtattggttcgcttgatgatgctgctgatgtcgctgctgacaacactcaacactacggcactactgctgttgcttccaagaggaatttaagcagggaactccctgatcagctggaggtacatgctcagcaccttttcatggatgccggctggaccatcaagccacggaaaaggaatgacagggctaagatggcatcctatttcactgcaccacacagggaggttgttcatacctctctaactcaggcttggaagttctgtggcaagaaattgtatgaagctaccccgtgttcacaacgcggaaagtgtcctaaggagtggtcagatgtcgatacattttggaaggacctcacagatacaatggcttatgtcgataagatgctcgtgaaccgccaagatgcacccactcttcttcatcggtgggagcttttggatcctttcatagctgttgtgttcattggtaggaaaattactgctctgcaacaacataaaactcttagagctgttgatagttcgacctatgttctcaatgacagcaggaatgtcccctcagaaagtaagagcatgctgaaatccagtgatttgttgcccactcgcatgattcaacctactccagtgatcacggactctgattgtagcacactagcaactgagagtggcaacgggaatcatgctttacagagctgccatgacttggaggatggccacaacggggatactaacctgagtactctctgcacacagagccagctgtattgcgcggcaggtgacacaagtcaaagaacagaaaatcccatttctgaaagtaatggacaaagggaactttggtctggagcaacacttattaatagcgcagtgaaaaagactaagaagaaatccaaaaggatatcagatattgattcaactggactagatggactgcattctgaaagttttatgcagcctgctgtggaaattgtgttaaaccaagaaaccgaactagcaagtgtggaattgtcttttgcagaaacaatatgcgctctgaggaacatggtatctgttcatctgttggcacatcgaaaaggcacttgaaagctgaatccaaattagcaaagctaaatgcaaacaaccaaagcaacaagctcgacgtgctcttgccttcagaagtcatgcaaaccagcatattacagggcgaggagactgttgagcaacctgcaggattcaacatactcccagaaaatggttctactccaacggaatcaggttccagcaagttcatccccataggaaatgaagagaagaagttgctgtcgctgaaggaatcatccattggaattttccccaaggatgtacataatcttccaacggtcaactctgttcctgttaacctatcctacgaatctaatgctgctgtcctgaaaactgatttatctcaggagtcaccgacgtgcaaggcagttgctgctaaaagaaaacctcaagcttgggagaagtatgccaagaaaaggccccgtgtgttacgtatcaatgacgatgatcttttgatcacagctatggtgaaaaatagggatcttggctcctgccacaaatttgctgcagactccatttttttggatgcaaagaagtttacaaagtttaagagctcaaagaaatgtggcaggctacttgctcgaatgtccggaaaaggaggatcaaatctgttgggtgggaagagagtaagtttggcacggaaaacagttctctgctggttgattgccactggctttctgaccgtaaaagatgttatacagtaccagaatctgaagagcaacgaagttgttaaggatgggcaggttacctgggaaggcattctgtgcaattgttgcaccaagaccttttctatatcagacttcaaggttcatggcggttgcagtttaccaaagtcctcattgggcctctttctacagtctggcaaatcgtacactctatgccaggtagaagcttggtctgctgaatttctaagtaggaaatgtgatgcatctggtagaaaagttgaggcgatggatgaaaatgatgatacgtgtggtttctgtggagatggtggtgaattactttgctgcgacaattgcccatcaacatatcatcaaacttgtttgtctgaccaggtatctagcttctctactgtgtcattgtttgtatattcaataactccccttcatgtttcagttagagtacacattgtaccactttgttccagaaaattaaaccgatctgtttcataaattatttccttcctgttgcatttcaggaacttccagaaggcagttggtactgccataactgcacatgccggagttgtgggaatccacttagtgaaaaggaggtttcaacattctcggctatcttgaaatgtttgcagtgtggagattcatgtaataattatgatccctcctgttttgtcttgtccttttacattcttctgcgattgttgggctgtgctgctgtggtagtcagttagtgtgtattccacaagattggtactaaaacactttcaattaccgtaatttggatgggtattttggtattatatgttcattttcactgaagttgctttagagagtccatcttctatgtataattagggcttatgcatccaagagcccatctagcactttagctgcaccctatttgagagtgcttaagcttctagtagccatttaattttggccattatttataatgtacagcagatgaatttgatctttcaatttttgtatttaacttcgtttgatgcattcttgtttttttgctggcagaccatgatacttgcattgaccaggagatgctcccctgtggggataaacaatccaacatatggttttgtgggagatactgtaaagaggtaatgttttttatttataagatgctgcagtggaagattatttagttagtcactaagcctagttcagttctggctctgcattctttgttatacacaatagtttcatctacctcatgtgctccaccagaatcaaaccactaaacagtagaattttagcatgtgttgcatatattgttcctaatgcttggaaaagaaaaactttaggtgcagatctatggccacaaagaatcaaacctagtttttctttcatgtcactacaaattcactctaccttcgcataccttagaaaatgcagattttagttttagatatttcttggaaactggttttgaatgttgttttcttactattcaatatttcctcactaaacatttttgtgttgttattggtaacagatatttattggattacacaatcacgttggaatagagaattttcttgacaacgagctttcatggagcatattgaagtgcaacactgatgggcagaagctacattcttccaagaagattgcgcatatgacagaatgcaatacaaaattagctgtggctcttactatattggaggaatgttttgttcgcatggtggatcctagaactggtgtagacatgataccgcatgtcttgtacaataaggggcaagtttcttatttactctctacctattatcatttttcccagtagtaagctaagatagtaattggcgagagttatatgcatctatagggacaattgaacatgcgttctcccaacgtatggcatgctttcaattctctgtcttgtaaaaaatggatatctgactatcatcatatcaaatgaagtaatgaacaagagggccaagacaagaaaacccagtttggtcactgcattttcactgccttttatcctttttatgtgaattaaagatgcaacgtttctgcattagtccattgaaagattacattgcctattcagcagttcaaaatggaagtattggggtattgcacattgcttttgcatgctaatctacacagttgatatcatgccatactggagagacaagcctgtactgaaaccttatatccactaattctttttagataaaggaagcttttatttatctcagacgattactgaaaccttttatccactcatggaactgccagtatgagtaatatcaaattagtatatgaatgtgtccatttcctgttatattggaatttttttttgacatgttatattggaaaattgatttaccagtacttgcaccatttatattttagtgaacattgtaaagtttactaacattgagcacatttcaccagatcaaacttcgctcgcttagattaccaggggttctatacagtaatcctggagaaaggtgatgagattttatgtgtagcatctatcaggtaatgcctttgctgatcggtttttagtttttctgggctatacatttttttcttctttgccctgaagtattattcttgaaccgaggtgatttttgtgatatcttatgctcatgccattgactgttgtcattgttttccatgtaatccaaaacttgctaagagtatgcatgtgaacgggaaagtgcatgaactttgcattacctctgtaccaaaaatgaaatatgggcacctgcaacaggtggaatgcctacggtcccacctgtcatccatgattcttttgctagtttgtacattcacatgttgttaaacaatgtcgctgtaatgctattcccctttcccgtattccgttaaaaatccacgtttaacattttccgaagaatcgcatctcgcagttgattatttttagaggagcgcatacttatctctccacttcgtactggttatgcgtagctaatcagtgatgactttctacaatggagatgtctaacatggaaacctgcagtcatgtcatgtccattcattgtagttcttttgatttaatattgaaaaaaatcttggaaccctgaatggttagataacatataatcactagtgcaccgatattgttcctctagagctaattgccaattttcatatgatgaatacgtcagcaaagtgcgatggatgaaaacaatgttgttggaaattatttagtagacaataattgtgattgttgtttgcctcagttattttgactatatgttttaaatttctctttttccctgatacagagatggttatgatatttctgtttctatcttattcagagtacatgggaccaaagcagctgagcttccatttattgctacttctgtggattatcgccgccaaggaatgtgccgaagacttatggacaccattgaaatggtacattacactttggaaatgagatacaagtgtactaatcaaattatggacttatcatgataatgcaccatgacaacttcgattaataggactccaactgtgctatagattttaggatgtgtttttcttctaaaatacttgtctacttcagtaactgttagcatctaatcttatttgcatgtcaagatttgaccatgtgaattttcgttccattcaatgcagatgcttagatcattccatgttgagacattggtcctttctgccatcccagagttggttaatacatgggtgtcaggatttggtttcaaacccattgaagataatgagaagaaacaacttcgtaatgtgaacttgatgttatttcctggaacatccttgctaactaaaagattggatggaattacagctgccaaatcaggttaactatcttccggttaccattggtgacatttgcgttctctgctatatatttttggacttctctgcatttcttccatctttttttatgtgtagtaatactgggtgtttgactatgcagaagaggacaaggatgcatacaatgtttctggattacctaatggtaagtgtttgcctagcaggaaaggaaacgggcatcttgaactccatgatcttgacttgttagaggccgagttgaatactgaggatgcaaccaatgcttctttcagagcactgaaacatgaatgtggtcctgcaacatggtttaatcatgccaaggtttggtccatcaacattataaagctttatattttccttgatcaattacgcctcggatggagcattacgactgcatgattgagttgtttagtcagcaaggttaaaccacagcactttaaaatgcacctaatacaaagtgctaactcaatcaatcataatacagatgcgttgcaatttatcatagagaatctcttgggtctatcccaaacataatagctatcatggtcctatatttatgttgaacgtcaagaccatcatagtgctttcttctactctgggagaaatccatatgaagagattatatcttgaggccgtatatatgtagtctaaatcagttattaatatatttcaaaaattacattcctaccatggctctacatgtgggcataaatgcttggattgtgttcaaatgctctccctttcactatcactcatagcagcttcatgtgtgatgtaaattcagtgcaaataagcagaactttttgtgaattttgcatatgcatacagcccattttcgttataatggcttcatggtcaaacataaatgttttttctagctgtgcacatagtaatgttttatctcataactataactgattcgtgcattatgtatttatgttattgtccagctagctgttggggaagcgtgattttattctaaatcgaatttctgggctgtctctggctgttactctgtgttgggcaactgttcaggctactcatccttccagttccaggtattccccattgacttgtttgctagaaatttgggcacctttatttatcgcattgcatgagtttggggtagacgtgtgaaagttttggagtgtgtctgtgttggttgtgatattcctcccctttctttctttttatttttctgtttgttccttttttggaagattgagtttggaactgatattttattggtgggtcaatcccccagagtctaggctatctccacagtccataatttgttttagtatcatttgggttaattttaggtcctcaatccatcatcaaaagaatcagcaaaatagaacataatgtggggtttgaacttgatatgcatatgtaaaccttagtacactacatcaggtttgcactggagctccctgaagtgtcataactttcatcttgttaattgtggtctcacagagatccaggcctaccatttgttgcttctgatacccatttgatctggaaattagttgcattgctgaaacataagtggcaatctaaatggtattggcaattgtttcccatctaaaatagcaaaagattaccaagtaccagcatatgttttgtttttgttgctaatgttatattaacgtatttttattttctatatgactgtgttctgaagatcaaaatgccacacaagcatgccattgtagctttgatttgtcccttttcccctcttttcggatggcacttgaatctgtatcaatattcaatacatagtccacacatgttcatttttcaagagaccgtagtttaacaccatgtaaaatcattcatggaacaatagttcaaccactattcctcaattagaattcaatcgattcaatgacaccctacaaatctttagcgacaatatatactgtcatcattctttagtcataaagacaatcgtttcatcaaagatattccttcatttgtataaagtctcaagtaatgaagccaaaccaacttgcctgtgcaagtgggcagactggtatagtcgttctgtagctgatccatctccattttttggcctgataatcttgacgttctttgctctgcagtccagtactatgcaatgaattctcccggatgcaatttaccggaccacagctcttttattgcaaaacagaaagacatcttccaactgcagttcatgattcaattccctcagaggtgcaggttaatggatcaaattgagctggtcgagctagattttatattgaatacagtgaagctaagaaatctgagggacacaagatggcatcatcagatactcaaatgttcccgcctatcactgaaatatgaaaaatgagggtatcttccaactgcagttcatgattcaattacctctgagcagctggttaatggagcagatagtcatgcaagaaataacaagggatggatagatggtctcatctatccctgcaatatgaaaaatgaatgtttgagatgcaatgcgaaactgtatttttttgctttactgagtgaagcacctgagtcgcgatcacttggacaaaagcagaaatgactgacccttttctgagtgatgttgataggatttacctaagctgtatgcagtcactgttgatgggtcgtataagctgcatggtggccagaagggttacttgcagaaacatggttaacatttaaccctgcggaagatatgaatggttgcacctagcagccattgaagctcttttgagtgagcatggtggaccatagtggatattgtatgagtgactattnaatggggatcgcgtgcaaagttttaatgaaactgagcggagaaactaatgcaatttcgtcctcgaaacaagcacagataccaagctatcgagtaagctcccttcttttttgaatactacaatggtcatttgatgcattactgactccactgtaggctcgcatcttttctagttttctgtgtgcagtgtttgagaatttaatataagtctactaaactcttactccctccgtctcatttaagtgcaaccatgagtttctgtgtacaactttgatcatccgtcttattttaatagtatttttattgttatgagacgataaaacatgaataatactttatgtatgacttatgtttttaatttttttaaaaaaatttttaaataagacagacgatcaaagttaggtaaaaaaaaaatatggctgcacttaaaatgggacggatggagtacatcctcagtgttttgtttggtcagaataattaatatacctgtggcagaattaccgaccagatgtaactattatactcacgcacttgcacttcacaatctcggtgcattgcccatctctactgatttgtttgaccttgccaaaatagtcgcctccctcatctttatctgcctcgcttcagcatttgcattcgtcatcagataattgatcttcctattttgtcccaaactttcaggacaagtatcacaatgctggtgatcaacagatcatttgtcagatgtttcatttgagtcttcctcttcctgggtgcagttcctgcctgcctggtaattttgatcagctgctggggctggcgcgtcgcattgcagtggagattttcctttgctggtctgcagccagagattagttttctcacacctgatacatcccgggccatcaaatcttgcaagttacttacagtagtagtactacactagagaagttttccgaaccaaagaatactactatttagattgttacaaggcaagtatttttttgccaatttaacatgcagctgttcatgcgtttcttgcacattggaaatcaaaacgttgattcgtatttgtacttggatgggcaacacgacaaatgctaaactgcagaatgcaatgtctttcaataacgttgtaaaagtaaaatcaggaagtgaaacaaaatacagtgatccttcacaggaagagataattgcttccattagccttgggagactggggtggacgatgcaagcaaagtattcaggctcttcctaaccaccgccttttatttttcacgtgcatgtttttttaactattatatatttttttaaaaaaaataaaagaaaattgtttaaaagaatatattaattttttaagtttttttaaactaatgcttaattagtgtactagtccatcatttcgttgtgcgtgttgggagagagcgcttccaagttgttccaaccatcacaaagaacacgcccagcaggagcaggcgatgactgactgtttctcgtgttgcttgaccgtgcagcataggtcaaggggtttgtttctctataattaatttaagcggacagttatgtagtagaattctaccagtatcatgtataaacaagtttcccggatggtttaaaacaaatatcaaattgaaattctcgaatcatattaggaaccatcacaatgaaaccgggaagcttgctgaagaccgggaacgtagttcggaggtgttgtatcactagtcgaaggttattgagttcttttagtctttcgatgctatagaagccctaaataatttcttcgatgggatgggggctaggataacagaattacacaagcacattctactctagtagcattatattggtagtatggtttcactgagtaacaacatgcatatgagcagatgaaatgaaaagggaacatagcattgctgctggggaagttcgaaatccagagcaaataaaaatcaatggagtacatagtacagcacagattattacattacgaatttacgattacgggagaagaaaaatccatcaatcggaggaaggaggaggcgtgggtggctggtcctggtcttgggactgggactgggactggagaggcgggaggagctgggacttgcggcgggtgtcgcgcggggggagggggacggcgaggaagtgcttggtcttggagatggggcgggagcggcggagctcgacgacgtcgccgaccttgaactggttgtccgggtcgtgcgcctggtacttcttcttgatgcgctcccgccgcttgtactttgggtgaggagccagccgcaccacctccacccccaccgtcttgtccgccttcgtcgtcaccacacgccccgtcagctgcttcgccgcctggatcctcagcgccgtcgccgcgcccgcccacggcgaggcgccgctgcccccattgccctggaccctcacaggggacgacacgaacggggtggtcagcagcatcttcaacgctctctcttccttgctatcgtatccttggctgcctctccacccgtggaagctcaagaagaagctgagcctgatggacgggtaggggataaggtttccggtcggacaacccagcataatgggctggctactgcaacatcaccggcccagcccatttgaaaacacactagctactgtatgtatgcgtgcgttcgtcttgaagccggatggaaatggaaggtcagccaaagcaagacaaatgtgctcataactcgcactacccagacgttaggagtaagcgatatgccgctacataggcctacgaatctcaggcttggatgatcaggagtattttcttttaccatataccctctcaactcaccttgaacatcaggctcaaagcttgttcaatcttccttttgtttcagtctcaatgtttgttcaatactttttttttattggggaatgaatcaatacaaccctgtcgagcacaaaaggaaaaaaaataaaataaaagagagaagaccctacacctaaactcttggacccataaaatacacgctacaaaacctttccaacaactctatgttgctgctggggtgccagtgccagtgccagtggagtgacaaaaaaacagaaccgagtccactgaactgaccagtacaatagaacctacaatcaagcacagctcttcgacccaatcgactcaataaaccaaaagggaaggtactagccttcattctgtctgtcgtggtaattctttcttaccactcacttgtgctgaggacaacgcacatgatgctctcagacagcagtcctgtgcgaaccaatatatcactagcagtggagcatacaaaactaaccggccagaatccatcacatcataaaaatcacacactggcgctgcacgatgagttccctttcttctctttgcttccgtcccaacgtatagtaaagaatagacaaccaaaacaaattccgtcggtatcctcatactccgtatctgcctaatctctgaacgaccgctggctctagggtggacatgcactgttcccaacccccacttccgagcatctatggaaaatgttttttgttagtttgttgcatgtacggtaccgatacagaaccgcaatgaggaatcgttttacccgccctaagaaaaaaaaatatatacctgcttgtatccattcaaaatctggcacacttcattgtgtaaaccttcactctttatctcctgtataaacaaatatcgtgagcttcggtgcagaatactggtgcagaaagcatgtctaatatgacaggaatctcacgttccaacttgcacaggcctggcagataaaagttagtgaacccacagctccagttgggtttgctgctacctagtatagaatgacagtattttgtgtaagtcagacagctttgtaaattgtaacagtaagcaaaagcgtggatgtaccattgcacatagaccatggaatgcatcctctttctcaaaatcatctcgtatcctgtacatgacgaaaattagatccataaaagggcaccagagagcttaaaggacagacacttacatgcacaaggcattgcaccaggcttgcatgaaatggtccatgtggggggccacaatgtctggacagacccagcaaagcctcccaagagtgattgcgctattttcgagaagtgacttattcaagccctgtaatagtatgtcaggacacacgaggcatttagctgaaatgctcactcgagtaaaagacgtgatgagaacaacttaaaatgcaattacctcaggagattttaaaataggcaccaagcaagaaacaacagtgataaccacaggtgaaatttctttgccaatctggaaaggaataatcagttagacatacccacaacaattttacaaaataccaatgagtactagcacgtcataggcacagaaataaactaggagtgcatgttgctggccaagtttagtgtcaaagttgccatgtggcaaatgtgattggcagtagaagcagtaacaaaggtttaaggtatatcctgggaaacaggtatggtactagttgctcagaaaagaaaggaaacatctatgtgtatcaatctagggttgcaatatcttttgaaataaaaaaaactagggttgcaaaagtggtacaaaaccttgattgctaattctccaattgcccaacaggcgttgttagccactgacacagcctccttcacacattgcgggttctgcagcaacaacataatgtgaggagtgaatccgagatgttatactataccagatagaaaatacttaccagttgcttcgcagcaacattaaggaattcttgaaggcggggatgcagatgtatagggcaaacctacatgaatagttgttattttttttattggctacaaagcaacttaaaacaataaaaggtggactttggtggtctgcagcgaaccctagaaaggtcccccaggagggcgagagcactctgtcgaacatccgctgcttcatccatacaacattgcaaaagaatatctctcaaactgctttgtgaaacctaaaacaaaatgaagatggcttacacagatatcgaagagctacacacatcacactttgaagtgtcttacaaataataaagaaaaggcagtatgaagcacaatcttttctgaaacccccaagttttcattcaactaatgccctctttggttgggtttaggcttttaagccgacttttcagtttatatggtttataaccgattgacttttaaaaaagccaaacggaaaagctacatgtttgtttaggcttagactttttggcttataagcctataaacaaagagggcctaaaccatagttagtagcgtcaagaccaatttcccagtcactttgtttgataaccatcatctcaactatgtaccgacatgtaccttattgcagctcacattctaacatattatggacaacctacagaacttggatcctctttttttggagaagcatgtcttagtatttgtaaccctaccttttctttcatctattaatcagtatagccaatacaggaaaggaccaaatattacccacatgttgtctatcacttcaagctagacatgtgcaactagctcctagagagaaaagggtgatggggatccacaagtctaacagcttctgtgaaacttcagcctggaacatccataaacagtctccattcttccctgttgatatactcattgtgcaccccaaaaactatcatttattaacagaggcagaatgtctactttaatgtcatgcaccaatgaaacaggttggtttgtctgctccgctcatatggtctaaccccttagtgtaattctattccaagaaattcgtcacataatctatgtgcataaagaaagagtagggcttggaaaaggtatggatctcctacagattactgaggtcgataggtaagggaacaaagagtaattaacaaaaaaaaggaaatatcattggccatatagttgaatttaccaggctttcaataccagcgccaagtccttctgcaagtcctgacaacagatccaatgcacacacaatgaattccttatcatataatgcaccagctgcagcaggatcaacctgcatgtagaaaaagtgatcccgtataagtttctttgatgcagatggagtcagcagcatccagattccagtgaagatcaatgccgattgaattgactttttgtggaattgagaggaacagcgacaaccccaataaggtgacaagtcctgtctcctgatattcttctattttgattgtatccctaatcctatctctaggtttgttctttcaaaatagaatatgtaaaaaatataattacattaatgtgtacagtcattattcctgtatattttgattgtatccctaatccgatctaggtctgttctttcataatagaatatgtactaatataattacattaatgtgtacagtcattattcctgtatattttgattgtatccctaatctgatctaggtctgttctttcataatagaatatgtaaaaatataattacattaacgtgtacagtcattattcttgcagggcatgtaagtgatgggaagcaaccttaatgtggtttaacctttaatgtggctttcaagtttcaagaccataaaaatgatagatgcattatttattagatttaccgattagtaataaacagctacaaattaataggtttattacttgggttggaaataaccaacttgatatcagctattaatttatcttccactaaaataacgaaggagaccattaagcatttgatgctaaccgatctgtggactgtagtcacatgccagaaaaatagagttagctgcttggataggaaagatccagcatcatatccttaagattagagtggcaatgatctcattttttcctatcattaagattcagttgtaacagaaagttcccagttagttctacaactaaataatttcgttagcgttattgactggccctccaaatcaaagtggatatgtccagtgcaatgctactgttagaaggtgtgtaattgtgttttgtattgaagaatagtcagtcaagtttcagttccactaagaggccttgttcggttaatccctctcataaggggattgagggggatttggaggctattgtggtgtagaattatttcccttaaatcccctccaatccctccctctcggagattaactgaacaaggctaaagatcaataaataccacacctaaaaaaaattgaattctaaggaggtagaatacttgaaatagagaggatcagtggaccaatcaactaaaatccataagtataactaaaaaaagatactgcagatagctatgcttatgtgagaagcaaagaaactgtattttaatataagagggaaaaaagatttcacagacctttgccaggtgctgagattggataagattgatgcatctctgaaatactggctcagcaaactgtgaaaatcctggtcccagggcctgaaataaataaataaataaataaataaataaatcctgatcatgttgatgccagccctgattgacatatcagtatgtttcagacatctttacttgcattattggttaaatatttgagttaagtattgatgaggtaagaaactcatggtggatcacgatttgaagagtcagcttctatcctaattgcattattggttaaatatttgagtaaagtattgaggtaagaaactcatggtggatcacgatttgaagagtcagtttctattctaacttgttttctctattgttactgcaaattaaaatcttaagttaacacaagacaaaatggaccaaattttcatcaagaacatttaacatactgtctggagattataaccacgaatatcgcaaaagatgctctaaaatgggtatgaagggaccttcaaatcaaatttagcatgttcaaactagagaaggtaagcacagacaaaaactgtaagtacctgagcgatagatgtaaagcattcgagcagtgggaataaatctttatcagagttggcaagttgctgccattttgtgattagtggtggcataaatatatctagatattttgcctgcgcagcatattaaaagtagttagttataagtagaaggaatcaacacacaaaaggaatcagacaaacaaagagacataattgcttgttaatagaaaagaacaaacaagagagatattcatcaaaatgctttgcacctggttaagctcagctccaacagcatcagcaagagtgccgagagcatcatagagtattcgaaggtttcgtctctgctcatgaagcaacacgtagagttaaaactaatgaggccttaggaagcacttgttggattgcattgttcaatgcaattgaaaattatgactttaaattacaaagaacctggtattttccataggcacacataaggtgctgcaaaataattcccaagtgtggtactaactcttcagcagcctcctgaaaacagaagaaaatatataataattatacagaaaatctcaaacagaaatggttcaaagatcaagtagataacctcttcaagcgttgcaaatgccgaacacgccgcctcctgcactcttttgttagtatccaaaaccctccttaataaacctaagaggattttatcaaattgttcacgaccattgggatgctctaggctctgcatcagcaaaaaaggatgcacgataagttaagaatcatctatggattgcatatagataaataaagagcaagtccagttcatagagcattatatgaacacagcgaacctttggaccccccccccccaccaccaccaccaccagaaaaaaaaacccaaatagtacaaaatgcatgtcgttaggaatgaaaaaatgagtagtctgccaactgatgtttaaaaggcaaacacagcacgctgaacaaaaaaaaaaaagccaaagtccacattgtcatgtacctactttaaatgcataatacaaaaagggggtggggtgtgtgtggtgtggggttagcttttgaaggaaaacaaaaatcttccagtatagaagatggtagattcaacacttaggaatgctcatattacctgtacaatgaatttactatatcgggagagggtccaacaagtaatactccgtataagaggaaatttatcgtcaagaagtggaataagaaaagcaacaatctgcaaatgaatagaacatgttaggataggtacaattcacaatgagaagggaagcagaatagacagatgaagaaatcaaaagtgagtctcaatacacacatgctactcttttcctaatgaagttcaaggaattaaatacagcaatagttaattgataaaaatacctgcggaagatggggatatagcccagtaatgcatccctccgctatagcaccaatagacaaaacagcagcttccctctccttccacgcatcatcgtcagttcgagccagattttgctgcaaaatacagaaaaaggtgtatgtttatccaaatcattcaaggtcagaaacagcacacagcatcggaacatataaacacttggccaacaacccaataatgctgtggatagggttctacaataatgcttcaatattgaactcctacaaacaggtttctaagtaattgacaaaaacacggtataattcatctctttacaaaggaagttagaaagtcccaaatcccttaacttggcgaaccacaacagagttcattcattttataaaaaaaaaaagccatattacatcaacagccttcacaaaggtaactcgccccaaaaaagtacaggaataaagcaataagttggcaaaaaaaaacgtagttcaccttggaacattgattattatttgaagcctaaagccattttttgagattgacatataaacttaagcattatggtttatcagcttctacaaaacatatgatgatgcagctactgtaacgaaccagaaactgctagttcatatgttaccaactaatcaggaatcatcacaccagtttcgaaggaaaaaaaagattggaagtgcccagctgacaaggtgtgttcaagatcaaactctacaatttgcaaattcagatcagagcaatgccaaatatacctagaatttgagtagcagctcaggggctaatgcatcacaatatcaatcttgataaatatgctagccataataaatacaaaaccaaaagtacaacttacctgtatcaaaggcattaaagtaggaagaatgtcatcaccgaaaacattagaaaggacatccaggccagcagcactacatttcctcaaattccaaacatttacagcatcatcatcatcctgtccatacgacaacaaaacaatgttatcttcatctcgacagtttaagttggtggaagtcattaagctttttaaaaacaaataacatttctggactcacatcgtcttctccggtttcagatccatgtagtcgagaggcatggaaccggggcttcaagtcctgttatacaatgcctttcttgtttataaagaaataaaagcagagagcatatagctgtaaaacatacagtcactttccatatcttttataaattttagggttgcccaacctaataaaggagcaatagacaacgcaagctggtagtaactaatttcaaaaaacataaaaggtagcaaaacctctgatacaccagttccagaacaaaactacaggactgcaaggttaatctaggacattcactgagaactttatcgttacagaagatttaaccaacctgatccctgtctggaaacgattcgtcctcctgataacatataatatatatcagagcaagtcactatcaccaataacccaccagtgaaatatgcgagatataaagaaaatttaccacctcagcatcagcaagtgattcgtcatcatcagaatagctcatgtttgataagagtgtctacaaatgaatgcaagcaaaatatgtaaagaaactgtgaccagctctcaaatgcatcagaactaattataaagagggaaagggacagttactgggattaagcgtggcaagaactctctcaacccctcaggaggcatgctgacatcacagtatgccgacctagatatgcaccatagttacaacttcaataaagcattaatcaacataaaagaaactactgcctatatcgcagctgatgatagtttatttaaaatcagatggatgacgcctaataaaatgtgagcataacgaactactgaaattttaagaataagaacaagtagttgacacatagatatggacacaatatagttttgatatgcatgctggattaccatgtttacaggggacataccagaattcacaagcctcgagagcaacttcatcatctgaatctttattagcttgcagcatcaattcggtaacatttttcaaatgaggctgcagtttactatccaatgttagatccagcataacacaagatataagcaattgaaaaatctacaaatgaagatcaacaaccccagagataaacaagcaaccctagtcaacgacagttgtttatttcttaaaaaaatgaatagcatgaaatctgagctcaatagggtaacttcacggactacttaatgaaaaaataacaaaaatcagtgcaaagtaaaccttgcagcagggcatcaaaagtattgtgattaaaaacaaacaaaaagaaaacaacagatattggatagtttctgcacaaacataaacacaagggaaattaaacatttcattgcctggctacaaaccagggcatgagctgcaagtgaaatgtgtgtgtatgtggcatttaatctggtgtgaaatatttagatcttaggatttattattttttaaaaaaaatagaacttatggtaattttatttgagattgctgaaatgcccaggcaatgtgctagttacctccaaaattgatggccttacttcaataagctgaacccaggctgagcaaacctatcaaagagacaggaagcagaactatatcaaggtaaaacatgcaactgagcaactgaatagtacataggagcatctatagatactcactgtgctccctcctgtcataaaaacatgtaattttggacatgtttcaagtaaaactttaaaactttgaacatcaatgtctttttaaatattcggattagccttcactgcgttatagttttatcagggttttcaaatgatccccagtagaaatttatctgtcgaaattgcatttttgaagaccatgtccacgtcaacgtcaaaaacaacatgtttttgcaaccggagggagtggtcagctagaaaaatgaactcataaaaggatgaaaggaaatctaggtaggcctcattgttcttaaggggtataatcaagctttcgttattccggaactagaaagtgttctgagttttatcttattttggtttaatgtggatcttgtgggatgctctgtaaattgtgtacttctatacactaatataattattttggttatatttccataaaagaaagtagttggatagcaacatagtgtaatttctctatggtgaaataccagtttccgaacatctgctgacggatcctttgcaaggttgaataaaccctgaagatactgatccatcgacatgtacaaagcctgcatataaatgaaaatgattagaaaaattgttaagcaaggtaagacatagagagaggaggggtattcttactgctggcatgaccacgatgtactgattaatacagcccagagctagctttctaaggattgcatgtgttgattggaaaaactgaaaaatcaattgagcagactgttagaacaaatgctgcaaacatgttgaccagagtgtgcaaacatgtatacacctccacagatgcatgttgtgaagagaataagcattcagatggtgcacataaacagatagaatttatgattttacagattgtggaaatgaaagtacacacaccatgtttgatagttatagatgtaacacaaacctgcagtaatcttggcatgaatacattgattggccgttcaggcaaaccaggaacatcaacatcaagctcctcaggaacatcctcacagatctgtagaaaaacaagtttttgagcatgcaaatcatgttcaagttcacatagagtattcatgctacaggttcgctactgagttactgcttaagcacgtagacaccaactgttcgaagtcttctatgtgaaaatcacagatcaggctcaaaaatatgagagagaagtttaccttgtatatagcatccatagcaccttccatatgatccagatcattactgtccaagcattgatgtagagcttgaaacaactcgatccatccagcaactcgaacaatttgaaagagtacactgatgactgttccgactgtggatctgattgccttattggttgcccctatacatggcaacaactcagactttacgtactgctgggaagcaggaggcatggagctgaaagtagctcggaggttgtttttcagcagaagtccagcagcttgcctggcttcaaaagattttccctggcaagagatttgactacacgtcagagaagacataaacactaggaggttatagggttataaccgtatcaagattaaagaacacattttattccagaacaaggctgataatctgcagagttcttacaaggctaaatctgcatcaggtctacagtttcctagcattggttggccataaaaacgaaaaatagtatttcaaaggttgaaagaaagaaacaaacattttaaaaattttcatcctaccttgctgccattgtttagataaatatcatcccaactgtatgtgtaattttctagagggaaggagtggatatagaatcatattgaatgtattatttattgattgatattgatgaatcaagaccgcactactgtatggtgcacgaacaccttaaaccaaaacaacagtattgcttcaattcaatctgtacatctaattagggagcaatttggtttttaacaggtgtccacccctatatttaagctttcacgtgatgttgcctagttccataaaaagtaaacctcactaaaacctgaggtcatttcaaatacgttgcgctacgggctgacctatgacttgtcacaacagcaaataatgtgaggagtaatctaaaaattcggaggttgtactttagaaagcatgtatgacaagacggggcatcgcagtgacataaacgcatgatttagttgctgctcatttgcttaaagaaaactgaaacccttgtatatggagacatagcagctaaaacaagaaggcgaaggagtgtgcacgggcatgtagggttgtgtgagaagaaacaaaatgaatttctaacatagttgtaagcatgggcaatgtaattataatcaaacgcagtagataagatgaaacatgtggaagtatctccgacgaacagacaccacgccattgaagaggtggtatcagcagctgagcatcgaaaatcccacccaatcagcagtggcgattctacaacacgagtaacttctaatgtagcaaccaaccgagcaattggagcttctaatgtagcagtcaaacgggggcaaggcaagcaggaaaaaaacagtaaacgataagaagaagcggcgcgattcagatcgagagtaatcctgcagcagcgttagaggcaggggtatcgcatattcgcatcggtgaaaaccctagcgaggggggagttggggatggggaagggaagaggtagagtagatgatggatgacctctccgcgggcgaggaggaaaaccaagtagttgttgaagtcagggaactggctgtagtgctggagctgctgccagatgcgagcctggtcggagttgggggagatgtgcgcgtcgaggagggtgcagatctcgcggaggccctcctcctgcggctgccacagcgccgccgccgccgccatcgccgccgacgaagctgcgagtcgagaggaagaggaagaggagggcgaggcggcggctgaggagaagacaactccggaggagaaagggaatcaatcaattggaggagtagtatttcccttcccttacttattagtattactgtttgctcctccaattttatctgctactccatttttcttttaccttttcatttaccccccccccccccatctctcatcttctgattctttctctaattttagcatccttgattaggggtttattatgtaaactaatggtgtagaaatttacttaggctactttcgatttgcttggttgaggtgcaatttaccattgaacagtttagaaaacgtgcccataataaataaggttgtttcacgacgtaaataaagtaccgaaaatggagccttactctccaataattggcttttatacggaaacgttaaatggaaataaaagaaaatattattttcctattaaatggaagacccatgcgcgcacgcgtccacgggtgtgcatcctttattacaaactcaaatgaactgaggccaatgatttatcggttcatcagtatgtcatcttaaccatcgtagtgttgatgctttgcaaaatacacatattttaattgttatcaatatatgccatacgtgctggagaattaaggtcattctcaatgttactccaagaaagaaggtaattccaaaaaaaatttataaactaggttgtttatttttatgccaaaactttggctaagtttgttcaaatcaaagctttttattgctttgccattttagtactgaccattttttccaacaaacctatgggtattttggcattaccctttttttctattgctttattaggcattgaacaagcatgcacaccctaaaatatcaacccgattgaatgaaaataacattgttattaatttctgtcaacctacccatatatgtgcgtggaaataaataataatggacctcctttgttgtctttcatttgctcttcttttctttcatatccatgacacatagtactgcacaatggcaccacatatcagtgatacatatgatgatggtagttttgaatccaaaattttaaggatggcactaagggcctgtttggtacagctccagctcctaaatttaactccaggagttgagtctggagtggagttgt

SEQ ID NO: 9947 - DNA, 14196 bp, Oryza sativa
gtcggccaccacaacttctcaattcattctctaggtcggccaccacaacttctcaattcgcatgctcaaagtacgattgtaagtaatgcatttctgggatggattagggggggggggggggttgttaaattcacacataaatttgaggcattagatgatgtaagtataactggtgagattttttttgtgtttcgtctaagaaaggccaatgaatcaaaagttttgcaagtttactccctacctggtaagttgccaagtggtacgcttgggcactttgggtgtctaattgaagagcacttgctgtcgaccttctgcatttaatttatggatgtgtttttgctggcaatttgaaacattgttactatgttattatctgtaacgcaagcaggtcgatcatgtatcgcgcgcctatgtttcaggattttttttagtcatgcccagtggccatctgtgaaaggacaaaattcctcggtttcattcttccagaggaggacaactttttttttaacatttttaaaaaaatcaacggcggcaaacattttgagatggagggagtatttgaaaaggtacacgagcggagaggtgaaatgtgtgatttactttccctaatttatatggcaaaaggcagaatgacgtccgtggaatctgggtagaaatgagccgtcggagaggagagattctgggatgcgaatccaatgagcagtacagtataactatgaattccgaaatcaaagttgtcacttctgaagtaacagtaaaatggtgattgtgcctgaacataccctgcagttacatccatcatctagtggtctctgattctgatcacaattaagcagagagatgataacaggctactcgtagcaggggagatttacatcaatgaatgctgccttactcatataaacaggtgatgtaataatgtacccaaagtttgtttggggactgatcgatcgagtatctatctatgtatgaatgagaaaatgcatgcaatcagtgcagatggggttgatccaaaacgaaatgatcgatgctggtcagaagaacacaacactagtgaagtggagtatggacgacgatggatcaggagatttggaggtttgacatgtcgaggtcgacgctggcgtgaacctcgcgcaccgtcctgtcgtagtcgtcttcttcgtcctcctcctcagctggttgttggtcgtcgtcgtcgtcgtcggtgccccagccgtagccagagacgggcttgtcgggcttggggacggtctgcgcctcctgcacgatcctcatgatgtcctccacgctctgcggcgagaaggcagctgcagcagccgcactacttgcgctggaagccgcgtgatcggctccccggcggttgtagtagacggcctgcgcctcctccttgagctcgcgcggcaggttcttgaggaaccaggggtggtcttgatctcgcccatgctgatgcgctggaatgaagacatgcatatgcatatgaattgggaatagataatgttgattgatgagctactccatatatagtctgtaccttgtaggggttggcgacgaagatgcgggagaggaggtggcggcagggctgggagacgtggacgtactcggggatcttgtactggacggacatgatgcgctgcgggcgattgcaaatgaagcatataggtcatatatatgcaaagaaagaaatcaagaaagcatcaagcgcagactacgtaccgagatggtctttctgaagttcttggggtccttgggatcctcgaaagggtaagcgccgacgagcatgacgtagagggtgacgccgcaggaccagacgtcggcgagcttgccgtcgtactcgcggcgggagaggacctcgggggcgatgtaggcgggggtgccgacggtggatttggggcgggagtggaggagggaggactggagtagccgaagtcgcagatcttgaggcgcggggccgggctgccgtccagcagcgtattctccagcttgaggtcgcggtggcagatctgcatggcgtggcagtagctcaccccgcacaccagctgctggaagaagtagcgcgcctcgtcctcgtggaacctccccgcctcgcatatcctctcgaacagctcccctcccgccgcgtactccatcacgatcgccagatgcctccccgtcaccaccacctccttgaaccttattatgttcgggtgacgcagcgaacgatgattcacgatctcccggaacacgttctcgtcgatctgcaccaatttcatttcatgctatttctttctttcttttcatatatcattccaaaagtaatagttgcttgcttaccctgttccctctctcgatgaacttcatcgccaccagctcccgcgtctccttgttccgcatcagcttcgctaccccgaagttgcccgccccgatctcccgaactggctcgtatttctccatatcctacctcctcttcttctcctctcacttaatttcttgctttcaattctccttctccttctgcttctgcttctgcaggaggaacagtatctggaggaaagaagcagagcagagcaagaagatgaggaggagatgacagacgacgacgcagataacctgcagacagatagacgacggacaggctgaaagaataagaggaaagccagccggccggccttgtgcgaaaaggatggatgcaaccagcgcacgactcggtcggaatttccatatttctcctcatttgcatgctcattaattttcaactgatcaatcatcaccgctgttaatctcttgggagtagtactaagctatggtagatggcgaccactgctgtttgtctgtctgtctgtacctttcagttactactacctccgtcccaagttaaattaagggcaaccatgagtttccgcgtccaactttaatcgttcgtcttatttgaaatttttttataattagtatttttgttgttataaggtgataaaacatgaatagtactttactcttgactaattttttttaatttttttaaataagacgaataattaaagttggacgcggaaaactatgactatagttattttgggacggagggagtactgtgctagctagtgtacagttaatcatatactccttccttggatggactaattaattaactaccactgtgtacaacgacctcaatatatatattccggccggttaattaatgttagctgctcgatgtttgctttccaaacgcactgttgcatatgctaaagggcaaccactatatatgtctaacgctgacacgacaccacacatggatggatggataggtggatggcaaccttacctgctcatgctgtccgcctcctaccgatccagccatcagcagccacagcccacacacgaaacaacaaatatccaagcaggcaggcaccattttgcagatctaattgactactactcatcagcatcgatcactaataatatcgtacttagtagattattaacttgctttccttgtaacatatagtactatccatccatcgtcgatcgccaacgcattctttcggtgtatatttgtcaatccaaattaattaacgtgagtacatatatcaccgtcaccgatgtgctgtgctgtgatgttctgacgaggaaaccacccatgtatatatatgtacggttaaactaacaagctgcaacccggccaatgacgctcatcgatcatcaacaagcctaccaactgcgactgatctacttaattaggagtattaaatatgccatcctaaccttccaaccccaataccccatcatcaatttttatctctctaggtaccttacttagagtatgttgctgctatagaacatattttttttgttgccattgggtcactcaaattcagaccgactgttcttcctagcctagctatcaggtactgtatcagttacctagactatctgtatgagccggaatcatatcactgttcatgtggactagccctacgtactcttacacttgtactcttactagtacttggcatcagtacctgaatcagggaccatcagatttagaaaatgattactcctaattgtcgactgatctgtagtagtagtactagtccagttgggatccaatctggtagtattagtactaagtgaaaaggtactagtagctaatcaagcttatcatcagaaggggcagattaaaagtgatggattggatatctgaacttttgggttggagctgatggtgcatatacatggatgggaggatcatgcagcttctttcgtttgctttacacaagcagctagctagctcagtgctcatgtgccttgctgtccacttattactatggcctcctgtctaatcagatcagctcatgatcttggacattcatgaatccctcgtcggtcaatttcctaacttgatcaacatggagattcagtatttgttttaacctttggagcttaggctttcattgactttgatggctactccagtttgtaactactagcttgtggagattaccataccataaccataaccattacatcacaaacgactgagtcgactaagacctgcagcattggacttgttgtcaagtcaatggacatatgaatggatggatgatgcacagcgcatgcagctggttttactaggaaagtttcagttttggttgcaattaagttttcaattgatgtttgccagaaaaatggaagcagcattcagctataactgaacaaactgaattcgatcgaaagtacgtttgtactatacagtatatactagtacatggatgattgtatacgtgggatgtatagatagatgagatagatcgtgatcgatggcatggagagcaagttgttagtgcgaatctctggtcggattcgattgatcacaataatacaattaagatccagtccaagtctgcaacagtgcaaaagcatggcctaccaacaaagccatccacaccgatagattccttcgatccagtattaagctgacagcgatgcatggcccgcactgcactctaaaatataatctttcaggtaacagtgtattccatattcagtgtcctccatataatccactgctcctagcagggaaagcgaggagaagggcctccccctacctcaaggctgtgtttgtaaaatagttttgggatatgattttccacctctcacagagtaaacttcaatagtagccatccattcttctgatcccatttcatcacatccctccatttattttcatttcctaatcccacccctcctaacccatttaccaaaaacacctcaaatgttagtgttggttaaggcagctcagctcattagtattagtacggaggacctgtacagtttattgtcatttttaaccttaccaatttatcataatgtaaaatacgaatattaagaaaagacctaatatcaaataatagaaggggtgtagcttcagacctagaccggctagcccaccaccttgtagggctagctggaagaccctgagcgtttctcaaattatggcaatgtaacaaactaaatacacttcaatcattgctaccttaccaaattttagcatctttagaagcttcctctcttaaaactctccaaaaatttagcaaatatattaaaacaaaagaaagaaaaaaaaatctaaattacccctaaactattttggaagtacgaattaccccataaattcaaaaacaagatatttttcattctcaacctatcggaccgaacgaattacctcatagccgacttcggagtggttttagtcctatatcaagcacaagtgaaactacaactttgtaactttagaaaacaatagtgatatggtatgaactctaaaatatgtagtccttttttataaatttatttatgactaagtctgtagttttgtgatatgtttataacacaaaggaacaggtacacccaaggtccctcaacttgtcagtgagataaaaaaacgtcatcgaaccgcaaaaacagatatatagggtcccttaactatacaaaaccggtcacccgagattcttcggtggttttgaccccggttttggtctatgtgacggctgagtcagcatggaaccaacgtgggtcccatatgtcagaatgccacgtcagctgctcctcggttcctcctctctctctctctctctgcctgttgagcgcgagcgcgaggcttgcaggcaagcagatggttgaggacccggcgagctcggaccggtgcacgacgcggaaggggtctgggtgaccggcgagggcgcggccgacggctgcaacgcccacggcctcggcggcggagaggaggagatcggcgaccagcgccgccgccgccgcgcttcctccacgcgctggccaccaccgcctccacggggacctcgccgtgggcggcggccatcgtcgacctcgccgcccctagggccctccacgccggcgcacaaggggcttgccgcggaggacgagcggcgtggagctccagacgcgccgccagcggaaggcgagcgcggcggtgcgagtcgcgtccttgacgggaggcgggcgacgaggaggtcgtcggggagtgcgctgacgcggtcctcgccgtcgtagccctcggcggcggaaagcgtggcgccgttgtcggaggcgggatggccggggaaccaccggaggcggccttggacgtggcgctgtcgtcgtcgtcgtcctaggcgtcggggaagaaggtgggcgcggcggcggcggaggctagggggttgccgcggctagtgtggatggaaagctgaacattgcttcttcagctccaagatactgtaattcacgagcctttttattttgatggttgcttcttcagttcgaaaggtgtctctgtttttattcttgttcaagccatcggcaagtctgaagaacctagactgaattctatactgtagtacagttctaccatcgtcagtacagtataaagaagcaatcttttgaatccttttcaagtaggagtatagtatgagattattatagcctgtcaacttgctgtttgtagctagccaatgctaatcttttgagctcgattatgatatatatcgcgtcgtcagatttgtgcagaatactaaaattggtatagagacattctgaccgggttatggtcgatgacactgtccatcatctgagagtttgcaagtctctgaactctgaacattgcccagaatctcttacagggatctttttgttggtgtcctcatacagtatacatcattggccccttgcaagcagaggacaaattctctctgcattcgtatgcattttaattctgcgaaacctgtagcttgtcctgtgtataaacaacgagaatatcatctgtttttcgttccaatttccaagtatcaacttctacctcgaccaggagtaatacagattctgaagtttataaacacatctctgcctgaacaagatggacacctactgttttcagttcaccatttgatctttaccagataaacctgaagttcaaaccgtgcagcactgcatccatgtttcccaagatagaatgacgcgtacacaaacttccagcgtgtcgagggcgaggtcaacggcggcgccgcaccgcgtgtgccagcaaccccgggcgccgcaccccgggagcggcccgctcttgggcgccgccaccgacgcctgcctgctgtacagaaactgcagcacgagcacgagcaccagcaccttgtaccgcaccagccgcggcaaccccctagcctccgccgccgcgcccaccttcttccccgacgcctaggacgacgacgacgacagtgccacgacctcctcctcggcaccgccgccgcccacctctgccgcgtgccccccgcagcaccaccctccccggtggcgccgccgcgccactatgttcgttgccggccggcttgcaacaggagaaaagagtgagagagagaagaggaagggaggatgctgacggcggcgttgcctccgccggcgcgacgccggctgccggacctcctcctctcccctccccccggcggcctcttcccccacagcgctgcccgtcgccggctgagaaaagtgagagagagagagagaaagggagaagaggggaaataagagggaagagatgaggtggcgtgggtttcacgtgggtcccacgctgactcgtccgccacatagtacaaatccggcattaaaaacgccgaaggatgtcgggtgaccgattttgtatagttaagggactccgcatatctgcatatctggttttgcggtttgaggatgatttcgctgacaagttgagggaccttcggtgtacttcttcctaacacaaacatattggatcgtaacatctgttctcctcaaggcctactcacgatgacgggctgaattttctgggccacagcgtaatgaatggcccaagtaaattctagggcctagaagggatcgggaggacgccctggcccagctagcctttccgcccctcctacacatcgacaaagctatcgatcaggattcaggagaagcctgccagccatcagccgcctctgcctccggcctcctgcagtctgcagatgaacaacaagctaggctgccacagccggtgatggtgagggtgaaagaagaagatgactcaaaatgttatgttgtccaacacgctgcctgtatgtgtgttgtccaactcgcatccttagctgttagttgactggcatgtgctctcctttgtaatttagtaattttaatttcacttttttcttgtgtaagttaatgatataattcaggagtataagcattcacatccaacagagtcgagaatttggaaggttcacccatcatgcattcaggagtaccgattgattgttgtgtcctgaatttttgctagtatatgcatataagtagatactactccactacagtacagaggagaggattgacattgactagctagtccacttaaccgtctccttactactatcagaagaagctaatttaattaagtggagtaaaagcaaaatgaggggtgggctgggctcattggtcgtcgttgtcgtcggtgacgaacttgccggttccggggttgatggcggcgaagaagaagaagaggatgttgaagaggaggagcggctcgatctcgttgatggggacgccggtctcgatgttgagctgcgccagcgcgcccttcccggtgatgatctcgccgatgagggagaaggcgatccccagctgcgcgaggcgacccacgaagagctcgttcgccttggtgaacccgaacagcgggccaccctcgctgagccccagcgccgcgcggaaccccttccccggcgggatcacggcgcgctccagcccggtggcgtcgtccacgaagcgcccccggtcgcccagcgcgccgatggcgcccagcagcgtgaagaggatgaagaagaggagcagcggctcggcctcgtagatggggatgcccgtctccaggttgagctgcgccaggatgcccttgccggtgaccgcctcgccgaggagggacgccgcgaaccccagcatggccaccctccccacgaacagctcgttctccttggtgaacccgatgccgccggaggtgccgaagatgccgtcctccacgatcgacttgttcttgttcgacttgtccaccttgggggaagccttggttctgctcttgaacgccgccaccaccaccagatgcttcttcatcctctgcagctgaaccatcggcgatgaccgaggagcggtgccaaggtcagacactaccatcatcggcatcgccatgctctgctgcagagccattaagcttagatggattcaacaattagctagatggatcgatcaaagcatgcagtcgctaatagcttgcagctgcactagctagctgctaaattactacaaaatacgatatgatcgatctcttgatcttggcttgctctcttggaatgaattcgagtcccacgcccgcccggggttttaatagttgaggaaggatgaggcctcgagcaacaagggttaggaagcagccacgtcgcccacttgggatccatccatccatccactgtcctccagcatctaaatctcagtgatcaccattcatttgatttttgttaccaactcttgtactattacgtacgtacacttggccctatgctttagtacatacatactccatgtcacaacaaacaaacaaacaaacaaacaaaaggatcgatcgagcaacatgcctgcctgccaacatgtgcatagtaactactcctcgtccacaaatattggaagcaaactgacacccatcgctcttttcgcttctacaagtttcctccagaagatcgttcattcagtgattcagacacgagacaagcaatcacgaagcagcgccctgcacttgtctcatcgctcaaactcctccagagaatgtcgcccacgctacctgtatccgtgtatactcctataacaaattagtactaaaatccttctattttggaacataataatgtaataactgctcgcgactttgcaatttttcttcttaccgtcaactctatctctccctctcaaaacataaatattttttcttttttgttttgaagaaaacatataccattttgttttctatgttaagtaaacaagcgacgcgatcgagctatccgtcaagattgatcatatcaaattttctccaaggtcgatcctttagtacagcaccgtatacatacacgtatcacactgtaccgctgttgcgccgcgcatacattttcgggtcaaatttcagtttgttttgaactcaaagccttatatagaattcacaggcaatgaacaagatcggttccatggtgtagtggttagcactccagactttgaatctggcgacctgggttcgaatcccggtgggaccttttttttcactattctttttcaatattttattaagctatctcactatctctttgcttcattttcatgttcgtgtcacgttcagtatttagaatggaagtatgatgcacggaatcgaagggccaaaaaacctccaatcctccatgcatgttatgtgttaaaacgagaccaaatgcagtctctctttagtaaacgatctgatcatgaatttctccattgcacgaagggttttcttacttttcccaatgctcaaggtaaaatgctaaatggtgaaatttaactccaaagcttgttaataaaccgtgtagatcgacatccttctgtcatccccgaatagtacgggctgctggatttacataaggtcttgtgtagttcctaattttttttccgaaaaacgtcacatcgactctatgaatatatgtttgaagcattaaataatgataaaataaaaaactaattgcacagttcgtatggaaatcgcgagacgaatcttttgagcctaattagtccatgattagccataagtgctatagtaacctacatgtgctaatgacatattaattaggcttaataaattcgtctcgcggtttccagggttacaaaattagttttttcattcgtgtccgaaaaccccttccgacatccagtcaaacgtccgatataatgtgacacccaaattttctttttttgaactaaacaaggcctaaatattcgcacagtaaacacagtgcatatatataactacactactggatgtcaactttgaactgcactgtcatacaaatgttttccctgcttgttcttcaatttggcctaatgagggtatactctccaaattaacccttccccacaaattaactatgaactacatatttatggcattgtatcacaaaattatagatttaatatcaattttctcataaaactacagctttgtaactttagaaaacaatagttatatatggtctgaactctaaaatatatagttattatttataactttatgactaagtatgtagttttgtgataaatgtcctacatctatagctttgtgataattttggtgcaaaatctttagtttgattgaatacagatgaaggctgattggaacataaatttgttcatactatgaacaaatagattaaaatacaaatgaaggatagtaatttagaacacagattacattttattggaagcgtgatgcgaatacttcatggcaataatctagccgatcaagttattgccaaagattacgcgtgataaatagagatgggtacgtagtagaccagatttagacaagcctagtccatttattttatatttgtccaaggcaagtctgggcttcaatgaagatacgaattggtgctagttgttaccatgcataataagggcatatacaaagctagagtctaatatgagctctctatattaattaatatcactagagactatccttctagtagagacaataagatttctaatccattaatacactaaatatttttttattatacttttttccttttctccacccctcatgcaacaaactttccgttaataaacgctaagagttgactctgagccgttgtcatgcataacaacgatgtttctccttccttccctctctttcttccatgtcaccaaatttacctacatgacaacgaagagagcccgttattagacaccattgtacatgccctaatagcctcatagcaaatgagtcgaaggcaacgtttctcaacccaggaacattgtgcatgtcttaggaatacagaacatagagatatttttgtcctcgtgtagaaatattcgcaagtaactattgaatgtttctcgacatgagaactttgtgttgtggtggtgaaaatgatcaccaaatgctgtattggcttcatacggaatgggattaattaattgtttagctggcattccgcaacaaggtttgcaatacagtaataatgtgtgcaaaaggtactactccgtcccagaaaaaacgaattcctatctacgaatctagacacacatatatccagattcgtagataggatttgtcttttttgagacggaggggtgaattaattatgaattgtgggccagatgtcatccatgaacgacatgttatatcacgtatctgtgctagttgtgtactccttctgtcaaaaaaaaaagccaacctaggtggggatgggacactaactaggacaacgaatctagacatacataatgaatctggacatgtatgtctagattcgttgtcctatgtggtgcccatccccatctaggttgttttttttcaacttttttgctattttacattgtaaattatttctaaaggtcacactattaaggggttgtttggttcagaacttcaatttgccatgtttcaccttagacgtgccacactatcttaatcttatggcgggctcatcaccatagttataacttgttacactttttagcaccttgttctatgctttatctgtcccgaaataaataaaatcagtacgggatgtgacatactttctatctagattcacgatactagaatattgtcatatcacgtactagttttgtttattttggaagatcgggagtacgtcatagagtgaattgtttgtctaacttaatcacaagtgcagcttactataatttagtggtcctaaaaagtgtggcaagtgaaatttgttttaaaccgtataataagatggctatgtgaaactaatttgcaggttttcctcctatctcaaaggagaattcttggtcgtgcttatctcctcggaataaagaaaagaaaagaaaagcaacgtgggagaattgagacgtgcgggttgttggcaactgaatcgcgccattgcccgtgtaaatttggttggtctttcttggccggcccggtaaaaaaataattcattaaagacagacaggggaaattagaaaagtgtgtacaaatttaaagacaggtcgcttcccttggccttaatttgggcacgggggagactaaattctcggagaaggaaggtgtccataattaagcgatcgattcgagtccccttcccttcctccctaaaccctaaccaaacccccaccactctctttccgcgcgccgcgtgcgacgatggcgcgcccgccagccgccaccgctccgcctcctcctccgccgccgccgccaccgccaccgccaccgatcgaccgcctcgtctggctcgcctgcgccgccccgctgtcccgcatccccgtcgtcggcacccaggtctcctacttcccagagggccacgccgagcagtgtcccgcccctctcccggatccgctcccctccgcccaccgattcttcctctgcaccatcaccgccgtcgacctctccgccgacaccaccaccggcgagccctacgc

SEQ ID NO: 9948 - DNA, 22536 bp, Oryza sativa
  unsure (1)..(22536): unsure at all n locations
cacgccgagcagtgtcccgcccctctcccggatccgctcccctccgcccaccgattcttcctctgcaccatcaccgccgtcgacctctccgccgacaccaccaccggcgagccctacgccaccatctccctcctccctcttcgccacgacgcccccgcccccgcccccgcccccgcccccgccgccgccgaattagcagaagcagaatcacaggagttccgctactacgccaagcagctgacgcagagcgacgccaacaacggcggcggcttctccgtgccaaggttgtgcgccgatcacatcttcccggcgctcaacctggatgatgacccgcccgtccagagcctcaccatgggggacctgcagggcgactcgtgggaattccgccacatctaccgcggcacgccgcgccggcacctgctgacgaccgggtggagcaagttcgtgaacgccaagcagctggtggccggggacacggtggtgttcatgtggtgcggggccccggcccccgagaggaagctgttggtcggggtgcgacgcgcggccaggtactcgggcgagtcggcgtgcaacgcgcgggggcgggtgcagccccaggaggtgatggaggcggtccgactggcggcggagcaggcggcgttcagggtgacctactacccgcggcatggggcgggggagttcgtggtgccgcgggtggaggtggataagggattgactactccgtggaggtgcgggatgcaggtgcgcgcccaggtgatggaggccgaggacacccgccgcctcgcttggctcaatggcaccctcactaacctccgccaccaacaaatctggcgcactctcgaggtacctacctcttcatcgtcccgtcccgtccctcgttaatattaatataatcaccatccccgatcgaggattgcatgcgtctcatgattgcccaatgtcactctctatgttactccctccatcccatagtataaacacttttaaattttgacacagtctccgatatgctattttgatcaataatatctataaaagtaaaatattttaaataaaatgagttgcatattatgataatttggttaatgataaatctagtaatatcgattttatatgattgatcttttttatttttatgctattaatggtcaaagaaaaacattttgacttatcactatgctaaaaatgcttatattttaagacgcaagaagtatgtatgtactccttccgttctaaaaaacaaaagcaaattagtactgtatgtaacacattttagtacactgaatctgaatagagatatatccagatttatagtattagaacgtatcacatccggtactagatttgttttttacatgacggggcagtagttatgtttgatgatagtgatgcttatgcctcgtcacctttgtccccgtccttacaccatgtttttgtagatgagtgttcatttcagcaagcttaattgttatcttcttataatggatattgctttgctcttgttcgtggctatcgcagctgatcatcttcaatttctgcttgtatctctacagttacatattgcattgcgcatcgcatatatagccgatctgacattactgctcgatcggtgcttgtgtgcaggttgaatgggatgcctccgccgcgtcatcttccatgaaaaacagatttgttaatccttggcaggtccagcctgttgatttccctcctcttcccatggggctaaagatttctaacaacaatattagtgcacctgtgtgcaatggggattcactgctggtgccaccgatactaatgcacccgcaacctcaacctcccgctgacattcagggagccaggcataacaatggccatgcctatgcagatataccctcttcatcaacaccatcaatggtgaggactcagcagctgttcccaagggatcttcagattttagttccccacaccgacattgtcactcctcaaaatggatcaccgcccgacaaccccgtaaacacgcctctttctgcatctgacggaatgaagaccatacagctgtttggcgtcacaataacatcacctgtgcaaggagacaccaatggcgctttcgcttcagcacaagtgaatcaggttccagagggtgtagatgatgaaactgctaccgaagaagcttctgacacaagcctacctgactctcttaccaatggccacaatcaagatggtgctaggctttgaaggaatatcccattaaacgtttccaagatgtactagtactttcttattgatattcatgcatttacttgcaattaatggaaaaaaaattcagaaatgcacttactaatcggtctctagttctcaatgccatatatactcaattatactatatgtatagttgtaaaagtactttcttattgatattcatgcatttacttgcaattaatggaaaaagaaattcagaaatgcacgtactaaccggtctctagttctcaatgccatatatactcaattatactatatgtatagttgtaaaagtactttcttattgatattcatgcatttacctgcaattaatggaaaaaattcagaaatgcacttactaaccggtctctagttctcaatgccatatatactcaattatactatatgtatagttgtctggttaccctttgttctctgcaattcgtgctgctcattatttgtcgatgaacaaaagccatattcaatagagtctcctgctctccttcattttttcctgactggattgtcattttctacatcaaccgatttagaagtaactatgttttttttgcagagatacgatgtacttcctccgtttcacaatataagtcattctagcatttcccacatttaaatatgaatgtggaaaatcctagaatgacttacattgtaaaacagagggagtaatatatttttatcagccacctgtttactgactgtttgtttactgttttctacagatggctggaccagatttgtttctaacattttggtctgttctgtttcaccctccggcagtttgacgggatgtggtgttcttatgcatgcatttaatctggagtttaggctggcaactatgccgcatggtccagttaagtttggagtaatctggagaaacgttcatttctttgttagaattgttatagagcagcactgctctgttttattttccttgaattttcacacctgcactttgtttgcttgttgtttgtttacctgtattgatctgataaacatctttaatttcctggggaaccgttgaactctgctttgctgttgcggctagcttttccaattggtatggcataaggatttggcacttccaagtgacatggtgatgattttactagtagtaacaatttgtattgtttacttgtgattgatcgatggagtggatgatgctggtaaggaatatatattggtgtggtatactaggatatacccttttgcaggagaaggggatttcagccagcctgagattgagagacgacgtgttcaaacgattgagcagtctatccttgttggaaatgaagacattgcaactcaccacccacctcaactcgccaccaaagctgaaagagatgctacaatcaatagcaacagtatgtttctgtcaaggtgatcaagtgcagattgattgatttttcagctacactagtctaccatcatgcacggtactccagctctgtgttcccaattcccttctttttgtccaagataggctgtatgcatcttttctttacattcatgattcatcaaaaggcagtcaaaatggtcctttttaatctccttttgccttggaaggatgaaactttacatcttgtgactttaattccttgttaaaagtcctggaccgcagcttgtatttgagtaggtagacaggtagtactagtagtagtagtattttctgagctactgcgagaggaagtaggaaaaagtagataccaagcaaaagcttgagacttggtactatgggacatatcaagcgtgcacatgtgtgtctgtctgtccctgtatctaaaccttctctatggaccatatggatggagtattacttcaaccactggtcaagctaagctagcaaaacgaaatcatgtaatcgttatagttgccaatacactgtccttgctgccagctgccttataacaagcttcagagtaggagccaggctaggcaattcagagtaacagtccatgactccaacagatatttcctcaaacaaaaaaaaaaggttttacaagtacatgaatgaacattcttctgatagataattttttccccagaaaaataggaggcccttaaaagcagttttacacaagtacatgaatgaacattcagatatttacacacaagctccaagtcatttttttccatcttggccaaagttcaagatcgatgagcagaaacctcgtcattcccagttgcaagttaaaaaaacaagaagaagatggatgagacggatagatggatcgatgtctctgcattacattacagaaaacacaatgctgcatgcagctgctttccttgtttgtctgctagctgtgattcattcgtcagtccatatacatgtacctccaatccgatcctccgtggatatcatatcatatactactacggagtactaggtagtaatatgcatgtagttacagtaaacaaatgaagagtattactatattcagagcaatccgacgagattaagagtacgtgaagagagtgagggaggtaagaagctactcctagctgagaggcatggcgggtgggcgcctggtgatggtgagggtccggatccagctcctccccctccccctccccctcaccgtcgtccccttggacgacgaccgctccgccgtcttcttgccgtcgatccccagctggtggcacgccgccgccttgccgttgccggacctcttccaccgcgccagctgcagcagccgccccaccacctgcttccgccaccgggttacgccgccccgcttcacgtgctccaccaccgccgtggtcgtcgtatctgtctttttctcgccggcggcggccttctggctgtcccacgtagccttgccgttgtcctcgaacttgatggagatgaaggaatctgttggttttaattaaattggcagcagcaatagtagagtacgtacaagaacacaattagcttgcttgcgagcgacagagaattgaaggcgaggcgaggtgaggtgtaccatcgaggctagcgatggaggcggtgtcggcgtcggagttggcgtcggagtcgtggggggcggggcgaaggtggtggcgagaggagtcgaggcgctggaggaaggaggagccgagcgcgaacaccttggggagagagatgctgctgttcttgcggtggagcggtcggtcggcgaggaggtgggcagcggcaggcgaggtcttggaggcgaggaggaggaggaggcgctcccggaggcattgcgagcacacgcccaccacctcctcccgcgggtggaagtagcacatgcatggcctctcgcctcctcctcctgctactccatccttcatggctcacttcttcttcttcttcttcttctcctccttgagttgagttgatatatactctagatagcaagctgctaggtcggtatctggagttgcacataagctgatgagcgtatatagattaggagaggaggtagctacttgagtttcttgctttgtgcacaattgtgttgttcttgcttggataaagatactagtagcactcaagagcccaagaggagaggacataccatgcaggcatgcatcatattcagactttcagacagttatgaaaaggaaaagagagagagagagagtagaggggattggtactgtttggaggagctagctaggcagatggattaattattgagagtggcctgattgcacgtagctaggcgcgtgtaatgttattgagttaggaggagcaaggacacggcgcgtgtgtggccatgcatgggtaggctgcctcctgcctaattagctagctagctttgtggttgaagcctttatgatcgatcactcaatccatcgatatattactccgtatttgactatatatgttcgcattgaaggattgaattggatctgcctgcatcctcatcgatttatctctggcagtgatcagtcaggtatatttgcactcaagcatggagatccatgcatgtttgctcatcgttcatagctcgctatcgatctcaagcttaattggaccatcatatatactactatcatgttgcagtagcatcgtatattcgtatcaatataatctccaacaataatgaccatcaattaatataatctcaacaataataatgatcgatcaatatgtggggggtaattgctctactaacaattggcacactcactgatcacctagctacctagtaggtatgtacgtgtacggtttacatattgcgtgcagtgaaggaaaccatccatccagctagctagtgtacgccgtgagtgagtaagcttttttttgccgtacttttttttcaagcttaccaaaggtaaggttatcaatgcaaattcctagccatatttttactatatgacacacaaagtcatggccaacaaaattaagccatgtcacatttttcatagtcactgatatgtgggtcttagattatagaagatgaatcttgctacatatatttgtagtagccaaccaaacattaacttagttagcataatcaaatttgcttaaccacaaatgttcatcgaccaaacaacctctaactacatggttagtatatataagtatacacaggctaagctagccaccttaattatcatctgtgtgctgtttaaagggtgtgtatgtgtatggacagaagaaaactattaattaatgatttaatcgatctgcagtttgctggactgctggcttgtcaacggatcagatatacattaatagtatattagcatacaggatgggcaactgcatttcgttactgtttgaacttatgacaatgagttgatcggatggatgaatgattgatcgaactatagggtcggacgtgatggagctggtcgatcattcatactactagtagttagcttggggtacgtggtccaatttcgatggagaaaaaccaaggaccacttagctactacctccgtcacattataaatccaactttgaccgtccatcttatttcaattttttttaaaaaaattaaaaacataagtcacgagtaaagtactattcatgttttatcatctcataacaacgaaaatactaattataaaaaagtttcaaataagacgaacgatcaaagttggacgcgaaaacttatggttgcacttataatgggacggagggagtagttattagaagatactaatacaatacaaaagggaattatctaattcgatcgatcattttccgttttaagtggtgtttacgtagagcagtattaagcgagtgaaagaaggaaggaatgggcagatgcccccacgtacgtctgaatgaatgaatgaatgaatgaaaggcccaaattattagggaaggagaggcctaattaatctaaatcgatggagggtggtcggcaaatgaagcaaggacgatgggaagagaaggaaaaggcgaatgagttgaatctagctaggaatgcttacttatatcggtgcatgcacgcatgtttattggagagaaaagaaaaaggaaagaaagaaaaaaaagaaagagaagtttctctgctacttggtaggaagaaaaacgagatctatatgaatgtgtgagagagggagaaagggagagagatgcacatgggctgtgggccattccttgttgtaccaatatgtacagtgccatacctgcacgcctgtccctccagttaatctgcctgatttaatctctccaccttctcctcagatcaattctgaccaggtaaaacaatcagtttctgctctagcacaatgcagcggtaaaatacaaggaaattgaccgttaataaatctgctctctacttgtacctgcatacatataccacagcacaacacaagtaccagctgcaagcgtgtccttcaattccatggggccttgttgccatgtccacatgcatggtcaaacacccaacaaatgccaccgtccaatttcgccttttctttattaaaaatgatatatgcatgacacttttatccaactctaatgtacaaccagagagataataaacatcttacacagtagatggctcatgccatgataaatcctagcgtgcacttaccaacgctactcacgctgcaacacggtcggacaacagtagaacaaaaatgtcgtactatcagccctcttttctttatttatttatcccaaacaaggaaagaacttttcgtctttgcacctcctgtatgtatgaaaattagaaaaaaaaaaggtaaactgcacgctccagatcataagtttcggaaaagaaaagaaatctcttcatgcatctttccatccctgggttggatgctggactgtacaagcggagatgtgtaggtagctatcacctccatcaaacactcaaacaggacagtgagcatgaatgcacgaacacacgcacccaccgtaacgccaccggcatgcgaccaaacccagcccaatgcttgtcttggagttgttaagacagccgatggatcttctccttggacaattgtagggtcaaacaaaccatctcgacacacaaacacacacctatccatcgacaaatatactaccactatacccagcacacgcacggcacaataatcaggtcaaagatactactggtaccatctgtccatcatcatctcctacacaaccttcctcgtgaaaccctgtaccccaaccccatacacatcgtcatcatgctcatacccagtcggtgcgccagcggtatcacacaacaaaacaacaattgacacggtatatacatactacattacaaacatacttgctgttttatgttcatgtttcctttcagagatccttgaatgatgtatgcagtgcagcaggagaatatgccgttgatgtgcatttgtcattaccatccaaatagcatccatccaaatatccaattgcgttgtaccaaagcaccgcattgtgtgcactctgaatttagacgctgttgcaatcaacagctccatctctcttgttaggtcggcggcgcggaatcaagtgactgttgctagattccgtgcagccagccatgaaccatctctgcctgatgagctgcacggtgacacagagcttcactgtccttttgcgcttcacaaagcaaaagcaggagcacaaaggcagcagagaattttgttagacgaacatgattcatattgttcgcagtaaaattagagctacccagctactaacacatcgctagaccagcatggaatttgtgacctctggggatcaaaatttgttactacttactacaccacaacatacaaacaagcaaatgaccgatcaaccaacttcagcatgccagcttcccatggttcaggatatcagtaagctcaagcgtaggagctgagaacacgaacatcatggttcacaaagatttcccaagctcagaggatggcagtcccacaatacaagatgattacctctgggaaataaaaagggagttagtgaactggtaattatgggtaacatatagcaaaaagaacagctgaaggactcttaacaattattgcaaagtacaactaaaaattctcatgtttcttcaccatttcagtccaaaattaggttcagtcaatgaagcagggtactgagaaagtatgttgcattacattacaaaaagtggagtacacagaaaagcatgactgatgattaatgaactactcaccgtgtatgcaaaaaatctagatcaatgaactagagaactcaaccgttgtggtgtgtaaatcatctacaagcatgcaagtagtataaaaaggtacagacaaagaagaaaaggtagtaagcatgtctagtcaacatctttcatttctatatggaactggggagatgattaatacaaaaacatagtattcatcaccagagcacatcagtcatagtcaacaggaattagtgcaactgcaaaccagaccaattacaactaatgacaaacattgtcagcatttttaatgaccatcctgggcctgtatatcatgtatttgtgtggccatgcagagacacgctgactgaaaattgaacaaattccaggccttccaggcttctcgctaaagcaggtgctatagtaaaactgattgcaatttcatgcatgtttcttcagcattccactatcacatcagatggtcaggaggctggatacatccatcattatctattttcaattaatttcaaactcaatgtgatgaagtaatgtctgatatgtttgttattagtgcaagtgcctaaaacatcagtgttggtgttttagtcatcaaaatataacacatagcacgaatgtctaagctgtaggaagaaaacagtgtggggaatctatacccaagtatctcagatcaaacacccatgatacaaaagaagttcaagtagatctatgaagtcatatactcatatgttgaagttccaagaaatcaaggaaacatatctaaataggtgaaaggtggaacccaaaacgtaggatgagccacgtaagcaacaaaaatgtggctgtctgattcagtaaacaacaaagtagggagagaccgagagagcattgtaaccatcggatcagatggatggtaaaaaatatatagagagaaaaaacagtggtgtaaagaagcaactagagcccttgagaataaaaacgatagccatccaccgcctgtgactcttggtaccttttcattttagcccctattaatatctcttatcatgcactccactaaatagtacaaatatttgtgaaaatacccctacatcgtactcatatttttaagtcaaggatcttgcaagttttgattttaaaccattgtgcatgctaaattctaactagaaattacggcatgagcatggatttgctgtgacatagacatactaaactaactaaactcttttgttataattttactatgttatgggtataataaattctatagttttcttagaataaggacataataaattctatatatagggatggcaatggggacctgaaccccgatatccaacggggaaaaactccattaggggtgtaaacgggatgttatcggccaaaattttcatccgtcgggtaggccgggggcggggatgctccacaggcccccggccctgaatccccatgggggtgcacatccctctacagtcgcagcccacaatagaaaaataaaggctcaaggcccaatttggtggactgtatatataaagcaatgaaaccctctctcagatccaatcagcagcgggaggccgccaggctccgtaagaccgcggccatgctcagccgtcgcgcctcctggccgagcagccgtcgccacagccaaaagcagcacacgcgggtcgccgtcaccactaccatgcaggcgtgcagcagccgccaccgccgctgcatggtgtcttcatctccttctagtctttcatgctctgccattgatgaagtctttccagctggcgacacaggcaagatgaaacggcaagatgcggaatcagcggccaagcgttgcgaacatgctacttgtttttttaaaaatttcttcttttgtatttcttgatttattttgttcttgtgatgattatttgtgcgaatgaatcgattacttcctattgatacgttcatatgtatgtgtgccattcttcctaaatctgtccttccaattgattcattttttctctaccctctgttccttcctgtttcaatttgttgagcagtggcctttgcgtttttccaggtgtgttgccccgtgggcccctgaaaccccggtgcagaatggagacggtagcaatacatcacccgacgccggggacggggacggggagcgggagatttcagtatgtccgggggtggggacggggtaccacaacccgacaggggcagccccgttgccatccctatctatatatgaagagcatctctctaagacttgccaacaaaaataaaatgaggatggtttcatagtgatatgctttgctataggtttaattaaaaattaaaagttcaaacttgtcatttcaaaaggtataattttcttaattcttgcataaattttacataagattaaacaaattccttgagagcctgcaaaattatgtgcataggctgtaaagcgggtgtgctaatggaaaataagggaagaataagggggtcatgcagaggtggtggaaacaccaggaagatggcgactcatgcagtggcgaagatggcaacaaataataaacggcaaagagaagatgaatggaaactctaaccctagctgttgcactcaccattttgtagccgaaagatgggatgtgcattttagattacaaacctatttacaacattactacatattacagatttagaaaatcattaaagagggaggtaatagtcgcagcagtaatgtatggtaaattttggtaaaaaaatctatggtaaattatttgttgttgtgataatatttttacttacaaatcaagataaatctgttaatgttatatctaacttcctgccaaagtatgttccacaaacacttatttacactgttagttgttattaccattttaaactaattactataaacaaacatataaacacttttaaaagggaggttatagttgcatgaacgcggaagtcaataggctagttatgagatgaaaacaacatgtttatggaagaaggagagcatacctaacagtatttcatcaaaaagcaacatacaacatgccatcaactcatcatcgctgggatttcctgaaatgtggaaagtgtcattataatatcttaagtggcaagggaaatcataaagagatatgcatatttatgtatgcaacagaaaatgcaatatcagcaagaacaaaaatattatgccccccccctccctctctctcatgtcaagtgaacccctaattcgttttaccatcagcaagaaaaataatcgacggaattaacaatgactcaatgagtaccagctaaacagccatctcacctgtgcaacagtagcgccccttctagtccacctatttccatggttgagggtaactgatgaagcagcagcagcagctgggacgttagtctgaggatggtcaggaatactcgaagtttgttgcccttgagaacagatatgttctggtagaacattttcagtaagtttatgtaaggtgtcacttctgtatagcgaacatgttcaagtgcaaaggattttcctcacccccttgaggttgtgacaaaaagaatctaaaaaagcttacttggattctgaaaactctatggtatcagactgctcttcataatcatcttccagattgattacaggaatcatttggccaatgctctgaccgtgaagcgtagcttgtccatctgcagcctggtctagaagcatctggtcttcctgtaactgagcactatctgcagcctgtttaccagcgccattgtttagaagcatttgttcactgttctggtcatgattatccaaatcatgcacacccataacatgattcaaaagcatttgctcattctttattgggcgatcatcgcctgaatgttcatcagcatcatgattgagctgcacctgttctccattcatattataattttccaacacttgtacagaggtactctgcccctgattcagaagcatttcttcagtttccaccaggtgtccatgatccgtgtgctcatctgcacaccgctttagaagcatttcctcaccgttcataaggccgttatctaaagtatgcacatccatgacatgatttatatgcatctggtcatcctccaactggtgattatcctgtccatgttcatcacctgtctgatttccaaccccttgttcattgttaaaatcatccgtaccatttctttgatttagaggcacttgttcatcctccgactggtggttgtcaaatgcatgttcatcttgaccttgagttcctgaagtgacgcagtttgctccttggctcatctgaccaacttgatcaggaacagagtcacgaccattatctaaaggcgaatcattggaaatctcaaccatttcacagttttcttgagattccacaacattgaggtcaaaaatcccataccaagctggcaggtcttgttcatctttggtaaggtctgcgttatcagtttcaacttcactctgcggagcctccattccatctctgacttcctcggccactggttctaccaagcatgaatccctgggagagatcggaccctccatgccctcctcagcatcgctgaactgggactgcctatgcagtggttcctcatcagactgtgatggatgaacaacatcctcgttggaattggacagcttgtgttgggtaacatttatttcagcaacgcttggataattgaaggcagcaacagcatcgtcaccatcgtcatcgtcatccccatatatatcttgagcttgatcgacctctatgatctctgactccacctctgctgtgtcttcattggctgcagcttggctggcactctcttttgtctccataacaaccactgaacggggaggtgccttgagatctcttggcacatcatcagcatcaccgtatcccacatcagcatcaccgtcacggacaatgccaggctctggcaccttggaatgatccaaatcggcgccggatgctcgccaatctgaatccctccggctgccatagttatagctccttgtcctggttctgctcctgctcctgcttctgcttctgctcctgcttctgctcctgctcctccgtcttcgatccagcctgctatcactggagacacggcggtcgttttgtgaataggagcgtgacatggttggtctcctttggtcgtcgtagtcgtggctccggcgggcactccgatcggctgaggcggcatcattgtacttgcgcctgctgtcaaagctgttgctcctcctgtcccagccggatctacgggatagcctgtcatcgtcccctctgtcgcgggggaagtcggcattccggcgggacctggggtcgtcgacgtcatggttcctggcagcagggagggggtcctccctggcgcggagacggtgctcggggatgacgccctgggcgacgaggtagcgggcggcgaggcggccggcctcgagaaggacgtcagcgcgggagcggcggtcggcggcggcggtgagtagggcgtcgggtgggggtgggagatggacatggagagggaggctgtcctcgtggtggtggcggcgggggcggtcgggggtgcgtctgtctctgtgcgggttggggttggaggggggagcgcggtggtggcggcgcggggagggcgatcgtcggcggtatcgtcctcccgaggaggccgggggcgggtcgcggccgcgaatgcgagacctcgactgcatctgcatctgcatctgcaattttctcccttaccaccctaccctaggaggaggaggagaccggagtccaagcttgaatggtagcagcagcaatgtgttcccgttccgtggagttaaatccggcgtttgtctccttcttcagttcctccgttatactccctatgtctcgtcccagctgcccagatcttcgcgcggtcggtcggcgcgttcgttcggtggcggcggcggcggtggaagacgatggttgagagaggcgaggcgaggcgagggtttgcttttggtctctctctgtgtgtttgtgtgtgtaagtagagagagagagctccctccggctccctagataaagcacagcaccgcaccgctcaactccagtagtccactggagggagtggagtacttccctaattaatctctctccccgatttcttctcctctctctggagtctggactggaggagtccttgctaatccaattgttactcctgctaatctgaattactactgtcatagtaactgctatgctattctgaatccctctgccgtttttttttttacggttttaccactccctaggcagttgagtagatctgcccactcagtgctaatgaattatgactgggattaactaggctgcgtctcctgctttgcttcttttattatcactataatatactacactactactgttcctctgtatgtattactactatacaactactaataatactgccctttctttaacaatcgtgatgtggaccaggaccaagaaaggtttaggttaggttaacctgtactagacacccctatttgtgactgatagagactgcaaatctcgaatgtttctttgtagttcgattgcagatgttcttctgtgctcaagactctaagactgcactccaaggtttcaatgtttgcatggttttgttacaattctcgtcatcttaacaacgctactactcttctgaatgcctttgctcccccagcctctcactcctcacctgtatctgtatctgtatgtacgtactcctatgtgtagtcgctgattgagtataacaacacacgatgggcatgatggaatgatgccatcgcatcatataacagcacaaattcacgctacatatactaatttacatcttgtcaagaacctgctttgttgctgggctgcaatctttacaaggcccaaacacacataaaagtgaaccgaatcatgcccaattgacccaatctttgttgacacctcctgggggctttcgtcaactcaacaacaaaaaggtctcaacctccaaaaaagggaaaagatggacatcaatcacacaagttcgaatctgaataggcactccgaacgcaagtcctagattgaagctgagacttgccagccagccattttattcctccttgaatggaaaagatgaaggcaataatgatgtgatgtagtacagcaaagggttcactttggaaacatgagttgctgtacagcaaaggattcctagttttagaaactctgaaagtgaatcactctgtactgtacaccctttcttctgctggcctcagcttgtgtacctaaaatgttctccaaggtagatgtgcacattccaaaaacataagttgctaactgccactagcaacatttatgggatgattgtctagacttcaatgcaatagcttcaatggctactactttttctaactataactgtaataataaaccaaagggtaaagcctcatacatcatcaaaagattagacacaagtactcaattccctccaaaattttagcataatatacttcaccaaacatgaccaacataggcttatcatgaattcatgatactacatcaatgcttatatgcagagagaatgcaagcatagaagatacagcaagaaattaagatgccaataaacagatataacgtgcccaatcccgatatgagcttccatggttggttggcaaacaaaagtaccaaaaagaacatgagaatatacccgtactcctactaaactgttaccaaagtcaagaattgaactgttacactcgtcttgttcctcaggtctagcctggtcctgcacaaaagacatacagcatataatgattgatatttaactcgttcaattgatcgaccaaaacatggcaatggctctcgaatcaaacaaataaaacagaggaaataaaaggggtactgtggatatgtcttatactttcctaacaatctcttactatattggaatcacagctaatttctttggaaacacttaccgttggtaataaaagagggaagcatactttgtcaaggaaaaccgggaaaatacacccccatgtactacaaacttttaccattttcacacctattttggacattttaaagagaaacaaccattgtttctcaaatgattttcagaatgagataaacactgcataataataacctttcatttcaaataaaagagacaaaaaatgatgagattgtcctttgttatgttatactcttaagtcaaaatgagaagttcactatagagaaacagcttataacttataagtaaagtgatttatcaacaaacctctagcagacccaggtgcaccttcacgttggctcatatggggcgcgagcatctccatcacagctctcatagcgtctgcagcctgctctggtcctgccaagtttatttggatgccagcatccctgtgcatgcctggttggccatgctccccttcatgtccacttgaagtttgttgtgggcgatttccttcagtagagcccgtgaacgaaaaaggaggagggactgcagtattggttggaaaagaaggaggtggggtatggttacttgaagtctctgtctgaggtgttccttgactgttcccattgacatttgcatgattaaaaatgtcattcaaatttatatttatggaatgctcagatgattgttgactgatatcagacacacggttgatgatattggcgaagaactcaggagttggagaatttccaggaggaaaaaacgtgaatggaacaccactgcttgattgaccaggaaactgtccatgtgatgcttgactttggggtgcgtatgtattctatacacaacaaaactgatcagttggtaattttgaaaggacaaagaaatcccccaaaagaatgaatttcatgtaatcaaacaatatcagcattctatacctataaccgaagttccaattaggagttttaaatgcacaaattagtttctaaaaagaaaacaatggactgtatgtttgccagaggtaggacatatctcaaagtccagtaaaaagcacacgtggtttccagttacagtacctgttcttctggtggacctcgctgttcagccagcttctttttggtaacctaaagttcaggcatagagcagggataaaaattccatcagccattagcgagagtagcatgaaacaagctttatccagttaatgaaaataagagcataaaaacaatacctcgatattctgccagacattttcattactaggatcaagctcggaggctgcaagaagaaaaacaagttcattatgcacccacgcgttactttactggatatactaaatgcaaaatgtagattcatgccagaatggcaaccagaacaagttggcatccagaacaagttaatttgatctagaaaaatgaggaatataataatcagtagacattagaagcaatgaaggttgaaagtatgtgtttgatgtgaatcagagtctacacagtgctgaaagcatgtggcatggattgcgctgcactagcgaccttgaccacaaaggcaattaattacataaagatctcttaaaaggatacaccagaagaaactgaagggtagatatgtaaggttgtatgtaaaaaaatcaacttttcagaccacaattcaaataagcagcagctttcccagaaaaaaaaatgtaacagatgtaaaaacagtgtatagcagaatgtatcacaggttcagcaaaactaactgagacttatggattgcctacctttcaaatatcccttgtacaaagcatcgtggtattttcccaaagcaaaataagcagatccaagtcggctgtatgctttactgtagttagggtcaatttcaattgacttcaggcaatcctcaacagcttcattgaacatattaagaagggtatatgcagcagccctggaagtaacatgtacttttcaatttttcatgttacattggatcaaagcaatgtatgaagcagataaatgctcttgtgagaaacaagtgcatagttgtaaggcagtaaggattgttaacaccgctaccataacaagagtaaaagacgttaggttaacaagagtaagaacttgacaattatatatcaactttcccccaaaaaaaagggcccatgggccatggcacgtacgatttgtaaccagctgcagctggcttccactgttttaagatgtttgtaccggtgggaagaataataacagatcctgagattactaaccacatcatagcttatagcggattttggggtaacatagtattttatatctgtacttactggttctggcattctagactggattcactattagccactaagccatctcaagatcccatgttacatagaactactcaggaaaacggttgaaataacccaagttttgtttagttccattaattctgacccttatccctaagagttactcagttatgctgaaagagacaacaactgcacagtgcatcctacatattcaccaaaaaggtcatcataaatgtcattaatttgtgcatacctgttacaatagtaaatagcattatttcggctcaacgcaatagcacaggtgtacagttctacagctttaagatgttgttttgacctcatggattcattacctgataaacagacatgcagttagctacagaaggcttgaactgcaaaataattagctctttttacattgataaatgaaaaaaaatgaagatttttcaagtaagaatttttagttaaagttaaaaaaaacaggaaggtgtaaagtggttcactacccaatgaacaaattatgctatgctaaagaaaatgcacaagtgaaaagacaaagggttgtggataaataccttttgacttgaagaattctgcaaggtctcctaagcttgcccttttccttcctgacttccgcatcccctaaacagaggtgcattgtacctcatatcataattaaaaaaacactagactataagcgaaacaagaaaaaagtagcatgcagtccaacagtcgccgatctcttcgtccaagtagtgccactacccaagttgccctagtcatttaagagaatctccatgaaacaggggacagtcctagataacaagggaggcatctgggataacttttccttggtaacagggtgtagggacaatacaatcatgatccattattgtgctttaaaagagcgcgagttagacaagtaaatatcacatattataccagcaatgcatcatcgaagaattgtgttgcttttgaaagctggccaggatcttcagctccagcagatgatgttttaaagaaattgatttcatcaagcgaggtatagaattttgcaaacagttcatctcctgaatgatctgatcaaatagcaaaatcaagttgcatgagtaaacactgatttcaagtgaatgatttttcctacatttgttattactcagtaggaaataacaccatttacaaaaacaagcttaatatttccagcattatctggacatctgatcatagagacaaccaacagtttatgctatagtcatacctaagtcgaaggtatcttcattttggccttcactctggtaaggagaggcagaagtcagtatgagaagctaatatttcttattaaggttgttaaaggatataacaaaacatggtgaacaagacttgatgtatgagattactaggatgtaaaattataggcataatgtaattccaaacgtatgcatgatgttatgtcaatatgtttgtctttatatatatatatataaatggcatggaataagacggatggcggtgattaagcgtgtgacaatgtgtgtgtgtggtgattgaaagaagaagaagagggaaaataaagggnaaaccccaaatttaaccccaatttttttnttggaaattttggnttttgggttacccccaattttttnttaaaggtttnnccaagnggttcctnnttnccctttnggngggaatttaaggntntngnanangttgnccttcngnccanctgcccaagaaggttttgttggataccgggccgggtgcagagttatcttgttgagcagcttccatagagctaaagagttcaagtagaagtcctggatgtaccctttcaacaacagatgaagagttgatactgaaaatggattccagacattccctggcaacctcaagagcttcaggatcagccccaggagctaactcaactgcatagcaaacagaattccaatgtcaggagaaccaatggctttgcaacactgcacatctttgattccaaaaaaggggagctaagctggtaattaattttgtctctactgtgcttttttttttggtgtgggagggaaatcttgcatattgtgctgctttagatttggatggtgattatcgaaaatattatagcctactactgtagctaactagttagtaattagcaaattcaatggtgcttcgcatcgatgtgcgaaatggctccatctagagatagaagaaaaagggcaagtagtaatccgcaacctatacacgcgactccaataaagcggaaatgggatttagggcaggcgtatgggatgggatggaaccctagtagtagtagagtcttctcgaagcataatgatccgaagcgaagcatgttggtgggcggttgcaagggaagtagtccgattgggttgatcgatccgcagcagcaagcaacccatactatactagtactagttcgctcgcaggaaaacagtaaaatcgagcgtgatttggtgagaagagaaaaggggatgggagacgggagacgggagtagtgaccggagttgaggaaatcgaggaaggagaggacgatgaggcgggagatgggggagtcggagcgggtca

SEQ ID NO: 9949 - DNA, 20382 bp, Oryza sativa
cctagttattttcttcaactcgaaacttcaacttcttatttttcattagcatgtttttcaaattattaaatgttatagcatagaagcttataatagttaaattttaattattcatatactaataagccttctcatcctgcatgcgttaaaatctccatacgaacctatggaaagaatgcggccttaattaaggtgctctctctaactgagatgaatattgcactgatctaatgggttcaaacaaatttacaaattgtacgcccaataattaagttggtagtggttagtaagaaaataataaaactgtatattgattctccctactgagagagagagcttcgtataagttggtcaagaatagtcccataaaaaagataaatcggtatagtggtattaatatacgtatcttaattttgttttttctcaaaaacatagtataaacgtaaacattcacaacgtgtgactccgataaacgcccacacacacattatactctaatattagtatattaaagatgagcacgcacataattggtgttgcctgtgtatatccagctcgatggagatgattggagtactgggtagtagctggctggccagggaggccgaccggaccaactgcatatgcagcatgcttttcattcttgatgatatgacaggctcagcatgtatagcattataattagaggaaagcgaaaagggaaatggccgaatttcgcagcatgattgggtccaagcatacgtccaccacccatctattctcatactcctgctgccgcgctgtgttgttggacaatgctgttggttttatatattccgctgtgtgtgtgtgggtgggttcatgtatgtacacgctgcaattctgcaagagcaacgcaacaaaaagaaactcggagcaaaagcagcctctcttttggcaaaaggctttcttgctttgctttgctttgctcgtaatactgacagacacacacactactactactactacacgtgagattttcctgaacgtcgaccccgttagcttccaggtgggccgtaagtggagccgaaggccggcgccggggttagggccgcacgggataacacagtgttacaagcaaccgagcttgacgaacctatgcggttattacatgtgcgagatgcttagggtctgtgggagatacagaactaagggtatgtgggagatatagaactgagtttacagatgtaagtcctcatgctccttagatattgcaaatatttcatttaagttgattgtaacacaaatcatttgttttttactttccatagctcccgagcatcccttataacgcaagcccgttcgatcagaaaacgcttatctacttatgcgcggacttatgccggttcattcgtcgcgacacctacaactatccaggagagttccatgatcctcatagctaacttgctacggatcccaaattcaagaacctaatggagcgggagagggaacatgctatagactaaaatgtttatttgtcgcgggggatacttgtaatattacaaacactatacattatatgtaatttgatgtttataactgagctcggtcaattttcggctaatttttcatctattatcccgtgtggtcaaattataccggcccatgggataataggttaaaccagacggctagcatgtgctagagcgacggcacgaattatcccgtgcggtcgccttagcacacgctagctgaggggataacctattatcccgtgcgatcgtccttattacaccgcacaggacaatcaattattccgtgcggtccgtataacccgaccgcacgcaaaaatatcgattttcccagacgagtggttgcaggcgggccgagcgaccgcacgggataatatatccaactacccggaaaaatgggtattgtagtagtgacagtcccgcagactgctgtccaattggatccacgaagcagagcacgcaacacaaatattagaaagtcggtgaatcaaatttaaacaattttctaagaaatgataataaaaactattttttgcaaaaattgaagcttggaaaaggtttatgcagtaatccataagaccataatcaaataaaaggagactgggggtgggtatgcagatgcgatggtgtgttcgttcaaaccgatggagttggatttccgcggcacgcgaaaaccagagtcattagcatataattaaccatataactattacacacttgaaataaatatttttaaataactttcatgtagattttttaagaaacacactgattagcagtttgggaagcgtactcatggataacgagaaagttgcacgtcaaaaaatcaatttataaagactaagaacatctctgaaagagttgttatttgactcttaagccaaaaaatgacaattttagtgaaaatatggtttacaacaaacttaccgatcgaatggccaagctatctggctaaccaaactcatccagtagcccaatttggatagccaaattagcttgccaaacgtgtaccctacaccggtacccctatctctctctctcatttctgcgcttcctctcctatccctagactcctcacgagcatatgtgccgacaaatgcacttcccaccatccgcaaagccgctgagagggtctgtcatccattgttgttgccccccctctccccgaggtaacctgttgccgtccaaaaacaaatcaccgcaccctttcttccattgccacgacgccctttccctgtcgcgcctagcagcagtcgctaaccatgccgaggcctgccactcaacccacagcctcctctttccctgtcactgtcgctcaagcaagtgagatccatgagacggtggggtgatatcatcatagcagagggagtcaaggccgacgaccactctcgtatctcaaggttggcgattgcttcctgcctagctctagcgtcgctgtcgtcggccaaaaggcaagagaaaatctctatcgttgctctcttctatgctgcctacctcgctctctccggtgctgaccacctcaggccaccccgctggcgtcggtggcaatgtcggcctcttagcggtggtgggtggggactagggaggggagaggaggggttgcacatagaaggagagtaaggaagagatacaggctgacatatgagatctgttgttagattggagagggtattttagagtttgttggagcgaaagataaatgtaactctttattttttttatcgattttgctatatatttgtcgataaattttctcccaaaaatttgacagatgtaattacaatacaatcgtagtataattacactgtaacttacatgtaattatactgtaactataatgtaacttgtatgtaactttcaaaaatctctccgtgatattttatttcggtaaaatagaggttgtgggaacaaatccttatacatatgtgtgtgctgtgattttatttttcttcctcaccaaaacaaatcttgtaatagatctaaagattcaaaattacatgaaacttatatacaagtcacactgtagttacatgcaagttacagtataattacatataagttacagtgtaattacactataattgtactataattacatctatcaaatttttagaagaaaatttatcgacaaatatatagaggtggtcttttttttataagctagccaaatgaagtagatatttctagagccaaatttgacaagattgttggagatgcgcgcaaacggccggcacacgtacggacggacttgcatagcagagcagcatgtagagagaaagcaggaggagaaagtgcgcgtgtggcgctgggatttatccctttctttttcagtcgccggactttttatcattccaatccagtcatctcctcttcttctttctatctcaatttttttttcttctctttctttctttctttctttcagctggctgtacaggggggatcacattgggatgggaccttttttttttttggagagaaagagctttcctctacccctccctgtactccactccgtaaagtatcagactatcagagagagtatcagtcaaaagtaatcatgaagtagaagtactcgcgtatatactcctacttgagtaggagaagaggcaagagcagtttactcctagattagattatagtgtcatggaaggaatccttcatcaagatactggagtacccaatcgatcgactgctttatttgccgtgcggaatggaagaatgtagttactccgatcgaggatgtgttatttacatgatgcatcatcaagcaatcaatcaaaccgcaatctcagaattttctgtccatacaatattcacattaggccggttttaatataatttatttattatgtaaaaaatatatatacatattgtatcgtgagtattaattacagtattttactagtggtatgaataataataatcatgcatgatgatgatttgtacaaggagaaaccggagtattagatggtacaacaagcagcaggggccccttgttggcgtttctgtaggcgtaggagcgcgcgaagcagaggaacattgccagctccgcggcactgacgccggcgagcagccagtagaagtagtcgaggtggcctcggttgagatcgtcggcgaaccacccgtcgccgccgtctctcctggtgatgccatccagcgccgatatgagcgcgctgctgatgaagccgccgatgcccatgacgctgtagtagagcgccagccccaggctgcgcatcccctccggcatctcgccgtggaagaactcctgcatccccaccaccgccagcacgtccgccacccccatcgccacgtactgcggcaccagccacgcccagctcatcgccggccgttgctcccgcaccgtctccagccgacgcccctccaccgccgccgccaccgccaccgccgccagcgacagcgccatgcccgtccccgtgcgctgcagcgtggtcagccccctcgggttgcccgtcatgcgccgcagcattggcaccaccgcgcggtcgtagatgggcacggacaccatgatggtgaccggccccaacgtctggagcgcggcgggcgggagctccagtccggcgtggccgatgtggcggtccagcgtgcggccctgcttgttgaacaacgtcatgatctgcgcgtacgccacgccgtacgccaggcacgtcgcccatatggggagcaggcgcagcatgcggcgcgcctcctccgacgactgcttgtagtgtcgtagcgagagcaaggggctggcggcggcggaggagaggcggtaggtgggggtggcgaggaggaagaggaggaaggcgcaggagacgacggcgaaggggatggcgaagccgacgccccagctgacgttctcctggatgtagctgacggtggcgatggagacggtgatgccggtggccatggagaagtaccaccagttgaagagtgagctgcgggaggcgctctccctggggtgctccgggtcgaactgctccgcgcccaacgccagcccgcatggcttgtcgaacccctgtgccaaggccaccaggtacagcgacacgtacaagatgcccacctgtgacttggacgccaccaccgacgacgccaccgtcagcatgccgtacccctgcactcatgtcgatccaactttcaatttgctttcaggtgtaacgacactagtaccacataacgtaatttcacagttgaatttgaactgtaagtatatctttcaccaatcaaatcatttttgccgtttattttaagcatgtatgtatattgaaatagtagtaggataaggacgagcatggtgatggtgccagtggcagtgtttaatttgattgctgtcagtgtcaaatcatcggattgaccaaacgagggagcagatcagatactctagctaggttaagggcataataatagtagaaaaaaccgaaccggtacttgaaccgtcgtggctgctgggtcaccgggtcagtggtccaaccgccggttcatccgggtcaattgcagaaccggactactagttactatcatatatatcatttcactcggtcatctaaacaagtagcagtgtagtccaatggtaacgcgtgagtgtttgtaaccaagccaaccaggtttgatcccccacagagcatattttttcacatattcttctaatataaataggtattaggccttaccagctaatgactttgggcctacgcatgccttatctctttggcccactaatcgaaccgccggttcaaaaatcagccggttcaccggttttcgacaaaaagccgtccggttctcaccgggttgactgcatgaacggtctttgaagcaaaccgaaccggcgaggtccctggttcaggttttttccggtcgaaccaccgggccggtccagtttttttttactatggttaagggtaataatggacgagtagcgtgcagtgctggttagtaattaattactttttcggtccgaaaatatatttgaccggatagataagttgtctctaatctacttctaatttgctatactaatcttctactttactcctcggtccataataaatcaacttaatatgtttaatatgtttagattcgtagtattaaaatatgtcatataataaatcaacttaatatagaatgtccccgtaaaaaaacttaatatagaatgtgatatgaatctggacattcatatgtctagattctatattcgttttttatgggatagattgagtaggtttctatataattttaaattttattgatgaatattgcataggttttgcctctgcacgtctctactagtatatgcgtatgtatgtatgtatgtatgtatgttctatattactatactggtggttgagtaatgagtaggagtatactcctagtagtggttggaggagtattagtagcacaagtatcacatggcagacaacaggctgttacgttccattgattagagtagtccattggagtattattcatcaagaatactaataactaaggtagcgaaatgtaaaagaaacgagtaataacaacaaggcaaatgataagtgaaaaagaagaaaaggggtaaaattggaaccaggaggtaaagggtgcaggcgaggaggatggatgggtagcggccgaggaaggagtcggcgaggaaggcgccgaggagaggaagcatgcaggccgcccccgaccaggcgttcaccgccgccgccgccgacgcgttggattgccccatcggccccgtcagatacgtgatcaggttcgccgacacgccgaagtaggcgaagctgccggccaactccaacactgtccatggaatgaattagctagcctgatcgatctatagactatagctatcctgcctcgccggactaaaatgatgaacagcatacatatacataccggcgacgaagagggcggagcgccagccgcctgaggtggcgcggtaaacggggcgcccgcggaagtcggacacgccggggagcgcctcctcctcctcctcattcggaagcaagggacgaccgtccatcgtattcggattcctcctcgatcgatcgctttgcttttctcttcctttcctttcctcgctgaatcggtgcgctctgctctgctcgtaggtaggatgatggtggcaactacaaatcggccaattgaattgacaaggctcagaggattaattaattaatgcggcttgcttctgctcctgctcctgctcctgctccagttgcacatggccaaatcaaaccatccaggatccttcccttttccaatcctcttctgatggtgatgattcggatggagatatttcagaccaacgaacgagtccacgatccaccacaaattaggcataccagacgacaagacctgctattaattgggcccgcgcccatcccatatcatatggtaactttaggccttcagcccaataataatcccatcggacgatggaaaggcccacagactagatacctcggactacacagtctgtcactaactctctataccttccttccgtttcacgaagaatcaattgcttcatccatcccattttaactatgattttccgtgtttaactttaatcgtccatcttatttaaaacttttttttaaaagaatggtctatttctgtcatctcctttaccgaaagcagaatatatggacaggctccgaaagattaattaatttcagtataaatgtcaatgtcgtcagctcccaacaaagattaattccagtataaatacccataccatgcataggtagctaactagcaagctggtatcatcttcttctacttcctacttcttcttattgtgggttgtggcatatatataatatcccagtgaacagtgaaggatggaggaggagtggtgttgtgtggcgccgggattcaggttccacccgacggaggaggaactggttggttactacctggcacggaaggtggtcgggcagcaggacgacgggatcatccaggaggtggatcttaacagcatcgagccatgggacctgctgcaagctcagcagcatgatcaggagtactactgctacttcttcagctacaaggaccgcaagtaccccagcgcgcgagggacggggacgcggaccaaccgcgccacggcggcgggcttctggaaggccacgggccgtgacaagccggtgctctcctcctctcgatcatcatcgtcgccggcggtgatcggcatgaggaagacgctcgtcttctaccgcggccgcgcgcccaacggctgcaagaccgactggatcatccacgagtaccgcctcgtcgcccaccatcagcagccggacggcagctgctgggtggtgtgccgcgcgtttcacaagcccaccaccaccaccctgcagcatcagcttcacctgcacaggccgcctcctctacttcatcatcccggctactacgacgaccaatatttatatcctcctcctgctgctgctgctggtggcggcggcttgctctgctcccctgccttggacatggagttggaggacgaggaggatgaatccaagatgatgatcttaagcaatgataatattccgctggtggtgagtccgactgccgtacacacacaaggcaccggcggcgacattattaacgacgctactaccgcgcctgctgctgctgctgctgctgatcatcgtcgacaccttgctccaccaccaccacttcacttgttagctaattcagtcgattaattatattaatgagaaatttactagtaatcggatcatcatgcatccatcatgcgtgaatgactaccacgtattaattcgaatccatactctgtatcatcgtatatagtagtatttatagacaccgtacgttaattaattactgctggccgtcgacctgctacctatactatatattagcacaaaatgttatcagtgcaaatatgtgcatgtagtcctcctccatatacatatcagtacaaatacaaacatgttatctcttacagtatttgggtctttcgttcgtcactacccggccggtctgaatattaatttatgcgatcgttcaccttcacatatacggatgtagttcaccactacacgtacgtatatacatgtatctttgatcgcgcgcgcctttcaaaaagaataagaagaagaagaagaagaagaagaaggggagtatatatgtatctaagtatgttcgatcgatttccaggttaattaatttcatctcgacaaatgcagcagggctctctaccagtacatcgaagtatatttatctgaaccatcggtttataagggcataacaatatttactaactcagtgattagagttaatgctggtattcatgattttatcaattattttttaaaaagaaagagaagaggtttttatccttcatcaaatgatatgcttaatttatattggtctattctacaaccgtgttcaggaaaaaacaacgcatatggcaaattgcaaactgatcgatccaatgcccaagatctaattaactcaatggttttgatatgaatattttaccggagaatggcaattgattaagcggaacgtacgtatgttgttggctgcagcagaggcggggctccgattggggaggagacgaaacacggcgtcgacgtcagctgcgcgcggctacgatttgggaaaggattagcatcacgtacgtgtcgtcgtttgatcgttctggatggagcagtacgtcggtccttcttaattaattaattcatcctgtcgatcaattacatacagcacagcagtacacatcctctactagctaattgtgttgaactgaacgagacagaaacagcaccgacgacgtacggcttgccgggcgggcggttggaaatcatgattattagtcacctctgatctgattccaatggagatagcgaccctgaaaactctgcacgaatagccatcctcaatggacgcatatgcatatatacatgcatgatacacatatatgcatatgctcatgcacgatggcagaagacatggttgatcatctggtacagcggcggctggggcggcggccggccgtatagcagcggatcggatcgattggatggatctctctctctctctctctctacgtacggtggaggccggcgcccttgccgggaggcaatccatcccatctcccccctatatggtcacgtacgtcgtcttttaattaagtgccatccatgcataagtccatatctgactttggcaaatgcaagtgcagatgcaatcatggctaagctctccatctttgtatttagtagtagtagttgttacctttgagttcattgtcatatatctttggaaaatatgtcttctttgcatacatatgtgtgtacaaaagtcaactagtgggctttttctctctcttttttcggagctagactttaaaaataggatttggtgcgatataccactcccaacttcttgttcctgaaatacaattgtttttttatttaaaagtacaactaggtttgatatacaactcttaggaatccttcggaacacatgattttcaaaacacaggaatacgaataatataatatcggaatgtcatgccttgtaaatcctacaagaaatagaaatacaacatttttcaaaaacaaccgtttggatgtcgcatagaaaaaaaacataggaattgaagacaccagaagagggaaaaaaacacattccataagattttcaaaggaattttgaaggttctatccttaggattcaaattttctaaaaatcctccacttttcctgtgttccaaatgagtccttaacttctatccatagatacaaatgcattttgtattcaactaaattgattaatgcacatcaactcactacgattttgcagtgtaaatattatttgttttcttcaatcaatatggaaatttgtaggctcggaggaaatattgtaaattccttttgaccttagtatttaatgtccttcttagctcaacattttcttaaaggtattttgaaatttcgattttttataattaattgtaggtgtttttttaacttgtcttcttagaaaatgaaacacctaaaactataaaagtaataatcaaactagataattaaaaatcagctacaactctcccaaggatatatggggcttaatttagagagagatggaataagtccactttgaatcacttaactagtggtctaatcactacattctagatatctccaacgaagaatatactacgatgaaggatgtgaagcagattcggcaactaggttagtgagtcaaagtggacttattccgagagagaaacaaggttagggagtcacagtggacttattccgagagagaaacagaggtagcgtatgggccggtgacatatggtccgaaagcggtgggtagtaggtgggcctggcctggaagggttacgcgtccagtccagacgtaaggaacccttgctgatcgatcgtctccaacccaacaacaacaagaaacaggaatttcgatttctttttcttcccttctggaggcgtcctgccctgcgttcaccccccgaaatccctctcgattcgccgccgccaccgcctcctccgctccgccgccgctagggtgttctccggcaaccctaaccctaaccctaacctatcttcgccgccgcccgccaatacaccacaccctatacccgccacacacacacacacacacacactctctctctctctctctctaatggcggcggcggcggcggcggctgcggctgcgccggcgccggcgacggaggaggacgaggaggcgctgctcacccgcgtgcagactatcatcttgcgggtcgtcgagctcgaggacaaccccaacccccgcctcctccacaccctcgccaccatctgcgaggcccacgaagccaggtacccacccccacccccaccccctgcgctcttcttttcttcctctcttacctatagatgttctaccttccttcctcttactattgttgctccacacgaacccatgtttgattcgctcatgccctcttgctgctccttttccttgtgcagctagggcaccctcctccactccctttatttttttttatttattaggcaccctgctgcattgcatatttttcctacgaaacccatactgttgttcttgccaacctaaatcagttcagttagtgagtcctcttctccgtaggtcaaattctcgtttgcttaccgctgttaccatcattcataaaacaacttcgtatcagccatgtatgatcgggccccttcttcattagtacctttcatttctacattttggaaaaaaagaacaatgtattccaaacttgccccacttttgggaagagtaggtggaacaagttgaatttcccatttttatctcacaagagtcactgtccaatagcggaggaaactaaactgccactaggaaggtcattcattcttcaatgggaaattgttcaccatatttcttgatgaatagcattgcttctaagattgcttccttaacagtgttatttccctgcagatatgcacaagaatgtgcgaatagtccatcgtacaataacacaaacgcaaggaactcccatacaattggcaagctggcaaacttgcttcgggtgagcactctagagttatatacactacatcatcataatcttagttttatcagcctattgcttaaattaatcattcttctctttaaccccattggcaggagaatgacgacttttatgagttagtgttctgtaagttcttatcagacaactcatactcggctgcagtacgctctgctgctgctaggctgctcctaagctgctattctgcctggacggttagcttttccctctctgtcaacacactaagctctctacatttcttctcatctccaactcggacaataccaacctttcatttttcattttggtctctgcagcctcagtatcctcatgcatttgaagatgctattgtagaaaatataaagaaatgggtgacagaagatggtggagcgtcaaatgagtgtgaatcgaagcatctaggaaagaataacaaaccaacagatgctgacatgctgcggacatatgccattgggttgcttgctatggcgctgtgtgggtaatgccatgagttttgtttcacatgtgattgcgtgccatcctttttgctttcaactatctctgccgttcacctaactgttgcttctttttttgtccttcccagtggtgggcagttggtagaagatgtcttaaccatgggggtatcagctaagctcatgcactttttgcgtgtgcgagtgcatggggatgttgcgtgtgcccagaaagattctaatattccactagataccaaacatcctcggagcagagatgagaacaggagcaaatcacgcctggttcaagacagttctcgattggatggaatgaggtctggagatggaatttcaattgacccaacttcagaaaactgtgacaatgttatgggaatgcggcatgcacatggagaacggtggatagatgatgctgcctctctgcaacctgagcgtgctgattcatcgttggatctttttgatgcgatggaggctggtgcaaccaatgatagaacttatagtgcaagcatttgtgatacaaagtcaagagttggggaaaggctttctgcattgagacctggaagagatgaagagatgaacgaaaatacgagagatgatctgttaaagcggaagttgagtcgaacaggatcacgacttagggggaagagcaaagcaggtgaaagcttgcctgaaagtgaaagaacacctttatcaccaacctcaggattgaaaataggaactcggactagcagagagaagaatatggtgaggattgaggatgcaaataaggccattgatgtgaacaacagctctccaggcattgagccatttaatgcaatttccaaagaagagtatgaggatcggttcaaggattgtattattggcttaaaggatatatccgacattgttttaaaggctgtgagagctgctgaagctgaagccagatctgcaaatgcacctgatgaggctgtaaaagcagcaggtgatgcggctgccgagcttgtgaaatctgctgcatcagaggtatggaaaagacggtttgcattcttatacactgacaatttttctttatcatactatagtaacaatttcttgtttgtcaacatttctgaaggtttggaaaactggaaataatggtgatgcggttgtattagctgctgagaaagcagcagctactgtagtggatgctgctatgtcaactagtgtctcacggtaatggattaaatgctctctctctctctctctctctcacacacacacacacacacacactcactcactcatttggtctcatcatattctgagagtttgatttggtattgctgaagctctaaccaagtcggtgaagagcatgttgtggaagagcctgtgcaaatcagcgaggatcatgaattggaagattttgttatcactgaccatgggcagctcctacaacttagagaaaaatatagcattcagtgtctacagattttgggagagtatgttgaagcattgggtcctgttctccatgaaaagggagttgatgtttgccttgcattattgcaacgtagcattaaagaccaggggggacatggccactttacacttctgcctgatgtccttcgattaatttgtgccctggccgcccaccgaaaatttgctgcgctctttgttgaccgtggtggtattcagaagattctctctgttcctaggattgctcagacatataccgctctttctgcctgcttatttacttttggctccctccaggtaaacactaacaacctaaattgcctgtctatgcagagttgatatgttatttcctctttgagttgctgaaatatgattcatgcttgcagtcaaccatggaacgtatttgtgcactctcatctgacacacttaataatgtggttgaactggcgcttcaacttcttgaatgtccacaagattcagcgaggaaaaatgcagccatattcttcgctgctgcctttgtgttcaaagctattctggattcatttgatgcaaaggatgggatgcaaaaagttctaggtattttacatggtgctgcttctgttaggtctggtggcaactctggggcattagggtcctctaatgtaaaccaggggaatgatcggtcacctgctgaagttctgactgcatcagaaaagcaggttgcataccattcatgtgttgcactaaggcagtactttagggctcatctgcttcagcttgttgattctattcgaccaagcaaaagtatccgtagtattgctcggaacacttctagcgcaagagctggctacaaaccatttgacattggcaatgaggctatggatgctgtttttcgtcagatccagcgggacagaaagttaggtcctgctcttgtaagagctcgttggcctgtgctggataaatttttggcatctaatggccatataacaatgctagaactctgccaggtgaagcttgtacattttcttttggtcagcaaagtttgttgtttacctattttgacccataacaatttgtttcaggctccacctactgatcgctatctgcatgacttaacacaatatgcatttggagttcttcacattacaacgcttgtgccatactgccgcaaactgatagtacatgctacattaagtaacaatcgtgttggcatgtctgtcctattagatgcagccaacagttttggctatgttgatcctgaggtaagatttttgttatcaaatagattaataagctcaataaattataaattataaatctgtaaaatgtggctgctgaaatcatctctaattaccatttgtggatcaggtgatctgtccagcactgaacgttcttgtcaatcttgtgtgtccccctccttctatcagtaacaagtcatcctcaactggtaaccagcaacctgcagctacccaagcagttggtggggcattttcagagaacagagacaggaatgctgaaaaatgtactacagatagaaatctaactgcaaatcagggtgaatctcgggaacgttgtggtgatggtaacacatctcaacagggcaatactgtgcaaattagcacacctgttgtgccatctggggtggttggtgatcggagaatatctttaggagtaggagctggtggtcctggtcttgctgctcaattggaacaagggtatcgtcaagctcgagaagtggtcagagctaataatggtataaagattcttttacagcttctcagttctcgaatggttacacctcctgtggctattgatcctattcgggcacttgcgtgtcgtgtcctgcttgggttggctagagatgatgcaattgcacatatactcactaaactccaggtactgttggtacaatgtccatctacctttttttcccctacacctctagctatgatttgagcattttttttagcaattggtcaactacattttcactgcataatcactagtaagcattaatactgatggtgtactccccccactttgacatacttcttgggtcctttctttacatactgttcaaaacaaattagttaaatcttgaataaaattagtcactgctccttcatcagcaattttcttcttattgtttcaggtaggaaagaaactatcagaactgatccgtgataccagtggacagtcaattggaggagataatagtagatggcaaaatgaactgacccaagtggcaattgaactaattgcggtaagggacttgtattatttattgtgatgcaaatataaattgctcaagagcttacattcgtagagttcctttcctgatttaactgttcatgatgtggaacaaggtggttgcaccgtgtagttatttggtattatttcctcaattaccatgaatgcagtgtatgtaagcagcttatacaacttaaattagtggttgtgtgttagaattaacttgtgtttccgcaatattctcctttttacacatggacaatatatatgctcttttaccctaattatgtattgcatgtgtcttgtgtcctgtaattatgactgctgttttattttggtaggtcctgacaaattctggaaaagaaacaaccttagcagcgactgatgctgctgctccagcactgaggcgcattgaacgagctggaatagctgctgcgactcctgtctcgtaccattccaggtttgactgctttatgattttgcttccattacttcatcagcttttgtgtctgggcatttacatttgtttttatttttggtggtgtctagggaactgatgcaactgatacatgaacatctccttggatctggttttactgctactgctgctatgctgcaaaaggaggctgaccttgcacctttgccatcgacagctgcagtgactcctgtccaccaggttgctgccctggagacatcatctgctcagcaacagtggccttctggtcgtgttcagggatttgtgccagatacaacaaaggtgactacagaccaaactggccagagatctgattctgtcttgccttcatcaaagaagaaatcactgtccttctcatccagtttctcgaagcgaactcaaccttcgcatctattttctggtaatagagcaagcaatagcctgaaaagtcctgttcctattgggaatgttgacaatatgatttgcgctgcttctactgtcaatactggagatgcggagacatctcataaaacaccattatcgttgccacagaagaggaagctagtggacatgaaggatcttagttcagcgtcagcagcaaagcgctctgcaatggttgatcaagcatgccagtctcctgtattccaaactcctgctcctactcgcagaggactgtcagtggcagtggattctcctactgcttcatttcattctggacggccaaatttcaacaacatttacacagagaacctggatgattttcaaggcacacctggagcaacaattaccacaccacatcacggtgcaagtgatcaacagccagtaaatttggagtgcatgacgctcgattcactggttgtacaatacttgaaacaccaacaccgccaatgtcctgctccaataacaactttgccaccactctctctgttgcatcctcatgtttgccctgagcccagtcgcagccttagcgcgccagcaaacatagctgctcgcatgggaagccgtgagataaggaggcaatttagtgggatccaaatacctcgcagggatcgccaatttatatacagcaggttcaagctatgccgtgtttgccgtgatgaatcctcacttttgacttgcatgacatttcttggtgatgcatcacgagttgcagctggaaaccacactggggaattaagagtatttgactgcaacactgcaaatatcctagagacccagacatgccaccaacagcttgttacaatagtagagtcggcatcttctggtggaaatgagctgattctcacgtccagccttaacgaggttaaagtctgggatgccttctcagtatctggggggcctttacacacatttgagggttgcaaagctgctcggtttagccattctggaacttcatttgccgccctttccactgatacgactcgtcgggaggttctattgtatgatgtccagacatataatcttgatctgcggcttcctgataactctggctattcaggaggccggggttatgtacaacctattatacatttcagtccatcggatacaatgttgttgtggaatggggtcctgtgggatagacgaagtccaaaccctgtccatcagtttgaccagttcactgactacggcggtggtggcttccatccagctggcaatgaggttgattttcttttcctgaacctttttgttattttgttagtttataattctgttcatttcagagcatgggcatcaagagatttactccctctattgcaaagtcataattttctcaacttatgaaccttccgctctaattccgtccttaaatattgttaaatgccaagcccttataattcataatggagagcaacttttgtacagaaagaatccatatttgtgaatttgtgttgtcacttgcccatgcaccatgtgctatgtgatcctgtacttaacacagctggctcagggccaagctatgatgttaaaccattgggtaataatcgggtaatggtttgcttgctcttgttcaatttgtttaaacaatcatgaaccagctgccgattctcacatttcaacaacttatgcagccaagggccattgctacccagccagtcccatttttcgtccagccacctgatttttggggtgtcgccttccacataaatgacctccataattaatctgcaagactgtttgggtagaataggagcccatggaagtaacataaatgaatttattttcctgattttgccactaaactgtaaattataattatctatatttttttagagtaatttgtttctggtgtgcttgtcttctcatctctgccgtccatactttgcaggtataataaattcagaagtgtgggatctaaggaaatttaagcttctgaggagtgttccttccctggaccagacagtaataaaatttaatggcagaggggatgttatctatgccattctcaggcgtaatcttgacgatgtaacatcatccattcatactcgtagggtcagacatcccctgttccctgcattccgcacgattgatgccgtgacttactcagacattgcaacagtccaaattgatcgtggtgtccttgatcttgcaactgaacccaatgattctcttcttggggttgttgctatggatgatcctgatgagatgttctcttctgctcgcctatttgaagttggcaggaagcgtccaactgatgatgattcagatccggaggacgcaggtgacacagatgacgaa

SEQ ID NO: 9950 - DNA, 19790 bp, Oryza sativa
cagatcaattgttgaacttactacaagacaagagaagtccctcccatgatgtccactgcaccattaacttgtatgttgcttatacaaacacaccacatcaaactacatagattttgggcctcttcatgctattttcaactttaccgagttttaataaagttactaaaaaaatggctacatttagtttgctgtcaaattttgataactatataagaaatcctgccaaaattttatcaagttaccaaaattttgacaactatgccaaaattttagcattggtaagttttttttcatcaaagtgaacaggcccttttactccgtaatttacacaactttattgcaaaatatcagagataatagtcatttctagaagaaaagttatgtttattttctgatatttatcatttaatgccaaagggatatgctagccacatgcaagtttgtattctttcatccaaaagaggagaagatgatggccatgttcatccctactctcaagtgattatgcttttggaggctttcggctgcaggagcccacacatggcaacagatacacgtagatcaaacaagacagtgccacatataccagacaggtgggtcctggataaggcagaaatcaaaacgtcgacaccatccacgtgtaatgtatggcgatctgaattattttaggaaagcaaaaaatgtttatctgctttaatttgctttcactctaaccagtgatttttttgatggccgccttggcgccccattggaccataaaaaaagagaaactattgtgaaagtaaagagatataaaggagagactaactaactccactatggtgagagtgccgacaaattgtaaaaacagacactaagagataaagcagagtaaaattgttctaaagcatatagcatgagaaatgcatctttcattagaaaagcaaaatatttctttaacattttaggtgaaaatgtctacttataggcacaatttaattgataactatattttgtttactagttaatattagttgctaatatttctttcattttaaaatataagggatttcagataaatgtgatatatcatattactatgatgtgtcatattcacctaaaatctcttatattttttgacggagagagtctgactctcctagtcccaaaaaactcaatctaagagggtcacatacaacaaatctagattgcctagattcattatattaggaggggatgcttctagattgagtttttttttttggcggatggagtatacgttgtaacttgacttttttatgcctttaagaaaacttgcctttttcagtggaatgtgctgcaattaatactatgtttatcatgtttgtcgtggcatgtgtgcccttgtatcatttgcacttaatcgaatggtatttataaaaatataatgttgattattccataatttattcataaaaatataactatttacagagaggtacaaattttttaggtaacggacaatataaaccataaaaaaatccttgcctttttctcacttagtaggtgccatctaatgcccttgattgaattaatcatagagtcaccacacaacaaaatgagtagttagcgaaatactacaagatgcacaataaaaaaacttatgaacaatatgcaaaaataataattctctcacctagtactgtaatttattgccccccgattgaattaaagatagaactcaaatgttgggatagctagaagaaactagccatttaatggtattaagataggagaagccacattttttccaacccttcatttcgtttaatccagatggaatatgagcaggttaagaggtcgaacctggatttgctggacgaaagcaatcaacccgtaccaattaatgatagagctaccactgaacaaaacgatgagcagtccagtgaaaatagcaacaatggactggcaagttgtacaattatttatgacccattaatttatttctcccccacaaaagaaaagataggaaaaaaaataaaaccagggaccaaactctaccaacttgggctgctgctaggcggcagcatatttgtcttctggcagttgtgctgagaagccaggcagaggggagtttagcctgaaagtgagctctctagggagatagagagagaagagggccaaagaagaagaagaaatcaaagctaggagaggtccaagattcccactaggaccctttcttggttctcttctttttctttggctgattggaaggtctagagtcaatcacttggtttcttttgtttcttttctttggctccattggttcttcttgccttccaatcgttctaaggggtggatagaatttgtaagtgtcatgttcttcttcttcttgtcctttttagtttgttggtttggagttcacttctccattttcgcttcttcgagatgttataatcaactgtgttctaagttctaacatgtggtcaaaatgctgattttttttcctcagttggagtatcacctatcaggcactctgttcatggcccaatgattttgattggtgggcagattttcacagaccccccattccagtttttttttcccaaggggatgcgcgaatcttgctgctaatgttcttgtgaatcaaagccaggagatttctggaaagtgaggaattcttttcttagattgcaatatcaatcacagcgctttctccacaagttgcaatctctgagcgcttttgatctctccacaccaaccaaaagcaacagaaatttaccttggattccgcggttttgaagaatctgttctgatttggagatggagaggcagacgagcttccgattgggcgcgctggagaagctcaagagcttcagggggatggagaagcagaagagcttcaagatgatgtccacggacaacttccggaggcacagggacagccccgggaagcgcggcgacacgccgctccacctcgccgcgaggtccgggaacgccgccggcgcgcagcggatcatcgccgagttcgacccggaggtggcggcggagcgcgccgcgcaggccaaccacgacggcgagacgccgctgtacgtcgccgccgagagggggcacaccgacgtggtgcgcgagatcctcaaggtctccgacgtgcagacggccggcgtcaaggcgaacaacagcttcgacgcgttccatattgcggcgaagcaaggccatctaggtcagttctttcttcttcttcttcttttttgtttgttctttttttttgttcattttctgaacctgatttctgttattagtgatgactgacttcgatctcagcctgccagtgccaagtcaatgagctgatgattagaggtttatggcattaggattttgcattgacttaatctaatttgcatgtgtcattgtgtagggctttgaaaaatcctatgctgaacttgtctgatttgacttatggaaatatacaagtgcttttgcttttgttcatttcttttcttcacaacgtgcattgctaacatgaatcgttgtggttaccttcttctctcttttttttacataaatgtctgagactagtgcatatctcacatctggtttgatttagacctcatgtccagcaaggaagcaaataccttctttttaggtgataggcaagctgagtttttcattatggatttatggtcttgtttagtgagggttgacaaattctgtacccaaagaagctttcacgatgtgtctacattgaatggtttatttaagaatatatacaatgaaaaaaatggtagtattcctttcgcgcgatggtggattttgtgcaaccattattagttttatgaccttatgatctcattctgttttctacttgtgaaagactgaaattcatgtcattttagtcatggagttatatctagtagccagcaaaccacagctatagtcatgatcacaatgatttgtacaagatatggtttagttaagtattttgctaacgaagaaaaaagaaatcctggctcatacgtttcttttgtttcttggtttttcagaagttctgaaggagctgttgcaggcttttcctgctcttgcaatgactacaaattctgtaaatgctacagctttggatactgctgcaattctgggtcacactgaaattgttaacctcctactggaatctgatgcaaaccttgcgagaattgcaagaaataatgggaagacagttctgcattcagctgcaagactgggccatgtggaaattgtaagatcattattaagtagggatccaggaattggtttaagaactgacaagaaggggcaaacagcactacatatggcttcaaaaggacaaaatgctgaaattgttatcgagctgttgaagcctgatatctcagtaattcatctggaagacaacaagggaaacagaccattgcatgttgcaacacggaaggccaatatcgttgtaggtgatcttatattgggaatttcatttgttttattttacctccttgctactatatgtttttgtcgatctttttagatgactatttgtttgccaaatcacttgctatcctgtttactgagtttaattatgtcagtattttgagaacagagattatcataactttactgtaggatacctctatttgattggaatggtgataatgctttctttatgaacaaattcaaaacaaatgcaggtgcctgtacataagttttaaaaagaataaagaagcatatcatatttcaaacatatagaaacaagaaggtttgctttgactgatatatgtgtaattccttacagatagtgcagactctactatcagttgagggaattgaagtaaatgcagttaacagatcagggcacaccgctcttgccattgctgagcaactcaacaatgaagaacttgttaacatcttgagagaggctggtggagtaactgcaaaagagcaagtacatccacccaatccggcaaagcaacttaagcaaacagttagtgatatcagacatgatgtccagtcccagatcaagcaaactaaacagaccaagatgcaagtccagaaaatcaagaagagactcgaaaaactccacattggtggtctaaacaatgccatcaactccaatactgtggttgcagtgcttattgccaccgtcgcctttgctgccattttcaccgttcctggcaattttgtggaagatatcactcaggcacctccaggcatgtccttggggcaggcatatgtagcaagcaacccggccttcctagtatttttggtctttgatgccttggctctcttcatctcacttgctgtcgtcgtcgtccagacctcgctaattgttgttgagcagaaagccaagagaaggatggtctttgtgatgaacaagctgatgtggctggcatgcctctttatctcggtggccttcatagcactaacctatgttgttgtcgggcgcgacgactggtggctagcttggtgcacaatggcaatcggtgcagtgatcatgcttacaactcttggttccatgtgctactgtatcattgctcataggatggatgagaggaagatcaggaaggcgtctacaagccaatctcgctcatggtctcaaacagttgactcagatccagatctactcaacagtgaatataagaaaatgtatgcactataggataatagttacatgatgatggaatccatgtacacgagagtgctgtttttttttacccgaggcaacaagaagaatggaattgacatggaagtctttgttcagagcaaggtgccagctatattaactgaaggcaccttactgcaatgcaaagcaagttaactgaactgccaaaacaaaggaagttaactgaagaaacctcacactggctgctgaatttgttcctggtgtttacctggagctgtggtctcgtgtcagcgaatgaacacctgctaaaattgttttgttgttgctaaaaaaaggtcaatagtgagggcaacaatacgatttgtagactgtactaggaaaagaaaaatactatgctctgtcacataccttggacatgtctgctgcatgttgttgctcgatgagctagaaaatacttcgtatttcctttcttttaccatcctgatttcgacgttgtcataaacagttgagggttcactggaatctacaaccatgcctgaaagaacaaaatttgccatttgcaaatgtgcagagacaatcaggcattctggctcgttcaaactgcaaaaacaacgaggcatggccatcagcaacccatcatctatgaattaatgcatagctgataaaaaggcaaaactaatcgtcatatagccatgtgctgtatgcagacatgccaattgggcaatactcaagaacgagctaagcaccaatatcttcagaaacgttgcagcagcaatattaggcaccgaaatcatcattaaaaacatcataacgactcaggattgaagaaacgatcgcctctttctccaaattgccgttttcgcactggaggaattctcctaagagaaaacagccaagaacaaacagagagcaagcaaaatcgagaaaacaagccggtgtaagggtttaaggttcgtcggagatcggccgtacggtcaccgatcttgacgacggtcacaaccgagacgaagggtacggactacggaggggttcggagttttcttctccgaactccctcagggcctcacgaaccgttggattaagacgtgcggctaggatccgagacaaatgttgcgacctggacctgtggtacatacgggccacggcccatgaaccgacttaagcccaggcaggattgccttgccggcggcctcgtcaatacaacgacctgatgggggtacggagaagaaaactcctctgctttgggcaccatcgccgccgtggatgcctgcgtactttcttctgaaaaacgaggcctcaaatttcatctatggtgattatgtttctttccattttatgatagaatgaaggtcgcattcggaattattttcagtggccgatcagtcttcacccttcagtgcatgggatgcctgcattttatgatgatgttgtaccacatatatataatctcgattctccttaacagagagatcatttcattccctatgaatatgatcccaacaccagtttgcttcttcgttgagagaaactgaaagcaggcaaataaaaacttcagttcagggctttcctcttaggggtgtttagattcaggagtgcaaagttttggtctgtcacatcggatattatatagagtgtcgtatggggtgttcgggcactaacaaaaaaactaattacaatatccgtcagtaaaccgtgagacgaatttattgtctaattagtctgtcattaacacatatttattgtagcaccacattgttaaatcatggagcaattagacttaaaagattcatctcgcgaagtagtcgcaatatgtgaaactagttatttttttagcatgtatttaatactttatacatgtgttcaaacgttcgatgtgacatggtgtaaaattttagaatgagatctaaacaggcccttagtgcaagggatttaaatgcaggttgtaaaagattccttcctctcaacatatatttgtccagagtcgttgtactagaatatatcacatccagtcttagattcgatttttaagtacggagggagtactttagaatttcagcagctgatcatggccatgtcgccgtacgtcgtagaggacaacggcggtgaggtcggtcgagtgccggcaataaagaaggatcgagaaatgttggatcttggacatatgttttgattcaacagtttgtttttgtttgtgggaggggtcggagaagaaaactccgaacccccaaggccctaggttctcctcgatcgctctccgctgcgcaatcaccttcaaggatcggcgacttggataattagttctctacgctgctccactatcctttttgtaattgtacatcgtgccttctgctgagaagagaatgtctgaattttctgaattcatttttttttggtagtgttctcttgagaatgttgttgttccctctgataaaaacaagtgaagtttatgttctgaactttttctgtggcggtcagtctttgttgcaagggactgaaaatactggcaacaaaagaagagtgaaaaattctgagagaaatcattcacaattagccactgaaatgagcaagggcattgcttgctgcaatataccaaaacttcacaaggtttcttattgtctctttctgcaggattgaaatatttagaaaaaaaaaacatcataccaggtcacagcaatgtgtgaccaagtgactggttgcgtctctgaagtctgaagtatacgagtcattcagagaaactacatccatacatcggtacattgcggggaacagacacaaccgggggtgttaggaatccttgttctccctgacgtgttttaggatgtgatggcccccaaccgattactattagcttgctagaaaaaatgatcgtgcgttgcaacgagtgaaggctgttgttatatgatttagttaaggtgaaatttactgtgagaattcacttggatatatatacttttagaaaatcatgagctgtagttaggagtttgttcatctcaagttagcatgcgagtttttgtaaaaagatttcttatacggatatgcatttctaaaacaaacttaaaaaccgactcaaatacgtatattgtatatttctaaaagcgaacgaacttagaaccaactcatacacagatgacatatcaaaataccggcaaaaacatcttcaatttgttaacagtagagagtagagaagagatagagatactcgtggatgaaaatttagatacttgtggcacgtttttcaaactgctaaacggtgtgtttcgtgcgaaaactttctatatgaaaattgttgtaaaatatcagattaatctattttttaagtttgtaatcattaaaactcaattagttacacgttattattacctcacttggcgtgaaacatttaatttttatcttcatatataggagattcaaacaccaccgtgagggggggggggagtactggtacagcagtaacaggctgggatatgttgggcttttgggccgaagcccaactcgctctccgggtagagtacacgtcaccacccgactcgtctcctcttgtctctcttcccttttgccgtcttctcctcttctctccagagtccccccaagcaaacccttcttctctctctctctctctcctctcacgcttcgctcgcggccgctcctctctctctccatccatccatggcgcaggacgacgccccggactccaccacctcctcctcatccgcctcatccgcctccgcccccgccccctccgccgcccgcctcaacgccgccgccccggagttcacccctcgatccgccgcccaccaccaccaccaccacgccaaccctcgccgccagcaccgcgggggcgggggtggggcctaccaccaccaccagcagcactaccagccgcaccaccaccaccagcaccaccagcactggcaacactacggggaggatgagggggacgccgcggcggccggggcggtgggagaaggagggatcccggaggatgtggctcgtcgggtcgtcaagcaggtagcgctcccccccacccacctgatggatgatgtgtttactgccttttgccatgctgtttggtgctgattatgaggattggtttggtgtggaatctcaagtttcaaccgataaagcttgatcttttgatcaacgcaagggttagattgggtcgtctatggagtagaaataggcatgtaggaagtgtagcttaacccagtgattgcaagtgaaacgatggaattagtgtgactttacacttctgttgatttgtctgcaagtttgatctttagttacagatgtatgcactagagggatgatgtctatagatatttgttccttaaaactgtttattgcctattattttgcttattcttgtatttctgaaactatgaggataaaaaatattacttcacagatcactggcaccttgattgtcctgtgtgcactagtaaggggctaaggtggaatctaggacgagtaaaacagggaatgtctgttagagattgctatttttagaaaatgcactgtaattctgcacttcttttcttggagaacactatagggtttatagtctatacaaatcagatagggtggggatggcgggaagggtgcatgttgtctttccacatggcgcggtctgctgcatttacgtgtgtgtggggtttgggtcgagtgacatgtctcatgcctgccaacgagcaaatatggaataacaagatatgcatgtttgtgatgtttggcaaacatgatgggcctcagtatgatttattagcgacacggtgtaaaaacgacaaaaccatatcatgtcgtcttgctgaagctcgtaattgctgcatgcatagtaccatgaggagttatactgttttcttttttgaggataataacttaggaaatagaaatagtgcagctctccatctattttatgattgtttctctttgcatctttctgaaggggagaaatggagagagaaatcaattctcttcttttgtattgtttaccttctgcatctttttactttcttattagtttaccttttctctgatcattgaaagtatgatattaacttcgtcttatattaattcctttttttgttgtttattagtgcaatcaagctgttatgggatgcttgatttgcacctatataagtggtacacccttggtttgattgtattttaaaaccttgacaggtggaattttacttcagtgatgtcaatctggctacaacagaacatttgatgaaattcatgattagagatccagagggatttggtgagtcaactgttcaatttcaaatagaccgcctgattgtgctttccaccttcctattttccttttgaaatgagaaccaccataatgttttagggttattctcacttataccttaacaaacctacgacaaaaatcgctgtccaccttcatgtctatatttttctttaaatgtttggtgccagcgataatttcaaatttgtcatgcaatatatgatgataaaattcctgtgaactactgcactacgtattgctaattaggctatttttaattgtattctactgatatagatatctttaacctgggaatgcattcttccgtatgaattgatgcacattgatattactgcagttatgcatgactgttgcaccagcattgatgtttgacaatgttctgctgtaaaaagactactggcacatttagaaatgggcgaatattatgttgaagcattctaatatatttgcaccttttgttgtaccactattggaatctgcatatacttgcttgatataactactgttcaccaaacaacagttgatacttttgagttgcatcatatcattaagtggtgtacatgaatttagcacatgctttcctacacatgatatttgttggctcatattttctgatggcattgacatgtcttctgttttccagtgccaatgtctgtagttgcatcttttaggaagatccgggagttagttagtgagagatccgcattggctgcagtattgcggacgtcagcagagctggtaagcatcttatttaggccctgtttgttttaacttaagattattgtaatctatattattaaatcagattactataagctggattataataagctgacatagaataagctgtgagctatttgtttctctagattattggaggcatctaagggtagtgggtctttagccaccaataatttggaaaatgctcctccagaggagattattagattatactaatctggcttataaatcataattatctacttgtttgtttcagtttactcctaataatccagtttataataatcctaagctgaatcaaatagggccttaatgactttttaatttttttttctttccgatatgcctgttcatcctattgttgacacttgacacagcccacccttcattttaattaaagatgcattatacgttatgaacctttgctcagtaaggaattatatttagtaaacaaattattttttttaataagtgcatgaatataagcgaataaacacacaccttttcatcaatctgtaccatcctaatttaagattcagtttaccaatctcattttcctctcattctgaatggcttctattattctctaccaagatcctaagactatagatcttcctatatacaggttgtttcagatgatggaaaaagggttagacgtcgagtgctctttactgaggcggatgctgaagaagttcaggtcagaatctaattaatcaaataaaatctattcattatatatgtatgggaactgaattttctgttatatgtgtactcagtcacgcattgttgttgctgaaaatttgcgtgaagagcaccgctatccaaatcttatgaagattttctcagcttttgggaggtatgcatcaatgcatgtctttgagcacaaatatatgccaaatgtggtgttgaacacatgatgttctatattgcagtgtgaaatcaattcgtacttgctatccacaaggtgggattgatggtgctggaacttctactggcaaagcatcaaagattgagatgttgtttgctaataaggtaatgtatcatggtatatctaacttctaaaggaacacggaaagtttattagttattgcatatacttgttctagctctgttaataaatatttgacaccatacaagaatgtgtattccaacttcttaatacttgatcactaatacatttactgtttggattgatatgtgcagatgttagcattagatttctcatgggatagtttcacattatggtagcttcatatattcttatttagtgttttaaaaaaaagttctacaaggctgcttacaaggttgcatacatacaaggtacaggtgccctaaccttgtaccgtgtaagctgcatatgtggccgattacaccacataagccctacaaggtggggtgaccacacgaaaccatgtactgttttttaaaacattgcttactatttcatagatagaagtgatgatcaaaagttgcatgttggtgaccttgtccatgtccgaaatgtcatacttgaaaagagggataagcaatgaaatactattttggaaggcatttcaagtttcaacaccagtaccttgatttcgtccctcattttttttggctttacttgcaggtgcatgcttttgtggagtatgaaactgttgaagatgctgaaaaggcagtatgtcttcttgatttctctaaccatttgttttttttttctaggaattattttgaggtgctttggtagttgccatcaacacaatttaaaggaactctgtttttctgtatacaggtttctgaattcagtagtgggagaagctggagagatgggattagagtccgctcactgcttggttgcctggtactttaacggaccctacacaatgcaacttgttctcccttaaccatggactgatttttaaaatgcatttgcgattcacaattgtcctttatgcactacttgtgtttcctgactagatcttagtcattaacatttatatttcattaatcggcaatactgggtggtttgttcattcttgatttagttacttctatatttaactgatgggtaaacattaggtgtaagcttgtttttggtcatttcatcatttatcaacagatatagctcccagaaaaacatgtttgactagcttagtaagatttaacattcctacattactatgcatgttattttatttatttgtaaaatagaagattcttaaatcgttaaacatttgttttcattaattgtcattagaaacaagccatgggtcaaggaagaagaggtggagatgaggtggatgctgcagacgaagatgaccctgaaacaactgaccatccacaagactacgaaacagaggatgcttcccagatttcagaagcacatcttgatcatcaggtactttaaatgatcctctcctgctcaccattattgtgcgccagaatcaagtgtggatattataacgacatgtataaatttcataggctgatgatggctaccatgacaaaggcgggatgaggcacgggagagggagaggacgtggtggaagagggcgtggccgtggtcagtactatggccatagccgggatgccaatcatccaattggcactcctccatcgaatcacagtgctcttgctgatcatccttcaaagccaccccctggtcctcgtatgccagatggcacaagaggatttaccatggggcgaggaaagccactcaatcctaccaatgctgtttaatggcagtggccatgccggtggcagcctgttgccctgttccctcttgcaaatctgatacttgcctcaggttccaaaccgatgaacgccgattaccgttgatactatagttagatacaacatgtgttggttcgtttggtgcaagattctgcagagaaaagttttacctggtacatgcatgtatactggtacagcagtggtgctggcaatgtgaacatgtcttttgatatctggatgctagttaatttagcaaaatatgtagatatagatgaaaaatgaggtgtctgatcaatgatcatttgcagcgggataattctgctccacaaatccaagatacccaacagctgtttaaaagccttcaacttggaaggcatgcaatttcagagttgaaaccacatctacaccagatgtgcaaatagtcttgtgcgttacatgaaaaaaaaaggagtacaaacacgagaaaacgccaggaaaatgtctcataaaattattggtttcacaaaattataccaaatgacaagctcacttcgcttgatttccatgctttggcctctgctctttcttcccgtctgttcttctcattcccttgatcaatgtggcatcgcctgcacgaccacggttattgctgacagtcacagccttcaccttatcaggtaagcctttctgcttgccatccatgacagtaactggtaggcatgactgccttcttatcctgccaatttctgctgtgtcatgcacaccaaatgctagatcactacgccatgctttcgctgtcaatggcgttgtgatcagattcttcggtgcacagtaggggagctcagggttcgtcactctcttgagtccatttgtactgctaccttggcttgcatagcatctttcagagtgtttcttggttgcattgcaagttgcggtaggagctgtaggtgtaattgcagcaactaccttctgcttcctgctcgttatggctgcagaagttgatctcctttcaatttggttcttctcattggagatggattgtgtggacactctgaatatgctcttctctgatgaagagttaggtgcaggaaacattgatcttgccgatgttttcgttgcctctgtctttcctgatagctgtaattgataaaatcaagatcaagagaagctctctgatgaagagacaatctagaaatgcagattgcaattgagcagaaaatccacttaggagctctaaactgtagcattcagtaaaaagaaaatcattcagtataatttatggagcaaattagtatataccctggaagctgaaggtttaacttgctgatgaattggtagctccttctggaaaaccatttgagatgagttggtttccatctctatggaaggaaacagtggtgtagctggaggcgtcttcagcctgaaacaagctgttcttctaaaaaaacagttccaacaacacaagtatatgatctagtcatctggatgaattgaattccatcctaccagtcgtagtcatgcttctcgtccactgctatgaggaaatctgtcttccctgacggagctttgctcgtgcggccacctatcacagatacaaattcaaaagaacacaaacactgcagtgaggtcatccatctttgaagcaatttgagtgggattttcaactgcaaattttcatattgctaatcaaatgttcatattgctaatcaagagattgtgaatatgtccataacatttctgacgacacatataggaaaaatagaaacgcaagagccgaagatgtcaccttggatagcatcaaactcaacggattgcatgggttccaggaggttgatgtccctatctttttcacgcttgtacatctccctgaagaaaactacgctctcgtctttgtctttatgtattgcagatggggcgttaggcttgcgcatcccagaaaacctcctgatgctgttcatcttcaggaaccagagagattgatttactgcacggaaaaaaaaaagaatgcaaagatcagagcatggaagaagtcacaaacattacatgaatattactactactactactactctaaaggatccaaattttccggcaactccaaagcaaccgctttaatcaattgcggattgggtatgctctttttttttcattcaaaaaagacccttttacttagtttttcagagcgcgggccttaacttaagaactcggaacgtaaaaccgtttggtgagggacctaaaagtattatctactaagaaaaggtcctttctgcaaaaatccacctgcttcatcctagccgtacgctcaagccaatcggacggcacgccagccagcggcttgcgcggacgcggaaggagacgcgctcgcgggcgacgtggatagctccgcatgcgaacacgccacccccgaatagctctcaactcaccaaccaattcagggcaggttttaatttaaccgatttgggtcacatactggaaatcatggaggcctaattcatcggtgggaaccgcacggttggcccttggccgggaaacaacattgtcgcatactcgcatgggcgttttcttccactgccatgctgtgtgttgcaacattaattcaccaaacaagtaataatctattgatttatctctgcacagaacatttagtagttcttacttcttggagatcaaatgggtggattaacggtgaagactgttttcagctcaaacatattagaaggtgcttcagcgctttgggggtatattgcagacagtatgcatagaagtagtaaacatatgatttctactattattttacgaaggccacctttggatgagcacggagaatatgcttgtgagttggttgccttgcctttaaggtgttttgctatttttcctattagcacagagtctgaaactatcttaaaatttttcaactacgcatgcatggcctattgatatgcattagttgggcatgggagatttggatgctaactttggattattttgcttcaaaaattgtgttcttggctccctatcctgatcggttgtgctatatgtgtgctgtgcaatcaaggtaaaagaaaggtctagaggagagctttgctttagtgattctaaattcgatattttagctcttatacatgtaatttttattgtgtttttgctcaacgtgcaaaaacatactttgctgtcatatatttgtttgattgatcatccatactccgattgaatctgaatgtagttcagttattggcaattgtcataattaaagtattaaactggctatgaattacatgtctgtgcagagcatcagctgagtaggctgtaaaattgctaaatgctactaagaatcaacataggtatacccatctctgaaactaagtcccctcagcattttgtctgtactaacttcccagtttattttcatgtttgtgtgtctgaaaataatatgtttttggtagtttggctgatgtatcaagcagagcaggtactcggtggtccctttgtactgctgttagctgccagtttttttatccaactgaatgtcaggtagaaggaacaggaaggaaattgggcagtaacaccattcaaaactgtatagtggagctgtggaagtatgataggtaaaagctttccgtgattgaacttcaactagatttttttgccttttgtatttagtattgtttcaatggtagttttcctatggaaatagctgtttcaggtatatttagctatgccttttttttcacggtgttgatttggtgagtagatcatctgctatgtttgctacgaatattatagttctgctcttcaatgaaatgtaaacaatgtgaattgaggttaatttacgatagttggcatgtgactaggtgagattttctttgtgtatcctgagcaaatctaccgaacatcaataaattatgcattgtacacatggtcttcagattgacggtcatattttttttcactctattatgattacttttgtgctgtttcaggtggaaccaaaatcaggtatgcatccagtcattagtttcactctgtttatttgtaatttttgttttagatttgtgtcgtaaattgcttagattttttttttggggggtgtctcaaacttcacatttgagaaaaatatattgtttagtgcattggtcggcatgcatgtatgataatcaatgcacatcaggctagcaaatctgacacgtcatcctttgagtttggtattgcagttcctgtcaatgccctcttggatatatacatacatgggctaaaatggttctagcacaaaatgtccttattcctacagtgtatgaagatacttcgttatctaacaaatgccttttctgtgtgtgcagattgtttggtggttgaacttttgacggaaatggactatggagatataaatgtgacacttccagattactgatatatgttgggtatttgtatgtaattaaacaacgtgtacctattcgatagtgtgatgacagctgacctgaattgatgaattatgatgtgcaatgtgtgatctgtattttaggttaagtgatttataattgtaatgcattgtccagtcatgtatagatatcggtaaaacaaactactatttcgctatcctactgtgtgatacggtgatagggcgtgcaacgcgcgtgaaatgtctagttgaaagaaagagcttaacttgattcgaggatttgggggtttatttaggtttttctcaatttggcggttcggggaatttccacatatgacttggttatgttggtttcaaactttctatccctcctagataattttattgtgttcaattcagagtccatgactaacacggaggccacggctgaaaaattagccccgtacagatgaaaatgtttatttgattcgatctctgatctctctctttttttttgcttgcaattttttttataatcgatattttttttatctcaaacaaatatgaaagtgaaacttctggtgattttgatgtcaacaataaaaaataatcgatttattttgttgtgctttggcacttgccaattgccacccacacattaaaaggaattatgttttgttctgtacaggtttctgaattcattggtgggagaagctgaagagatgtgattagaattcgctagctgcttgtttgcctggtaccaagtttaatggatcctactcaatgcaacatgtttccttttaaccattctatggtctctgcaaaatctggagtagtcaatggtgaataaaatgcacacacaattcacaattgtcctatgttctccacttgtctttactgaatcctgactaacacctagcagcaggttaaaaaccttctagaaggtatacaatacataaaatttcacgattgaaatctggcgcatatggttaattggttaccaacttgtatgtttttttttaagattatgtagataattttgcttgttactcctatatcattaagaaaaagaaaggagttctttccgttcaatgaaatactagccgctttcctacttttacattaaa

SEQ ID NO: 9951 - DNA, 8188 bp, Oryza sativa
  unsure (1)..(8188): unsure at all n locations
ttcccttgcaatgcattgaagaatttgatcaaaactggaacttttttttttggaaatttaaactggaacaatattgacacgccgtgcacaatcgacagcgaaaggttggtatagagattcaacgttaggtgcagatgatataggaagtggcagcacaagaaggcaggcatgcccacctgctgcaaccagaggcaccaaggagctgcagttagatggtaagcagaacagctgaggaagccgtgtatctttcttttgccggcaatttcattgtcagatcagatgttagacaaccccctttcttaatactacaaagatgtgcaagtcttttgcgtgttccctaaaagcagctaagatgaaggctgtgattggcagcaatgtctctccttataataacagtggccatgccagctaggccatattgatgaagggtgtgagaagagcagatgggaaggatgaacaaaggccatgattttcaaaaccaggcgaagaagtgaacatgccagttgatgtaaatttgtgagactgtttcctagcgttctgtcatgtttgtgctcctttctctattttttttaatgtaaaagtaggaaagcggctagtatttcattgaacggaaagaactcctttctttttcttaatgatataggagtaacaagcaaaattatctacataatcttaaaaaaaaacatacaagttggtaaccaattaaccatatgcgccagatttcaatcgtgaaattttatgtattgtataccttctagaaggtttttaacctgctgctaggtgttagtcaggattcagtaaagacaagtggagaacataggacaattgtgaattgtgtgtgcattttattcaccattgactactccagattttgcagagaccatagaatggttaaaaggaaacatgttgcattgagtaggatccattaaacttggtaccaggcaaacaagcagctagcgaattctaatcacatctcttcagcttctcccaccaatgaattcagaaacctgtacagaacaaaacataattccttttaatgtgtgggtggcaattggcaagtgccaaagcacaacaaaataaatcgattattttttattgttgactcaaaatcaccagaagtttcactttcatatttgtttgagataaaaaaaatatcgattataaaaaaaattgcaagcaaaaaaaaagagagagatcagagatcgaatcaaataaacattttcatctgtacggggctaatttttcagccgtggcctccgtgttagtcatggactctgaattgaacacaataaaattatctaggagggatagaaagtttgaaaccaacataaccaagtcatatgtggaaattccccgaaccgccaaattgagaaaaacctaaataaacccccaaatcctcgaatcaagttaagctctttctttcaactagacatttcacgcgcgttgcacgccctatcaccgtatcacacagtaggatagcgaaatagtagtttgttttaccgatatctatacatgactggacaatgcattacaattataaatcacttaacctaaaatacagatcacacattgcacatcataattcatcaattcaggtcagctgtcatcacactatcgaataggtacacgttgtttaattacatacaaatacccaacatatatcagtaatctggaagtgtcacatttatatctccatagtccatttccgtcaaaagttcaaccaccaaacaatctgcacacacagaaaaggcatttgttagataacgaagtatcttcatacactgtaggaataaggacattttgtgctagaaccattttagcccatgtatgtatatatccaagagggcattgacaggaactgcaataccaaactcaaaggatgacgtgtcagatttgctagcctgatgtgcattgattatcatacatgcatgccgaccaatgcactaaacaatatatttttctcaaatgtgaagtttgagacaccccccaaaaaaaaaatctaagcaatttacgacacaaatctaaaacaaaaattacaaataaacagagtgaaactaatgactggatgcatacctgattttggttccacctgaaacagcacaaaagtaatcataatagagtgaaaaaaaatatgaccgtcaatctgaagaccatgtgtacaatgcataatttattgatgttcggtagatttgctcaggatacacaaagaaaatctcacctagtcacatgccaactatcgtaaattaacctcaattcacattgtttacatttcattgaagagcagaactataatattcgtagcaaacatagcagatgatctactcaccaaatcaacaccgtgaaaaaaaaggcatagctaaatatacctgaaacagctatttccataggaaaactaccattgaaacaatactaaatacaaaaggcaaaaaaatctagttgaagttcaatcacggaaagcttttacctatcatacttccacagctccactatacagttttgaatggtgttactgcccaatttccttcctgttccttctacctgacattcagttggataaaaaaactggcagctaacagcagtacaaagggaccaccgagtacctgctctgcttgatacatcagccaaactaccaaaaacatattattttcagacacacaaacatgaaaataaactgggaagttagtacagacaaaatgctgaggggacttagtttcagagatgggtatacctatgttgattcttagtagcatttagcaattttacagcctactcagctgatgctctgcacagacatgtaattcatagccagtttaatactttaattatgacaattgccaataactgaactacattcagattcaatcggagtatggatgatcaatcaaacaaatatatgacagcaaagtatgtttttgcacgttgagcaaaaacacaataaaaattacatgtataagagctaaaatatcgaatttagaatcacttaaagcaaaagnccttttcttttcccccttttttctttaaaaagaaaaaacccccccctttttttttaccttgattgacagcacacatatagcacaaccgatcaggataaggagccaagaacacaatttttgaaccaaaataatccaaagttagcatccaaattttccatgcccaaataatggatatcaataggccatgcatgggtagttgaaaaattttaagatagtttcagactctgtgctaataggaaaaatagcaaaacaccttaaaggcaaggcaaccaactcacaagcatattctccgtgctcatccaaaggtggccttcgtaaaataatagtagaaatcatatgtttactacttctatgcatactgtctgcaatatacccccaaagcgctgaagcaccttctaatatgtttgagctgaaaacagtcttcaccgttaatccacccatttgatctccaagaagtaagaactactaaatgttctgtgcagagataaatcaatagattattacttgtttggtgaattaatgttgcaacacacagcatggcagtggaagaaaacgcccatgcgagtatgcgacaatgttgtttcccggccaagggccaaccgtgcggttcccaccgatgaattaggcctccatgatttccagtatgtgacccaaatcggttaaattaaaacctgccctgaattggttggtgagttgagagctattcgggggtggcgtgttcgcatgcggagctatccacgtcgcccgcgagcgcgtctccttccgcgtccgcgcaagccgctggctggcgtgccgtccgattggcttgagcgtacggctaggatgaagcaggtggatttttgcagaaaggaccttttcttagtagataatacttttaggtccctcaccaaacggttttacgttccgagttcttaagttaaggcccgcgctctgaaaaactaagtaaaagggtcttttttgaatgaaaaaaaaagagcatacccaatccgcaattgattaaagcggttgctttggagttgccggaaaatttggatcctttagagtagtagtagtagtagtaatattcatgtaatgtttgtgacttcttccatgctctgatctttgcattcttttttttttccgtgcagtaaatcaatctctctggttcctgaagatgaacagcatcaggaggttttctgggatgcgcaagcctaacgccccatctgcaatacataaagacaaagacgagagcgtagttttcttcagggagatgtacaagcgtgaaaaagatagggacatcaacctcctggaacccatgcaatccgttgagtttgatgctatccaaggtgacatcttcggctcttgcgtttctatttttcctatatgtgtcgtcagaaatgttatggacatattcacaatctcttgattagcaatatgaacatttgattagcaatatgaaaatttgcagttgaaaatcccactcaaattgcttcaaagatggatgacctcactgcagtgtttgtgttcttttgaatttgtatctgtgataggtggccgcacgagcaaagctccgtcagggaagacagatttcctcatagcagtggacgagaagcatgactacgactggtaggatggaattcaattcatccagatgactagatcatatacttgtgttgttggaactgtttttttagaagaacagcttgtttcaggctgaagacgcctccagctacaccactgtttccttccatagagatggaaaccaactcatctcaaatggttttccagaaggagctaccaattcatcagcaagttaaaccttcagcttccagggtatatactaatttgctccataaattatactgaatgattttctttttactgaatgctacagtttagagctcctaagtggattttctgctcaattgcaatctgcatttctagattgtctcttcatcagagagcttctcttgatcttgattttatcaattacagctatcaggaaagacagaggcaacgaaaacatcggcaagatcaatgtttcctgcacctaactcttcatcagagaagagcatattcagagtgtccacacaatccatctccaatgagaagaaccaaattgaaaggagatcaacttctgcagccataacgagcggaacaaaggtagttgctgcaattacacctacagctcctaccgcaacttgcaatgcaaccaagaaacactctgaaagatgctatgcaagccaaggtagcagtacaaatggactcaagagagtgacgaaccctgagctcccctactgtgcaccgaagaatctgatcacaacgccattgacagcgaaagcatggcgtagtgatctagcatttggtgtgcatgacacagcagaaattggcaggataagaaggcagtcatgcctaccagttactgtcatggatggcaagcagaaaggcttacctgataaggtgaaggctgtgactgtcagcaataaccgtggtcgtgcaggcgatgccacattgatcaagggaatgagaagaacagacgggaagaaagagcagaggccaaagcatggaaatcaagcgaagtgagcttgtcatttggtataattttgtgaaaccaataattttatgagacattttcctggcgttttctcgtgtttgtactcctttttttttcatgtaacgcacaagactatttgcacatctggtgtagatgtggtttcaactctgaaattgcatgccttccaagttgaaggcttttaaacagctgttgggtatcttggatttgtggagcagaattatcccgctgcaaatgatcattgatcagacacctcatttttcatctatatctacatattttgctaaattaactagcatccagatatcaaaagacatgttcacattgccagcaccactgctgtaccagtatacatgcatgtaccaggtaaaacttttctctgcagaatcttgcaccaaaacgaaccaacacatgttgtatctaactatagtatcaacggtaatcggcgttcatcggtttggaacctgaggcaagtatcagatttgcaagagggaacagggcaacaggctgccaccggcatggccactgccattaaacagcattggtaggattgagtggctttcctcgccccatggtaaatcctcttgtgccatctggcatacgaggaccagggggtggctttgaaggatgatcagcaagagcactgtgattcgatggaggagtgccaattggatgattggcatcccggctatggccatagtactgaccacgggcacgccctcttccaccacgtcctcttcctctttccgtgcctcatcccgcctttgtcatggtagccatcatcagcctatgaaatttatacatgtcgttataatatccacacttgattctggcgcacaataatggtgagcaggagaggatcatttaaagtacctgatgatcaagatgtgcttctgaaatctgggaagcatcctctgtttcgtagtcttgtggatggtcagttgtttcagggtcatcttcgtctgcagcatccacctcatctccacctcttcttccttgacccatggcttgtttctaatgacaattaatgaaaacaaatgtttaacgatttaagaatcttctattttacaaataaataaaataacatgcatagtaatgtaggaatgttaaatcttactaagctagtcaaacatgtttttctgggagctatatctgttgataaatgatgaaatgaccaaaaacaagcttacacctaatgtttacccatcagttaaatatagaagtaactaaatcaagaatgaacaaaccacccagtattgccgattaatgaaatataaatgttaatgactaagatctagtcaggaaacacaagtagtgcataaaggacaattgtgaatcgcaaatgcattttaaaaatcagtccatggttaagggagaacaagttgcattgtgtagggtccgttaaagtaccaggcaaccaagcagtgagcggactctaatcccatctctccagcttctcccactactgaattcagaaacctgtatacagaaaaacagagttcctttaaattgtgttgatggcaactaccaaagcacctcaaaataattcctagaaaaaaaaaacaaatggttagagaaatcaagaagacatactgccttttcagcatcttcaacagtttcatactccacaaaagcatgcacctgcaagtaaagccaaaaaaaatgagggacgaaatcaaggtactggtgttgaaacttgaaatgccttccaaaatagtatttcattgcttatccctcttttcaagtatgacatttcggacatggacaaggtcaccaacatgcaacttttgatcatcacttctatctatgaaatagtaagcaatgttttaaaaaacagtacatggtttcgtgtggtcaccccaccttgtagggcttatgtggtgtaatcggccacatatgcagcttacacggtacaaggttagggcacctgtaccttgtatgtatgcaaccttgtaagcagccttgtagaacttttttttaaaacactaaataagaatatatgaagctaccataatgtgaaactatcccatgagaaatctaatgctaacatctgcacatatcaatccaaacagtaaatgtattagtgatcaagtattaagaagttggaatacacattcttgtatggtgtcaaatatttattaacagagctagaacaagtatatgcaataactaataaactttccgtgttcctttagaagttagatataccatgatacattaccttattagcaaacaacatctcaatctttgatgctttgccagtagaagttccagcaccatcaatcccaccttgtggatagcaagtacgaattgatttcacactgcaatatagaacatcatgtgttcaacaccacatttggcatatatttgtgctcaaagacatgcattgatgcatacctcccaaaagctgagaaaatcttcataagatttggatagcggtgctcttcacgcaaattttcagcaacaacaatgcgtgactgagtacacatataacagaaaattcagttcccatacatatataatgaatagattttatttgattaattagattctgacctgaacttcttcagcatccgcctcagtaaagagcactcgacgtctaaccctttttccatcatctgaaacaacctgtatataagaagat

SEQ ID NO: 9952 - DNA, 923 bp, Oryza sativa
gtgtgtgtgtgtgtgtgtgtgtgtgtgtgtgtgtgtgtgtgtgtgtgtgtgtgtgtgtgtgtgtgtgtgtgtgtgtgtgtgtgtgtgtgtgtatatatatatatatatgtatatatatatatatatgtatatatgtatatatatgtatatgtatatgtatatgtatgtatatgtatatgtatatgtatatgtatgtatatgtatatgtatatgtatatatatgtatttcttccttcaattccttctttaactgtggggaggcttcttcaaatttttctattatcttccaatcaatatattccccatctaatggatccactccttttgttaagcattccttgtatgtgggttttttaaaaaacccttcttcttttatagtcatcttaatgggtatttctgaagtcttctttcctttagcttttttgcatttttgaatatattcttttgcagcaggctctagataataatttattcttaatatttttctagcttggcttaatgcttcatcaatatccttatatttcttccaagatattcctcccattaatttagcatctattttttgagccacaatttcttcaaaagaaatgtagaccccagggagctttccatcaaatactacatatataggcttttgttggattacttcatgatcttcattggcaggcattaatgacccatttattaggtgaaaatattcagagaggctattcaatattgataacaaataccctttttcttcccttttattattgtattggtaccagaaattatccaagatgcactcttgaacttcatctaggattatatggtcctttggcttaaatttatatgaatttggtgggaatattctgagtttgttgtcatctccaaatgtgaagcactcgactccggcgtaattcattgatcttttcatacctgaa

SEQ ID NO: 9953 - DNA, 7225 bp, Oryza sativa
gaggaggaagaggaggcgatcggacagagaggagaaaagcgggggatttgggtcggggccgaggcgtgtgattttggggagggattgattggagtattggagtgtaggtgcagggatgaggagaggaggcagcccggtctggtcaggtcaggtctggtcaggtcctgatgagttgcaactgcgactttgcagtcgatgggatggaacatgtcttttgtgttcgaatctcaattttatttttttaaaatgcttgttttctgaataataatttatataagggcacagtgcttgtttaaaaaaacaaaattgctttttaaaaacatattaatctgtttttcaagttttaatagtaataaatatttaattaataatgcgctttcgagtaagcgtttttacgtgcacggaagagaagtttccaaccgaatctccggaacacggcctaatattgtatctaaaaggaaggggaaagaagagtattgaggagatccgtaaaatgagatgaaccgttagcatatgattacaaacttgaaatatggattaatatgatttttaaagcaacttttttatagatctttttttaaaaaaaatgtatcatttaacagtttgggaatcaccagcacaaaagaacgaggacaatttcttcctctacgtgcttctctcgaacacttcctaatagttcgttcttcctccctttaagaatacaagtaaatttattcacgagactaataagaggttaaattaaataaatattggttgtgattgactaagataaaaaagcatgtggaaaaattaaagcaaattattattacaatgcgctgagatagtaaataggaatagaaactaaggcatttttttaccgtttggttgtctttagctctaagagaggcagaggtagccaaccaaacggttttagtttcacccagaaaaagagcgaagcatgcaaatgtaatctaatctagagtgtagttcaggctactacataactccactctagactatgctccttgagttataaggagttgagccctgccaaatatgccctaaatactatgtagagaagtagttgctccctccgctccaatgtataagcatttataagaacaaaattaaggtaaagattagaagtggttgctactttcaattttattcccattatctaatcatcaacagaaagttaccatacacgatacactattttctaacagcaactaccctatgttttcccttcttgtagtttgcgttgagtttgctttttgcatgcaagacaactccactcattctctgtcctttttcttacttcacctcaccatccaatcatatgatctttgaggttgtattataggtttgttatgtttcctctaaattgtttagatcaggttaagatcgagcataagagattttgatgacctcattaaattaggtatgtttgggtttaatatgggaataaattagaattggagataactgatggaataagtagtatcaaaacagtgttggaagtgcttacatttagtgtaaaatttaaatgctataagtgcttatatttcggaatggatggagtttttttttttttgcatctgtgtgactatttttcttccatttcctttgaccctcttattttctcttattttctctagtgaagattacagtagctgtacagttagtagtactagtaatcataggttttggttggagctagcttgtgttttgtttcatgcagatgtagaagtaggagtacgtgcataagacaggcatatgtgaggaaaaaagattggtgataataactgagttggtgcattaaccaagtggtgtttggttctttgtctcctttttcttgagaagcattgcagcaatgtataggtgctgtttgggaaggagagactaaactttagtctctctcataaaagcataagtccctatgagagagactaaaatttttatgagaagactaagctttaatccctcctactgaaacaccaccatagtacgaaggtcccgggcaagtggacgtgcgcagagagaaggaaacgatccagatgtgatgtgttgtttcgcatgccatttcaccaccccaaacaaacccaaatcaatcacaccttcggttcatcttaattgggcttaatgtccagagagcccattatagatttagagcccactaacgaatcaatttggtgtgaaaaggagtctaattttaatctctcaaccgcaaaactgggtataacgcacgattcctctggctgttaaaaccgatataaaataactactcccagacaatattgaaggtgatatttattgactgtgtagtccactcatcacatgtttttttagaggtgggcccacatgccatcccctatcgcccttcgttctctcgtctcctctctccctccccctttatgtccacgatccacatcaaggaaaccaccttcacaccaatcttaacaatttggggttcgaaatatattttattgtgatcaaaggatatgaatcggattagaccaataattgagggtgcgttcccaacttaggttgcgttcgttagctctagtgcccaacttccctcccttgttttccacgtgcacgctttttaaactgctaaacggtgcgttttttaaaatatatatatatacaaaagttgtttaaaaaatcatattaatctatttttgaaaaaaatagtaaatacttaattagcaaatacttaactaatcgctgctccgttttccatgccggagggaaacagagcctaaccatgtggtgtcttagtatcttatagcacactaactatatacagcccatataagccatagctatatctgggctcgtgatcggcagttagttgggcctgtgcctcctcaacgaccatttcgatggagaccgtacggacatggggcacatgcataaatgcattgcaaaagcttcaagttggcagaagtaggagaatcctgtacactgtactataaaccaatcgatctgcattgttgacatttgttgaggctttgaacgggacacggccgggagcacataaacaaagcaatatttcggcaatcattagttactccctccgttttctattatatgcgccgttgattattttagatatatttaacattcatcttattaaaaaatatataattattatttattttattgtgacttatttattatcaaatgctttttaaacataatattatatttttatatttgcacgaaaattttaaataagacgaataatgaaaagtttgttaaaaaatcagcggtgtcatatattaaaaacggagggagtataatacttgtagaaaaacatcttactatagattttatatatgtgttgtccctataagtaaatcaaagaagcaaaattctccttttggaatatgacgtgctatctctgtgtgacacatgtgcgaatttgagccgtcaacacatctccatcgccaggcaccgaaaagggccaatttaattttaatgttctattacaccatatatatgcttctatcaacggtctttattgagtttttcctctgtcggaacaaaattatacaggacctcggtcctttgcatatttggaaagaatttgcttctccactgccacgtgtccgcaccaatcttagaccacctatcttttacctctagctcaagtgcttttttctcattctctcctcttctctgcttatcatcaaccgaagcaatggagccccatcttcgcacgtggaatacgttccccgggcatggatggagagctcacccaactattccccatgtctcctctccactctcactacctctcttccactttttcttccccgtagaagacccaaagtttagctagggtccgatgcgtagctacggcggcggcgacgccctcatccaaccgcaggggcatgggatggccgacttagcacgctcccttgccgggaacatactcagtctcaactagacatagtactcatgtaccacattgcattttgcgtcgtaacagtgaggaggaggaggcgagggagcgtgttttcacgctagatatgaggctccagccgagaagcaaaagaagatgcagcgtggagcgtgtttttgcgctggagatggagggctccaaccaagaagaacagaggaaggggatgtggggactggggagagtggcgaggagagagaatgggaaatttggcattttggctagaggtagaagatatgtactataagatcagtacttgaaaggttatatttttttttaacatagggaatacacataaattaaagatgttgttgccagccaaacctactactttcagtaaaaaaaattaacttatgttagaatatgactaaccctaaaaaatcttaggatatgtcacatactatatatactagtactttcttgaaccgcaccgagaaaatacaccaatcgacacacgatggtcggccctcatggaactcctcatcacatgcagttgggcatgagatgaggggaagggaggtgctgatccaacccgcgttgccaccgcaatcacgggaacaaactaatttttttaaaggatttttttttgatttttgaaaggaggaagaatctaaatttaatttgcatcactagataaactcaccatgagtgacaaatcgaaaacgacactggacacaggacagtacgtaggatgtacacctttcaaattaaaaacaaattaagggacactgttgattgaaaagtttttgttgcttctcctagcaaatgatccacatatactccgtattaatttgccagatctggaccgaaggcgaaattgaaaaggcaaattgatgggattgatggctacgttattcctagaaattaagtggttaaaaccattgatcccgaaaaggaatagtggtgtagtatgaaaatgggctgtcacagtcagtgtagtaaaagtcggccgactatatatatacggccgtatatacgtacggtcgtacggatacgtcggctaaaccgttccgtatagttggaaaatgctcaaatatggccattttgttcgcttaatcacccaatttttcataatcaccggattggacttactgtatgttataattaagtttcattggaacctgttttaaattgttagcaatccacaagacctagtacaacccttctgctggtatataagctagtaagaaaattactgtctgtttcagtataatcacatggtgagatacgaacacattatctcattttgacaatataatatgttaagaatctctagaactacaagaaattatctaatatattggtattagtgtgaacatgagtaattgcttgacggtacccattccgttcgaacaccgtattccgttctttacaacactggttacagtgcatgaacacatcaatatattatactctctccgttctatattatacctaatctcaccagtacttgtgaagaaagagcaaaattagatcgaactagaccctagcgaagtttaatatacaaggggcaaatattcgtttaacaccatatcaaattacttcgtgtacacatcttgtgccaaaaaagacatatataaccctagttagctgcattgcgtttgtttatgcaacatgcatatatagtaaatttgaatggttcaaaatgtagtaactagtactcctacaattaatccaaattaaactaccacgtacgtactatagctaaatggcagcgaactgaatcaaaatttgcaggtcctgaatcctgattaatatatatgccaatatataaagcttcaaactatttgatcgaatatatatatatatagttggacagtacaagtgtacaacttggttgacaataatcttcaagaggaaaaacaaaacaagcaaaaaaaaaaaaagctagccaattgagtcgatgcattgatcatcgatccatgcattgagattgagagtgagaaatatactaatatatcacaactactctactaacttgcatgcatgcgttgatcatatgcatcatcttccattacagacacgtacgtagatcaatgtgtatatatactcacttcttttcaggtaatctataattaaataaatttttataatatatttatcttaagttaagaatattattatttttttataaaattagttaaacttatagtagtttaattttgaccaaagttaaagcgtattataacctaaaacagagggactaatagattagctagctagttcgatctagccatgtatcactgccattgatcagctcgagctagcaagagctaggtcgtgtcggcgagctgcagcgtgtgcagcagcgcggcgcggaggcgggcttcgtcctggagcgcggcgggcacgtcgtccaccatcacgtcctgcaccgtcgcgccgcccacgcgcgccaccgacgcgtgctgcaccgccaggttcagcgcccgcaccgcgcacatcatgcgcgccggggcgtgccgcgccgccgccgccgccgtcgtcaggcgcagtatggcggcgtcacgcccgatcatccgcaccacgagatcatcccggccgatggcgccggcgcccagccccgcggcccaggcggcggcggcggcagcggagggagccagcggcgccctccgcgcctcggcctcgagccgctcgacgcggcggcgcagctcggcgatgtagtcaacggcgtcggcgaggagggacgccttgtccatccgtgacacggtgggcacggcggcgcggagttcgcagaaccggcggttgagcttctccctccgctgccgctcggcctccacgtggccgatcgggggcgcgccgccgccgccggagcgtggccctggcttccgcccccgccgcttcgtcgtcgtcgtcgtggcgggcgggttcctgggcacgtcgtcgttgctcgccgattgcgaggccgctgccgccgccaaggcggaggcggcggcatccttgtcgagctcgtcgtgtccgagtcccagcagccattggtcggggacctcgcagaactcgaagtcaagcgtcgggaagcaggccgtggcggagaaggaggaaggggagagtacaagctcgtccatggccggggtggctagctcgtcggtagacgtggcgctatgctccaccaccaccaccactaggccacgtcaactgttgtatagtgctaaaagtggaatacctttgctgcagccaggtagcagtatacggagtatatagcagcagtgtgagagtgtgagccatggaggaatcaatagcagcaaagctagggacctcacctacatgtttggctacagt

SEQ ID NO: 9954 - DNA, 17014 bp, Oryza sativa
aatggtaattctagaggttttagttctttcactttttcttttattaatcttactaatttaatgtcttcagaattaaaatatttctgaccattttttcttaatttagcgtataaaggtcctgctagctttgctaaattgttgatgtgatttctagcataatttacaagtcctaggaattgctgtaatttctttttgtcattcatagcatcaggaaattgtaaaattttcttagcaatatgttcttgcaaatgaattttgccttctcctatttcatgtccaaggaagttaactttttctttgcatatctccatcttcttttttgataggattaaaccattttgctcaacctttctaaaaaataattctaggtgagcaatatgatccttataagtttttgaaaatattaacaagtcatctatatatactaacacaaattcttgattatcgttaaaaatgttttgcatttttctttgaaatagggcaggtgcattttttaatcctagtggcattactagccattcatagtgtccctggggacaggtgaatgcagtccattctatagactcttctgccatttttacttgccaaaacccagcttttaagtcaaatttcgagaaatatttgctaccttgtatcctattaatccattcttgcttatttgggatattataggcatcttctatagtattatcatttagccttttataatttatgaccatcctagatttacctctaacttcttccgcatgatttcttactataaatgctgcagacctatgtggacttctactctctcttattgctcctagtttcagcagttcttctatatgcatcttaaattcttctatatctttcggagttgcttctattgggctggtcttaataatatattctgggtttattatattaattttacactcgatagcatttttctcccaatatttcataggaatttctcctataatttggatatcctctaatctttgaacaattttttctatatcctttttagacttaatatccctataccaatttggtgcaaatgcttgtaatcctatgcactctatattggaatttgatatataatagatgtctatattctcactaagttcatattcattaatagatgtctatattcatgtatatatatatatatgtatatatatatatatatgtatatatatatgtatatatatatatatgtatatatatatatatatatatatgtatatatatatatatatatatatgtatatgtatatatatatatgtatatgtatatgtatgtatatatatacatatatgtatatgtatatgtaaatatatatatacatacatacatatatatatatatatatgtatgtatgtgtatatgtatgtatgtatgtatgtatgtatgtatgtatgtatgtatgtatgtatgtatgtatgtatgtatgtatgtatgtatgtatgtatgtatgtatgtatgtatgtatgtatgtatgtatgtatgtatgtatgtatgtataggttattcagtctctttctttgcaaatctatcgagttcatccaagtccattgcatataattcaattcatcgaaatcatgacatttttttactatcttaccagctatgtaactcgggatatgttcttatgtttttcattgcttttttggagctatggccctgagttacatagcttgataagaaaatagcgtaggttgcagtcttgcagagatctcagtgtaaatttgattctaatggatgaattgatggtgtggcgtatgtgatagttacttacttagatggtgtggcgtcccgcgccttcccgccgcctacgacgtggagctccgtcgggctgctgccggcgccgccctcctcctctcccgccgaccatcctacgggcagagagagagagatacgaggaaccgagaaagagaagagtgggggagagagatgacacagcctaacatgtgggtcccacgctgactcagccgcaacataggataaaaccggtgtcaaaaccaccaaaggacatattgtcaccggttttgattagttgtggatatctggttttctggtttggatgacaagttgagggaccttcggtgtactttttcctctgggaaacccaatcaggcattcaggcctaagccattcagcccaactatcaaccatgtaaccctagctctaggtgctctccagtctctctcctgctctccacccacacagccgcccgccagcatctgcatctgcatctccctctgcgccagcgacggccggcgcgccccatcgccgcctccgccgtcgacttgccccatcaccgccaacgaggcgttctgccgcctggcgccgctcgtcacgtacgaggacatcctccgcatcgccaacggcgacacctcaccatcctatccggcaagcctgtcagcgagttcctcaccaggtaagtgctcgatctactccctgcatgcgtacatggtcgaccacttcgggagggaagaggaatataactatgtactgtgactctgcgagtccatggttgtgtttagttcacgctaaaattaaaagtttggttgaaattgaaacgatgtgacagaaaagttataagtttatgtgtgtagaaaagtttttatgtgatggaaaagttaaaagtttgaagaaaaagttgggaactaaacaagggtatgactgctatgtgctaatgagtaatgacctgatgtgtgtgactatgtcagtgtgtgatactgtgatgtgtgtgagtcagtgagtgactatgttagtgtgtgcaagtttgtgctaatgacctaatgttaatctgtgtgactatgtcagccgtcagcgtgtgcaagtttgtggatgtttgtcgatatggtattattaatcgctaaaacttgaaaatgttgacattttctattagaaaaaataatgaagttatatttcttcgttgatttgtgatgcttagtttgaggggtttttatgttccgattaatatttgtcaccgcattcgtttcgtttcgtattcgctccgtatctgtattcgataatattcaatcctgttttcatatccggttctgattccaattttgaaaaaataatatgaaaacaaatatgatagagctagtttctgaccgtattcgatccgctttcatccctaatcccagcagtttagtatgcattgcagccaatattttctcatggacaaggcgctgaagtgagagacgacagacgaagaggtgaaaaaaatggagtcatgttttgtaacgccccacgaggacacgccagagacgatagaagaagaggtgaaagagatggagtcttgttttgtaacgccccacgaggacacgccaaggcaagggctctggctctctcccctcgacatagtcatggtcagcagaggccatacccctactgtgtacttctaccaacgtgacactgccactgttgctgccgattttttcgaggtaggcaggcttaaggaggctatggcaaaggccctagtggccttctaccccttggcaggccgtctcagtgtagatggtgatggtaggcctgaaattgactgcaatgccgagggtgcgctctttgttgtggctcagtcaaaactcaccgttgatgccttcagcgaccttaagccatcaccagagttgaggaggttgtttgccccccgtattgagccagcatccatcatgcttggagtacaggtcagtatatatctagtttgtgtgtgtatgtgtgtatattcaattgtatagagctagctttggactagtgtggtgatatgtacctaggtgcacattaattattccttgcaggtgactttcttgagttgtggtggtgtggcattagggacggtgttgcaccatgtcgccatcgatgcccttagcgcgttccatttcttccagacatggtcttctttctgccgagatggtgaagccgccatgttggagctgccctgccatgaacgcaccctcctccgcacacgctccccacctatcgtccacccggatgtgcactcaatgttcagtctaaagctcaacttctgtgagccatcagaccctatatccaccaagatattcgtcatctccaagaaccagctcgatgcccttaaacaaatatgtggtggattgagcacattttgtgccatgagcgcccttgtatggcagtgcatgtgcattgctcggcaactccctctagacgccgagacacgcgtcatcttcccagtcaacattcggcgccgtgtgaagccacctctcccagatcgctacttcggcaatgcacttgtcgacttgaaagtagcctccacagttagggacattgtcttggggacactggatgtaactgctgcccagataaagaacgcattgggacgccttgacgatgagatgctgcagtcggcgatagactacaatgagatggcagggatgcccaacaagcataccaagggaaacctgccagatacagaattacgaatggtctcttggctaggcatgccagtttatgatgcggattttgggtgggggaagccggagatgatgtctcgtgcggagtctgtgcgtggcggatttgtttatatgatggatggcattgacaacgatgggggtggcgtgcgtgtgctcatgtgtatggaggcacgaaagatggaggagttcgagcgactgttttatgccaagtttgcacaatgaagaaactacctagctagaacatgatgcatgttttctgttctattatcaataatggatgtttcatgtaataatataaccaaatacctccatatattttggtggcatggttgtttcagacatgacagggtgtggttgatttacgcggacaccacaaaaatgtggttgatttacaccaatgagctttttttaagataattaaaatggattatatccctaggcccccagcccctgccgttagggtaagtttggtcacaggaaatcgggatggacagtaatcttaatgtaatcctaaccatggcaatcaggcaatagagaatgtaaacattcgtagaagcgtactccctccgttaaaaaaaaaatcaacttctagagtttgaattttatctcacaaaaaaccaatttttatactcctacctaccctccgcacgtaaaacgagaagttttattccttcaataccctttaacaacatgtcactcttactatttttttaatgattaaatgtattttagtcattctcactctctgctaattttatctagggatgctaggaattgactctttgtgggaccgagggagtaggcgttaattcctaatgccgtgtattaattcccagaatgttggttagccggaatatcctatatctctaactaacattcctggtggttttatcaaacataggaatcaactagaattactccacgatttatgggaatatatataatcaacattcttgtaaccaaacacacactagaccaatggaaatgttttttttaaaaaaaaatccaagtctcaggtgttatatataggttattcagtttcttcctttgcaatctatcgagttcatccaagtccaattcatatataattcaattcatcgaagtcatgccatctttttactatcttaccagctcctcatcagggttggcatctaatttttagagctatgtaactaaggatatattcttgtgcttttttggagctatgtaactcaggatataaaaaaacattttttatcaagctatacttaataaaaatacaagtacatagcctgataaaataaattaggggtagattgtagtcaaaataaaccttaccaaattttgacaatttgacaatattgtcaagttttggcagaatttcttatgtatttactaaagttcgattaaaaaaactaaataaatgcacatgtttaacaactttagcaataatagtatttgaaatagcatcaatctgaacagcttgtagatgtcaccatttccgatcttcgtagcctggaacatttttagatagaggccattgcagcctgtaactgaagttctcatctgtatgctgagaagatgtgccaccttgctatccaacagcgtctagcaaacacaactataaacaagcgctgaaaagaagtaaaaaatggaagtggttgataacttggtaggagctatattttgatggattattcaactactgttaatagttgaacaagatgatggaatagcagcaacgtacgcacctcaatcaggtactagcagtcagcagaaggggaggaacctcttgcgatagtacctttctgaaaatattattgatttatctggaatggaggagagcaagtcaaaatactcaccaccttctttgcaacgtcttacaagctgatcattgctgacactgcaggaatataaatgtaggtattcgagggtcgggagccgctggaggagaccctccggaaatttctctatccccgacaaccatcaagatgtaatttcctcagggaagtgaggccatccattccatcgggcagcaatttcagggactcacactttattacgatgaaattccttagacttgccaaatttccaaggtttggaggcagtggtacgaccaaattctggcaactttgaataaacaattcctcgagcgatgcaggcaacttcgggatctccactattccggaacaactagttatatttaattcctctagacaggataaataaaggatttcctcggacaaagaaaaatttattcccaggctggtaaacttaaaaatatgaagggagcggaggcgaatcaagcacctgagctcctccgttggccagcggacaatatcatggcaatctccaatcaccaaatgctccacaaaggcaaagtgtacccatatcccatggtgcaattcagagaaaccggataccgtcgtgaagcatttggggccatgtagattcaaacgccgaagatttacgagattactttctccttggttttgttggtcctccagagaaatcaccatgtttgcgagagaccttacttttaatctcatgagtgatgaccatgagcccagcggcatggtcatagaatcaaagccttctgcgtcgtaactgagataggacaaacttgttacgtgtgcgagcgagctgacagcaatatttgaacatctatctatattcaggtctcttagaaccgggcaatctggaatgcctgcaagtttagggcagtcactgattcttagtatctcgagctggggaagcgtgatgaagctactaggatctcctgaaatattgactgcccatctctccaagtttggtagatttcttaagaacatcttcttaagcttggggaaaatttgcagagaggtaccacatccctcagcttctacatcatcattcgtacataatgtggttaggttatccatgcaagacaaggacaactcctcaagagagaccaagagccatactggtggtagatccttgcatcttggacagtttgaaatgttgagttttgatatacgctggaacgtgtgtgggtctctcatccattcagggatttcaacaccaccatatccatgtaactccaaaactttgaggttactacaataaggtgcaagtgactccaacacacgctcctcgttataggcattgtcattaggcatgcaacgtttttgtcggccccagaaaaacaatacttcacttagatttttcttctggtacatattggcttgttttgccttctcttcgctttttactttgtgcaaattgtacagttccaacctgttggtaaggtgttgcaagtctttgagctcctcaattccacagcctgcttcagtgtccacaacatatgttgtcagagtacgaagattattcagcagaccgatatttgggggcatccgtcgcaaactgtcacaccaatatagataaatatggataagcttcctcattgttctcataccttttggcaaatattctagctcatcgcaactattgagcctcagtgattgtaagttatataacatgcatattgaatctggcaatctaacgatactagtctcggaaaggtcgagaaaccgtatatgctttgcatttgtgatagcactattgataacagaacaacgcaatgctctcactgatgccaaattgaattccacactaacattccataatgttgatcgccatgatcggtctatcagagtatgcagagatgatgtgcctttgaataactcggtcatcgtttcttccatttcttcaggaattcgcaagtgacggacatcttttatcgagcctttcagctgatccaactcttttgttgtactagcacattcatcagtaacatcttttgctaggtcatgcattaaatcatgcattttacaaacaattgaatcacagtgataaccgattatgaactcctctttcacgtcttggaggaacgatctccataccaaatcatggaagatcatttctcctttatgtgtcaaatccatgttctcctcttcttgaataaaaccatttgccatccatagttggattagttcgtctttaaccatctcgtaatcttgggggaaaattgcacagaacgcaaagcattgcttcatttcaggtgataggtgtctatagctcaatttcaatatgtccatgacatcatttttaccttggaccctagccccaatattactttctgcaatgacctcccattctgagactgattgctttgaactcataaggccacccatcgtcttgagagcaagaggcacccccctgcatttcttgacaatacgtgtgccgatggaaaccaactttgcttgctcctgtacttgtttaccaaacgctctcttggagaacacctcccacgaatcatcttcattcagacaccgtagctcataaggttcaagtgtgcccattatagatgccactcgttggctccgagttgtgacgacaatgacacttcctgcaccgccaacagagttcagtagtggctttaggtcatcagcccacttgttttcctcgtcgttccatacatcgtcaagaacaagtagaaaccttcttcggccaaaggcttcctcaagttgccgtcgcaacagctcgatggtgttgattagttggcatcttctatttgtagccaattcaacgatggatttcagaagggaaccaacttcaaagttctctgagacacagtgccacatcttcagttggaaatgttcctggacactggggtcattgtatatcagcttggcaagcgtcgtcttgcccaaacctcccatccccacgatggggagaacctgcaaattctgctgatcatgctgatccagcgtcagtttcaccaacacctctttgtcatgctctcgcccaaatatgtctgctgactcgtccagccccgagtgtgttagccgataaggaagctgtggcacctctacgtgttccatcaggccaaacttgttcatctcttcgaccagctcgttgatcttcttgaggacatcacccagcttcctactcatggtaacacggaacaggagtgggctatgcggcgtgaagaagccgagtaccttgcgggtggtggagtcgccgatcttgacctcgcggcgcagcgcctcgtactcgaagtcgtcgaggacgtcgtcggcctcgtaggcgacggccttgaggtccttcatccagcgcttgacggcggggttggtctcgctcttcgcctcggcatcggccagcttgcactggacggccagaagctggcgctccagcttgcggcggtcgccgtcgatgccgcacatgcgagtgacgctctggacgagcgcgtcggccgccttgccggccaccccacgcaccaccgggagaagtagcgattccgccatgttgcgttgcacagcattacagtcacagcatgaggcgttctcagctgcaaagcacggtggaattaatgaagatgaaaggcaaagcatgaagcgctctgggcctctggtgcgtaattcaagcggacatgtttggtccgtatgagtataatatgacaacttgactataacttttgcgatgtaaaactgaaagctcgactatcttttgcctagtgcattcgtgtcgtggaatccaccagtttggttgcagtttcgttgaaagctcctcggccctcgccgtcttattcttatcagcaaaaacacacttttgctgaaacaaactggcacggtagtcggcaatgccttcgggcttcgaatatgaatgatcctgttgagacgaatgcatcagaattcagaatgcatcagaccccgcgcaccactaggagaagcagttaaatgagacaattttaaatgaaacataattaaagtttgacacgaaaacttatagctacgcttaaaataagacagagggagaccctgactgatttttcctccgatgcaacccatgtaagacaattgttactataaaacgctgtacaccccatgtaagacaattgttactaaaaaacgctggtactgtatagatgctggctaaaattcaacagtttaaaatgtggcgtaacaccatggaagggcacagatgctatcattcgggtgccccacgccacggcacgcaggcatagacaagttacaatggttgcaaaacttcctcagtattttctgatcgggaactagtttcagtacaacttgccaaaacatggcccaatacaggcgctgcgaaaagcaattggtgcggaattaaattcacaacaattcattctggtcatcttcgacttcaacccttttaaaccttaaaccaaaacatagcttcacatgatttgctcactgcccttcaaaccaactggacctgcaatgagagaaaaaaaattgaagcatgtgatgctgagttccatatacaaacaacgtgtgtcagataatactctacatatagcctgataaaagaaactagacgccgatgtaaaatgtatatggtactgtagtttgctaattactctcattcaacactatggtactatacttgtctaattctaaaccttctactccctccatttcaaattgcttgtcattctagatttgtcctaagtcaaacatatactttgacaattaatttttggaaatccatgtagtttaataacatgtcaattacttattatgaaagtatttctcatggtgaatttaaaaatataaatctcatgatgttaaactatatgagtatattgaaattggcggtcaaagattaaaatgattacttaggacaaacgtaaaacgacaagtaatttgaaatagagggtgtatgagctaacatcacctatatccaattgcctctagaaacagaataacagtagtaaataaatctacaaaagcatagtaacttgactaacttctaaacaaaaaataactactccgtaattaccaaaatagcaatagcagctcctactttttacaccagagtatgaaatcgtaccgaacgacaagccacttgctcatcttctggaaatgtatgcaggccccgtagacctggtacatacaaggaatttacagtaaatcagcactaagaaacaagaaagactgtctaactacaataacacataaaaatggttcataccttccctgttgcttcccaccataaccatgcctggtattacctgcaggaaggccagatcgttcctgtctgactccatttgcagaaacagcatgcatggatgactgcccaggtcgaacttcatctgaaaagccattctcctggatgtcttttactttacttgcaattgttacatcaccaatcccctgaacaatgttataaccaacactatcgttgggttttgggatatgtccacccttgtcaaactgatctccaaagctagcagtggtagacccatttctagatggcattacatttgaagatctggaatcaacaacaggtcctctcttttgcctagtgctttgtgccacgggagtgacagcaactgaaggtaacaatgagtaaggagccgaagatgcaacagcggcaattttggcggcagctgtagtagctgaaatgatctgctgtgctccttcccgaaggtgaatgaagtctccttcaatcacaaagagctgcagaacaaacacaacaatcaataacaagaattacccacggttattttacttaatgattgtgaaaatagacctctggatggctagccacaaaatcatctagcttcccatagtgcttcttatagtcatgccaatgaagaggagccaacattttgccaagcctatttggtagctgaaaaaaaaatttgcacatgagtcagtaaatgttccattagacaacaatatatacagttcccactagtcaggaactcaatcataagcatgcatgtataactcacagttgtgctaatcttgattcggccatcaggtccagcaggaactgcacgtacaatgcaagccagaagggatctctcatctagaagggaaggctcctttggtatgcgaggtaagagtgaacccaaaccaccaccagcagaagtatgcgtgtcagtctgattcccaacgttagcagtgaactctgctgcaccacctttcaagtggatttgagtagttgatgcatcaaaatctgaagctttatgctgatgcctagctacctgctcctccgactggttgcccgatgcaactttttcatcctggtgtacatagagctttgatataagatgcttacacatcaaatagaaatttacaaaagaaacaatggtaaatattttaaccttgaattcatttgtttgctcttgatgttcaaattttcgaatagggctgacaattgaagatgaatcctgggccttttgttgctcattgtaaactaaatgttcagttacattggattccacaacctgtaactgttctagaaagaattagattttaaacagtgttaaattgtatgagtacacaaaacgaacaacaagaaaacagactagtaaccttttgttcatgagtggattcagaaaccacacttgggaaacgttgttgttgctgttgtttcccatgggctgtagctgtaagatgttctgcacgggttgcctgattctgcttcaaagaaagctcatcattattaccagcagcttgttgcaatgccttctgatctggtggggatgtgtgatagtttgtttcatctggtgtctgagaggcattctgagcttcctaattgacaaaaaaattgtttccgcgttagaaattataggtggtcaaaatgtcaacagaaacaggatacaataataaaatgctacacagtattgtgtacctgttgattgggccactgcatgtttggttgaattgtcgactgtgactggaaactaccaaactgaggaacagcggagttaggcgatgctaaagatggaggaacaccttgaggatgcatcatataagaatgcatcccggcaatctgcgcagaaggaacaaaaccacctatacccaacagtgatgaaggaacaacaggtacaggagaggcattactgtttccctgaaagcaacaaatattgcagttccattgagaatattcttcttgagtgaaatagaagtgtccacataaaccaatatgatacagtttaactgaatagaagtaagaccaacacaaatcatggatactgaccacatactaaggaagtcgactgaccaatatcaaactatattttgcaccttccatgataagcactgaaaaatgtttcaggaagctacaataaaaaacaaccatacgtccatacctttgtggaacaatctggaactccattacttttcactgactgactactatctgttgttccactaccatttgcagccatgttgttccctttgttctgaccaagtgttgactcggccgaactctcctgtgcagtttgtgaaccatcttttggtgctccagttcggtctcttaattcatttagttctagctgaagttgttgtatggtatgcagaaaacccctttgcatctcaacatactggggaaaagcaagaggacagggtgaagagaatgttaatataacgcagtcaagacatacgcaaacagtagaatgaaggcatctaatgaaccacacatcgtacctgttgttggaaactaatccaatattgattgaattgctcagtacgatcacgtaactcagcttgcattgtctgagactgtaaagtatccatttcttgaactcgtgccatccaagcatgagcttccctcaattgttcatctttgtaaataatgttatcttgagcagccctatgctgtaaataaaatgctcgtcagggagtggctggatgctaatttgaggaaggcaatcatgcaacaaaattattgaccattgatttagaaattctcacaaagaaataaatgttagattgttcatgcatggatacaaagcactagctcaatgcctcaatgttgataatgctttaatattctccctgaaggtaagactatatttgcagcaacagaaaaacaaggagaagccatgtcattggaaaggaattaaaactatcataaagtgtttaaaaccctagttcaacaatatacattgcataacattagaaatgaactgcagtaaactcatcctatgatactaagttacactttctgtaagagtctatcatgttaatcattcaaaagtgaataactaggatactgttataagcacattgtcagtaaagatgtttatgtatcttttgtagtatgactatgcgcatagagacatacagtcatacacaatctaaaatagaatggaaacaagagggttgaaaaaagaatacctgttcctctaatgcaagcatttggctttccttttctcgcagatgttcttggagatcatggatttgtttaagatgctgtgccctttcagcttcagaattgtcacgttcccttctgcagaagataagaaaataccaaacacattttattttctacaacaaagattttgctcaaaccaaaaaaaaaatgtcctggtcagggattgcaaatgactacatgattttttttatttgttatgttcttttgcacaataaaactattttatcatgcataaatgggcatcacatgattcacaaaaaagaaaagaaaagaaaagaaaagaaaagggaatcaacatcacatgcgggtttttcattgagtaagaaaacaagcaattcagcaagtccataaacaactctaatactttgatgaggtgcaactcagctgctttgttgctctaactagtaataaatacggtcatcccacatgatactgaaatgaatcagtagtacctaaaagttgcaagctcttttgtctgttctctaagaagatcttgatttgcccacacctgccaaaaggaaacaaagatggtgagagatcacaacctctaaatctcactggtgcaacacagagcactaaccgtttgatggtcaatcttcaaagcatccagttccctgtccttgtcatccaatttcatttcgagctcaaggatgtacttttcccgttcatgcagttgttcctgtacaattcgaaatcagtattttttttcccactaaaaaggacaaggcaatctgcagtatgtacatcaatcatgtaatgtaccccctccatcccagattataagggatttaggatggatgggataggggcacatcctagtactgcgaatctggacagactactaggatgtgtaccatctatcctaaatccctttatattttgggacagagggagtatagatcatgacttgtgtgtgaaccgtaaactaacattacttgagctaacaagcaaggcactgcacgcatcaaatcaaacacaataacagatatactcagtcaacaacagaacaccacataaccatcattaaggtattagccaaaatttggtaaaaaagaataaatgcataaatttatcacagcataaagaaatatttgatactacgtacttcattctgtaagaagcagcaaagaagctaccgaggtcacccactaagcaacatcctagacatcaaaataaaaaggaacaattcccacttcacgacagtgtaaccatctgtagcaatactgatcatcatgccaacagaaataatgaatgagtgagtagcactcataagcagccaataaccgcagtacaggccaaatcatgtgcaattagtaagttacatgtactcagttcccacctaatgcatgatacgactggcaacacgaagtgcgtgtaagtggaaagcaaaatcagaaccttcagctttgccgcggccgttacatgctccttggcagcagcctcgaagctgcgctgcgcctcgatgatctgcgggtgggcgatgacctgagctcgcagctccatctcaagccgctgaagctcctcccgctgatgcacgacgctctgcaggcgctgctggatgatgtcctcgctgaggcccccgcttccgtcgatggtgatcgagcagtaatcatccagtcttccacccccgtcctgcagcaaaacaaaaagaaaaaaacaatccatcgatcgtctcaaaccgctccacagctcaatccacaaaccaaaaacaacacgggtggcgatgacgaagggagaagtgtggcgcgcacgcacctcgtacatggctctgtcctcggattgccccatcttgccatgctccccgggatcctgcgcaccaagcaacaacaacaacagcacagcacagatgagtacactcaccagcagcagcagcaaccaagggatgggaggggaggggaggggaaccgacgtcggcgccattggagcggagcggggcgtcggggacggcgcgccactccttgcgcgccgccgcggcgtccatccctgcgcgcggggccccttccccccacaagcgggatcgggatctgggcgacggggggtgctagggttttgggggtccctatctctcccccgcacgcgcggggtcggggtcgaggcggggagcgacgtcgccctcaccgcggtcaagctggagcgcgagcgtggcggtggcggtggcggtggtggtggcgatggctagggtttacggcggccgcggcggatggaggaggaagaggaggcgatcggacagagaggagaaaagcgggggatttgggtcggggccgaggcgtgtgattttggggagggattggattggagtattggagtgtaggtgcagggatgaggagaggaggcagcccggtctggt

SEQ ID NO: 9955 - DNA, 22837 bp, Oryza sativa
cacacacacacacacacacacgcatatatatatacatatacatatacatatacatacatatacatatatatacatatacatatatatatatatatacatatatatatatatatatatacacacacacacacacacacacacacacacatatatatacatatctacatatacacatacatatacatatgtacatatgtatgtatacatatatatatacatatatacatatatacatatacatacatatatatacatacatatgtacatatatacatatatacgtatacatacatatatatacatacatatgtacatatacatatatatgtatacatatatatatatatatatacatatatatgtatacatatatatatgtatacatatatatatgtatacatatacatatgtatatatatacatgtatacatatatatatatatacacatatatacatatatatatgtatacacatatatatatatatatatatatataaagcaacaactgagacttggatgattttttttaaaaaaaaattccattcgtccaatgtgtgtggttgcaagaatgttgattatatatattcccataaatcgtggagaaattctagttgattcctatgtttgataaaaccaccaggaatgttagttagggggctaactaacattctgagaattaatacgcggcattaggattagttttaaacgttcctggtggttttatcaaacataggaatgcaacattcctagaaacataggaatttgtcatgtctgaaacaaccatgccaccaaaatatatggaggtatttgattatattattacatgaaatatccattattgataataaaacagaaaacatgcattatgtttgtagctagatagctagtttcctcattgcacaaacttggcataaagcagtcgctcgaactcctccatctttcgtgcctccatacacatgagcacgcgcacgccacccccatcgttgtcggtgccatccatcatataaacgaaaccgctgcgcacagactctgcacgagacatcatctccggcttcccccacccaaaatccacgtcgtaaacaggcatgcctagccaaccaatcattcgcagttctgtatctggtaggtttcctttcgcaggcttgttggacatccctgctatctcattgtagtctatcactgactgcaacatctcaccatcaaggcggcccaatgtgctctttatttggccagcacttgcagccaatgtccccaagacaacgtccctcaccgtggaggccactttcatgatgacaagtgcattgccgaagtagcggtctgggagaggtggcgttacacggcgtcggatgttgactgggaaggtgacgcgtgtctcggcgtctagaggcagctgccgagcaacacacatgcactgccatacaagggcgctcacggcacaaaatgtgctcatgccacaacagattcgtttaagggctacaagctggtgcacagagatggtgaagatcttggtagatatggggccacgacgaagagtgcaccctcggcattgcactcaatcttgggcctactgccgccatctacatggagacgacctgccagtgggtagaaggccaccagggccctagccatagcctccttgatccttcctacctcaaaaaagtcggtgttgccgctggcagcaacaacatcacgtcggtagaagtaaacattaggggtatggcctctgttggccaggacgatgtcgaggggagagagccagagcccttgtctaggcgtgtcctcactgggtgctataaaacatgactcaatctcctctaccccttctatctctgacttcagtgccttgtccatgagcagaaagattgactgcaaagtagtaaagtactgctgtggttagttccttttgcatagatctgtaccacatatatgcatcgacaagattggtacatatcaattaaaatgcaataataatgctttggggaccactgctagaaaattttgaagaaaaattaaaaaggcatttaactaacttattcagccacaagtatgattaaaattttaatcacattttttttacataagttaatatttataacaatggaagcgaaatgcacgggttggtgccatgcatgcaactgcaaataccatctaatatttagttttagtttatcaaaatattaatgagtccacaattcggaattaacaaatatgaatctgtacaatcttctattgtaaagttaatttttcattaatttaattccaaaattcaaattaataattagcaagttgtaaatgatgtgtgaacactttgactgtttttgttttgtttttctaaacaaaaagagcatgactcctcctcccctttccattattagaaacgtaggtgtgttctactacaggaaacaaaagattggacattctattactctctctccatcctaaaaatgtatgacgttttaactaattaaagtcaggatcgagtacaacccaaatagttgttatagttacctggattatggtacgatgctgctctctcaatggacacttaaccgattgatcttctccacggccggccttcgtcgccgcgccgtcgtcggctgctccgcctcttcgccgccggcgaccttgccgaggagtctgtgtctgtgccctctccgttcttgagctagctagttagctcgcatgcagtgtgaggctgtgagcccgagcagctctggttgccgatccgtgggggaagagatagattagtggcttgatctggccgcggcatggctgactaatttatactccatccatattaaatattttaatatagaacgtagttgatttatgtaatttattttattgtgacttaatttatcatcaaatatactttaaacataacatatatttttatatttgcataaaagttttgaatttttagataatagaataaaacatcccggactttgctcattagagctatagccaattattacaaaagtacgtatcacctaaacactgagtgtagttcaaatgaattaaacacatccaacaaaataaaagatcaaactaagataaaagttttgatcaaatgtttattaaaaagtcaacgacgttatatattatacattatacattatgaattatatcccatcgatgggaaaagaattaaagaagagatatgatgtggttttcatgttttagttgtcgggaatctctcctctctaaatgtttaggtactaatcactagtactaacataaacacttgtatttactcggtggacacaaacacacaagaactgaacaacacacagctttggtcgaggcagccacaccccggctcacttcattttcctttcattttatagactcacacagtacatgcagataacaaccagccaattctcttgaccgggactcacgctatgcacacaaacgtgcagatgccatgcaactaagtaactaactaatcctacttatttgccaagaaatcacttcacatgattaccactaatcacagcacatgcggctaatcactagcaacaactaaatctcatgcatagctaggaccgattcactcggctaatactgaccacaccttgcttgcaattcggctacttctcgcagcactccacatgcagttgagctcttggtcttcatgaacgttgtttgctccattctcgcaccaccgcatcacacggcatgtcggcatctcgcccatgagctggagccaaactaaatatgcagtttgtacatatctcacgtacatagcttctagcatgtgacctatactacatgtaaacaaaatagaaccatgcatatatcctaattaatgacaagattaaactctatcattagtgtggatacgtacgttagtggttcaagccactagacttgtccccatccaattttcagccatcggatgagcaaaccaacgtacaggatatatatgaagggaactatatatagttgcgccatatttttttctggttaactaaaacacgatcatattaatttctaagcagcaacagatgactatttaataaccaattgttcaaagacagccgtcgcatgaacagatcaacaaattagtaacaataactaagtgtcttgattaaacaactaacataatagaacattgaatttaactaagagaaaatagaaaacaaaaaaatattacagtgtcaaagttctgttgggttagttccttttgcatacatcatatgatccatccacaaatatacatcgagcagggccctatttgattacatgggctaatgtttagccctcaccttttagtctcaaattagccctcaagaatccaaacaggtgggctaattttgagctaattcaaggctaaaaggtgaagagagagtagaaagagagccaaacataacaccctaagctaatgtttagcctaccaattcatgactaaatattagctctcaaaattagccctatgctaatcttccaaacaggacccagctgtagatgcatactacctgtaaatgcaataatgcttcggggaccattaatataattggtatgcgatttatgtggtgctgcagggtggctgttgtttggtggcaggttctattcaattacaaacactatattcatcaatgcacatataacaatatttggtgtaatacacctgccaagtttagaagttttgtgtaatgcgaagatttggctcatacattagagcaagtttaatagtatagcccactactagctctaattcatctatagccaatttaatagccaatttatacaatagttgcttactatactattaatatatggtctcacctggcatacacacattgtggcttatagtccgtgttgcagctggctatagatctgtagcccgctgctcttctcttttctcttttatctcattaaaatatattggcttatagccggctattgtacctgctcttatgcatgctgaaactttacaagttacagttacgcggatttttcaccaagattcacaaatagacttcaataattgttttctccttatgtgttggctttattatttcagttcttattgttgctagagtatttgctctctgagagaactttgtaataaatggttgtaacttctttgtagcaaaggcccggatttttattctattatcttaaaaaaaaaacctacgaaggctcaggagagcaagagagaggcggcctagagctacagtaaaaacaccaataccaatagagatagattctaatagctcgagtggacgtccacccgtttattgcatgtcaactaaatggtaatgaaaaattttcaaaaaaattgacaagatagatcaatatgtatatatcactccagaaacatgcaagttcaaattaacttctataagttgtaataaaaataataaatttaactgtatatttacatatattaatttgagtcttgtttgttatttttgttataatttgtagaagttgaattttaacttggcatgtttgtggtgtgatatattacatattgttcatatttttttcatttttttataaccatgtagatgacatgtaataaacatgtggatatccactcgagctgttaaaacagtttccccaatacgaaggagaacccttcttacctccccgatttcagccggctcttgtcatccatgcacacgcaacatgattttttttagatatatcggatgtcatccgccttctctggaattaatttgtcagcattctaaatataggatcccaatagatagttacctcagcaaaatcactatatagttcgacctatacggaaataaacatcatacgtatatatatgcataaggttgggagcagataaaggagtccgttgataaggatatataggaggtctagtactatttaatctcacctagaactgctcaaatcatatcttaggttgagcacgtactttcactccgcactatggcaaattgaaataagtttcgctttacactaggggttataatcagctctaaacgaaacaacgatgggagcaagtataatgcagatagatgcgtactaaactgcatcatatgatgtaccacctactgacctagctacaatggtgtaccttgagtgagtgaggccctatttagttcgcgaaaagaaaatttttgtgtgttacatcggatgttcgaccagatgtcggaaagggttttcggacacgaatgaaaaaactaattttatgactcacctggaaaccgcaagacaaatattttgagcctaattaatccgtcattagcatatgagggttactgtagcgcttatgtgatgaggacatcctccactattacatgctggtaaagacgcaaaagttgggcgatgaccgtgtgagcttctgaataatcccaccttacttagctagggaggaggaagccaccttaaaagggagagctacccttctcctatcgaactagtcttttaggtagattgggcctttccccgagtgggtgtgcctaagaactgttggagtccggacaaccttaatttgttgggcctcggccaactctacctgggcctgttagggtccgagcaaccttaatttgttgggcctcgaccaactccacctgggtcggattgttatcattatggctaatcatggacttaggtgcaaaagattcatctcacgatttccccccaactgtgcaattagttttttaatttatatttaatgctccatgcacgtgtctaaagattagatgtgatgtttttgggaaaaaaatttgggaaactaaaccaggccttagtttccaaacaaaacttttcaccctgccacatcgaatgtttggacacatgcatggagtattaaatattaaaaaaaactaattatacagattgcatgtaaattctgagatgaatcttttaaacctaattgctccatgatttgataatatggtgctacagtaaacatttgctaatgataaattaattagatttaataaattcgtctcgcagtttataggcggaatttataatttgttttattattaatctacgtttaatacttcaaatgtatatctatatatccgatatgacatgtcaaaccttttcgtctcgcgaactacaaggcctgaaattgcaacacatggggtgtaccaggaccaggaggagagtcaccaccgcacatgcagtagttgggttggcttggagatttggtcgtggtggtccggtaacaatggtgatgtatagcctggcggagcaaggccatcaggaccgccttcctttagtgctctactacagcttttgtttggctaactaactatagccaaacttcataggctgtgttcgtttgcagtagttggaactcctttcttatgcaagcaaaacgaaacattggattaatacataattaattaaatatttatttttaataaagattaatataatttttaaagcaactttcttttttttaaaaaaaaagatgatttagtagcttaggaaagatacatacagaaaatgaaaaaggtgaagttgggaacttgcactagagaacacaaaccttaaaggagtattgtagtattcctactgtgacaatgaactgtacaatagacccatcaacattcaacaaattaattgggagaatgctatgaaggtgtgtgagcgtgccgtgtagccgtgtagatggcaccgttgctttcaggagagggaaggtagtccgggagcatacatgtggtttagaacgctgggaaagggaccgaaggagggaagacgatttttttttgacgcaaaaggcagagagactctaccttgttaccattgtattaatggtggtcatataagtaacaaagccagtggctggcaagagattataagggggaacaaagaggaaggataaagaaaacgaaagataaaaaagaaggaaggaagaagaaaatgaagaagaaagaacaaaacacaaaaataaaaaggaaacctagcttagcttgtctgcccaagtgttgatgtgttcgcgaaggctgggctttaggcgatgaacccataattggagactttctctgatttgatgtaggatgtatgcaacgcttgtttcagtgagcttgaagatcagctcgttgcgtgcttttcagagaccgtgcgaacaagcagcaaagcatgcaggccatcccggtttctggtgttctggcaaggtgtccaggattgattccacaaagagggaagacgatcgagcctagagattttcttgtttcaggcactgaacagtgagtacaacatcaacgatcgctgctgggaagagggctgacgccgagcaagggacgtgtcgtggcgacagctgcttcaacatcctgataatttggtactccgttccactcccttcaaaccttggaaaatagggtaaggctaaggaatctcacggtgaggagctgtggtgctctgaaagggctgcctgatggaatggattgtcgatttttatggctgcagtgaccagctgcaaagatgtttcagagaaggtggtgagtattttgacttgctattcactgtttgagagaagcaaatggtttcacgggtaaatttgacccataccattataaatttactattttagaaaaatattgttacaatttgtgaaaccgactagatgccacaaaaatttcgtaaaattctaataatgccgctgttgtccatttttcaatcatgttcttttcttcctctccccgatgaccacacggaggttggccggcgagctccgggaggcttgtccggtgtgccagggccatcaactgggtggcaggcggtcggcgtggaggggcaatgaggagcactggcaaggtggcatcggccccgcccaaacacaacgcaggcaagttatgatagaccattgaatatatccaaattggatgatgacctgtattccaagcgtgatggatgctggttcaatgtaggggacaagcaacatccgcaactctgtagatggcttaagatcgctgaaggcatcgacagtgagctttgatcgtgccacaacaaagagcgcgccctcagtattgctgtcaatcttagacctaccattaccatcttacactgagacaacctaccaagaggtagaaggccacgagggccttagccatatggtcttgtttggatcatccggactattaaatagccctccagaatcttgctatttaggagtattaaacgtagattactgataaaattcatttcataacccctgggttatttttgtgagacgaatctaacaagatatattaatctatgatttgctacaataatcatccgctaaacatgggttagtatacctcgttatattcgtctcgcaaaatagccaggggttatggaattgattttgtcagtaatatacgtttaatacctcagaggatcctccttttgagcgttcctaactcgaaaatcgcgtacacgaacacgataggggtatggcctctgttggtcaggggagagagccagagtcgttgcctcggcgtgtcccgtggggcgttacaaaacaggactccatctcgttcaacctcttcttctatctttgacagcgcgcagccttgcccatgagaaaatgttggctggaatgtactaaacttttcgggctagctcctttggcaaagatccacacataaatatatatcgacaagctacatatatcaattaaatgcattaatgcttgggggacctagcttgtattgctgctgcagagtaccattactgaaaacagcagacacaccataattatattgtatgggatgccattcgcctgttttgtggcaggattaatttaattacaaacactactctggtgtttgtaatttaatttacatgcaacatgatctagtgtaggcatatcggatatcatttcttttctctagaattaatgcttgtgtctggattgcatatttatcaagcatatacttcccccgtgtcaaattatttattgttcataattcctgagtcaaattaaatgtttcaatctttgaccatcagtttctatacacttaaattctctattatcataagatttatattttcagattcacattgagaaatacttacatagtatatataataattcgtatgtttaagacggttaaagaaaaaaaataatgattaaagatagacatgcttaacttaggacaaacatgacaaataatttgaatcgaaggaagcatgtaaatttagattataagcatggatatatccatcttgcagttccatgctcttggagaagaacaagggaaagccctctccatacaagcttagatgattagcacgatgttaacggtcgttaagtataaactttaaccgtcaactcatatataaaagaactaaaatattacatcaaaatttagtgagtgggagtgggaggtagtggcggaggaagcacaatgtggtggtgcccgccgtagccatggcggtgaggaggcgggggtggggacggctcgaggatgaccaagaatagggcagctgataccgacgacaacacccctagtacgtcgacgagctcggcagcgccacgacacccatcctgccaccgtcacgtctccatcaagcaaccagctcggtgacaatggagaatagagaggtaagcggggccgaagaggccatcgacatcggcaatgacctcgctgctccctcaccagcctccatactgccgtaggatttcttttacaccggatttataagttgggggttaagatttctggtgcgatttaaggatgaggtttaaactcggtggaaagatgaggcctcaaaattccaacagaaagtgacggagagggaaggagaaggcttgggccaagccgaagagaggaggatgaggcccaacgtgaacagttcagttctataatttccaatgttttcaggctccattagctcatctcacgcggcctttgctggccgcttactcgcatccggcatcccatcgatcggcgcgtgccggcggcagcggcgatggcgacggtgagcgagcacacgacatggagcccctcctcatccctcgctcatgtcacgccctctccctagcctcttatgacctgttcactttaatgccaaaaaaaaccttgccaaaattttgacatagttaccaaaattttaaaaacttactaaaattttgactaaaatttggtaaggttgaaaatgacatcaaagtgaacagacccttactctccctcatcatcatcgccccgctcctgtgggacttcaggcgcgccgcgttcgtgcacgcaaggtgcttgtagaaatgcctcaactacagacttgcttgcacttgcagcattctgcgtcgtcttgtctgtaggtcgatgatttcgtgtcaatctggcggccaaatcttggtattgattttgcggggggaatcgacgtgatatatattcattgaagcttttcactctcttcttttgatttttccggtgcaaataagtactgtaaaagacaacttttacggtgatctagcatttcctcctaaaaacaagtgcgcctagctagctgattaggagtacactagtacttgcttatcatcatcagtaggaatttcggagcaagacaaggcatcgccgtgtccattcaaccaagcgtgctttactgctttccattcttttatactccctccgtttcgaaatatttgacaccgttgactttttagcacatgtttacagcggcgtatctaggatttatgatataggtggtccgacttaacaaaaataaacactataaatgtgaaaaaaatgtaatgatggtaatatatataatacaaatacaaaataataaaataaaccaaaagtgtaccatgttatatatattaataagacatcttaaaacatatataaattagcaattaattagtaaaattcagacttaaacaagtttatatggctagaaaagtttgaagaaaattaccatactactactttttataaggtctacttctaacagtggccatgaaagtgtccattatattttcttcattcactttgaagaaaaacatcccgcttaatgaatgaaaacatcctgcaatatcttcatcttttttatgcaatctacaatacaataatacaatttagtatcaaattcacaagttttaaaagttaaatatgaaaattgaagaaaaaacaacacaagttcaagacctaaaatcctaaatacctgccacacccacacggcatcacagccacatgcctgccgcctgcacgctgctggagttctggagtctggacgccgaacagaaaaagaaatcgctgatcccggcggccggcgccgacgaaccggccatgacacacgcggcatgccactgaacagaagcgctgaaggctgattcgccgaagcggcgagccggcgtccggcgatgacggtcgacgatcaggtcatcaaaaatcgaatgagtgagtcgagaggacagagcagtcgcgccatcgcggtcatggcgcggagggcagagacgccgttgcggagtcgcggactcgatctctatctcgctcgatcagcgctcgcggtcatgctcctgcccaccaatcttgcggcggaaaacaaggcgtgattgttttgatcgctagaaggaagacggctcgtcgctcgagtcttgacgctggcgcttcggtctgatctggtatcgtacaagttttttcttttcttttttttaaagaaacttatactacctagttgcgccgcaatttttttgggaccacccggaccaccctacagatccgccggtgcatgtttgaccgttcgtcttattcaaaaacttcttgtaaaatatgtaaaattatatgcctacataaaaatatatttaacaatgaatcaaatgataggaaaagaattaataattacttaaatttcttgaataagacgaacggtcaaacatttcgaaacggagggagtatataacaacagtagtaaagcgtgcttagccaggctagctggacggccaaaaataattttgccaaaataatactatcaccttgactttgccttgacttacattacgattcagatcatcgatcactcgtcctcttattcgctactaatttccttcgcacatccagcaatcagatatcctgagatagacagagacagcacagaagtaaagaaggcccgttgtcactgtcagctagtgcgagctgagtagtggtagaagcatggcagaatcgctgctcctcccggtggtgcgcggggtggtcggcaaggcggccggcgcgctcgtccagagcgtcactcgcatgtgcggcgtcgacggcgatcgccacaagctggagcgccagcttctggccgtccagtgcaagctgtccgacgccgaggcgaagagcgagaccagccccgccgtgaagaggtggatgaaggacctcaaggccgtcgcgtacgaggccgacgacgtcctcgacgacttccactacgaggcactgcgccgcgacgcccagatcggcgactccaccaccgacaaggtactcggctacttcacgccgcacagccccctcctgttccgtgttgccatgagcaagaagctgaacagtgtcctcaagaagatcaacgagctggttgaagagatgaacaagtttggcctagtggagcgtgcagatcaggcaacagtacatgtgatccatcctcagacgcactccggcctcgatagcttgatggagatcgttggcagagacgacgacaaggagatggtggtgaatttgttacttgagcagcgatccaagcggatggttgaggtgctatcaatcgtagggatggggggattgggcaagaccacacttgcgaagatggtgtacaacgacacaagggttcaacaacgctttgagttgcccatgtggctctgtgtctcagatgatttcaatgttgtttctctagtcagatccattattgaattggctaccaggggaaattgcaccttgccagacagaatcgaactattgcgcagccgtctacatgaggtggtaggccgcaaaaggtatctacttgttcttgatgatgtttggaatgaggaggaacataaatgggaggagctgaggccattgctgcattctgctggtgctccaggaagtgtagtacttgtcacaactcggagccagcgggtagcatccataatgggcacagttcctgctcacacgctatcatacctaaaccatgatgattcatgggaattattccggaagaaagcattcagtaaagaagaggagcagcagccagagtttgcagagattggcaatcgtattgtcaagaagtgcaaagggttacctcttgctctgaagacaatgggaggccttatgagttccaagaagcgaatccaggaatgggaagctattgcaggaagcaagagttgggaggatgttgggactacaaatgagatcctatccatactaaaactgagctataggcacttaccacttgaaatgaagcaatgttttgccttttgcgcaatcttcccaaaggactaccagatggagagggacaagttggtccagctctggatagcgaataatttcatccaagaggaggggatgatggatttggaagagagaggacagtttgttttcaatgagctagtgtggaggtccttcttccaagatgtaaaggtagaaagttttcatgtcgggattaaacagacttacaagtcaattacatgctacatgcatgatctaatgcatgatctagcaaaatctgtcacagaggaatgtgttgatgcgcaagacctgaaccagcaaaaagcctcgatgaaagatgtccgccatctgatgtcaagtgccaagttgcaagagaacagtgaattatttaaacatgtgggacctcttcacacattattgtcaccatattggtcaaaatcatcaccactacccagaaatatcaagagattaaacttgacgtctttacgagcattgcataatgataaattgaatgtttctccaaaggcattagcaagtataacacacttacgataccttgatctttctcattctagtaagctagaacatttacctgattcaatatgtatgttatacagcttgcaagctttgaggttaaatggttgcttgaaacttcagcatttaccagagggtatgagatttatgagcaagctcaggcacctttatcttattggttgtcatagcttgaaacgcatgccaccaagaattggtcagctaaagaacctccggactcttaccacatttgttgtggataccaaagatggatgtgggcttgaagaactgaaagacttgcatcatctaggtggccgactagaactgtttaatctgaaagctatacaaagtgggtcaaatgcaagagaagccaatctccatatccaagaaaatgtaactgagttgttgttgcactggtgtcatgatatattcgagtacagtgaccatgactttgatctcgatgttgttgacaacaaaaaggagatcgtagagttctctttacctcctagcagacttgaaacattgcaggtatggggctctggtcatattgaaatgtcatcatggatgaaaaaccccgcaattttcctatgcctaaaagaactccacatgtctgagtgctggagatgtaaggatctaccaccgttatggcagtctgtctctcttgagtccctgtctttatcccgtttggataatttgaccacattatctagtggcattgacatggctgttccaggatgcaatggttccctggaaatttttccaaagctgaagaagatgcatttacattacttacctaacttggagaaatggatggacaatgaagtaacatcggtgatgttccctgagctcaaagaattaaaaatttacaattgtccaaagctagtgaatattccaaaagctcctatcctacgagagctggatatattccagtgcagaattgcactgaactcactcagccatcttgcagcactttcccaactcaactatgttggtgactggagtgtttctaaggatttgcaggtaataccaatacgctcctggccatctcttgtgacattagcgctagcctctttagggaactcgcttctcccagatgagcagcagacgaccatgccccctctggaatcaattcagaagctgagcatttggtattctagttgtttcttctcacctaattcgtcaaactggccctttggtttctgggattgctttgcatttgtggaagaattgtcgatagtattatgcgacgatcttgtccattggcctgtgaaggagctctgtggcttgaattcccttcgttgtgtaagatttagttattgcaagaatctgaccagttcatcatcagaagaatccttattcccgtctggtctggaaaagttgtacatagaattttgcaataacttattagagattcccaagctccctgcttcactggagacactacgcattaatgaatgcacttctttggtgtctctgccaccaaatcttgcaagacttgccaagttgagagatctcacattattttcttgctcaagtctgagaaatttgcctgatgttatggatggcctcactggtcttcaggaactatgtgttcggcagtgccctggggtagagacactgccacagagtcttcttcagcgactgccaaacctcaggaagctaatgacactaggaagccacaagttagataagcgatgcagaagaggaggggagtactgggagtatgtctctaatattccatgtctgaacagagacttcatagaagaaagaccctgttaaggggtttgcaaagaaattcctgccttgctgctcaactctcaactaaggtctgcctacatgcactgcctcttctctttttttccccttctcctccttggattatgtaagagtgattttacagtcattgaggagataccatatttttctagtgtaaaatatggtacctctcaaggaccgtgaatttactcattatgtaaatgtaatgtttgtgttcctctgaatctgaatctgtgataggtggatagcagtgaacaacccacacatgatgcgcaatccaagggctatcagtccctcacctttgaacctagatcagtagtgctaaatgttaaccattgcttgctcaaccaataaaaatggtaaagatcacagattgcagtcaatgaatccatatgccatctgaagattgagctagacatcaccactaccaaacactgcatttgcttcgaatttagacatagaatttatttttttttagataatggattaaaaccctgcctctacatcccacaggatatacacaaccctaaagatttttttttagagaagggtattttttaccggcctctgcatccaaccggaaccggatatatataccggcctctacatccaaccggaaccggatatatacggccattgaaatagggaacttaaccccgcaaacaacctaatctgaaattcgctcctatggagatttgaactcaggatcttggggtactactcaggtcactgtaaccactagactacgtgccctttcgtacacaaccccaaagatacatagtctgagcatagaatttatttgcattagattgtaaaacacaaaaacaatcccaaattgcaactagccatcatagttttgcaagcatacgtcctgaaaaacagcaaagggtctataacgtaaaccagcaaacaagtaaacatggtaaaaccgctcaaaccagacaccctaaaatcttttagaaatcctcctaatcctctcattctcacgtcatatgcaaaccttaaacataaatacagaacgagtctccttaataccatcggatgcaacccttccaatcttttgacaacaacaacaaagtcgcgtccaaaccctacaaatcgcgaccaaatcctagaaaccactgcaggaaagtaaatggcatccaaaccctaggaaccgcgaacttgtaatacgacaaagaagcagcaggagcagaggtgggaggaggaggaggaggtaccaacggtgagaaatcctctccgcctcttcaccgagcgtctcaatgagcttccgccagggctcgtgccgcgacccttagttcaccccgggaaccctcggaccaccgcaggtttccgctcgcatgccgcgggtgccggagagcaccactgccccgtacggaagccatcggcgtcggcggatccagcgcggcggcagacgaacccaacattgaagccactaggccgtccttccccggcggccggcaaggccaatccggcggagaagtccgggcaggcaaggggatggggatggggatggagacggggacttggaacgagaagaccatatactaggagggggtttctcgcaaaaagtcgtggacaagtgttgaattttccgaatatcttaaccgtctggatcagatcggacggcccttatccttcagaagtttgcaaaaagttcagggtttcagactcttaagaagttcagatttttctaagattttagggtgtctggtttctataatcttcagagtcttctcctgtcatcgacatcgctatcgcagtgtacttctgatttctgaaccaccacggcgatctacccgattgcaagctcatcgatgtcgatttcattcatcgaaaccaggtgcatgctgggctgtaattaagccgatatgcagttggtgattgaatatgcagttatcatgtcatgcataatttgttgattctgagccattccttggtgagttctccttctgtgggttgttgcgtgttacgatgacggttgcaaatcgtgttgtactgcaaatggggcgttgaaattcttgttattattggctattcataaagcctgagatcatagagtgcatggtttttctttttcttttacaacaaagtagacaataccccatttaagtagtctacatcaagatagaacatggtatctctgtgacgggactaatcagaaggaacaaaaatctagtgcaatcagctgaaaatcctggtaagtactaatatgacaacccacaaagaaactaagatttgaatgtacaatgcaaaaaaaaaaaaagtcaactatcaacatgctcgatcaattcaaatgaacaattgaagactgtgacagccaaaaatataagcttaattgcctctttgctttctttcgcgcatcgagcaatcaaagagcctgagagaaaaagcgagagaagttgcagctaattagtgagcagcatagagccatggcggaatcgctaatcctccccatggtgcgcggggtggcggcgaaggccgccgatgcactcgtacagagagtcaccggcgcgtgcggcgccgtcgacgacgaccgccgcaagctgcaacgccagctgctggccgtccagcgcgcgctggccgacgccgaggcgaagagcgagaccaacctcgccgtcaggcgctggatgaaggacctcaacgccgccgcctacgaggccgacgacgtcctcgacgacttccgctacgaggcgctgcgccgcgacggcgacgccaccgccggcaaggtactcggctacttcaccccgcacaacccactcctgttccgcgtaaccatgagcaagaagctgagcaatgtcctcgagaagatgaacaagctggttgacaagatgaacgagcttggcttgtcagtggatcgcacagaatcaccacaagaactgaaacctccttatctccagatgcattctgctgcactggatgaatcaagtgacattgttggcagagacgacgacaaggaggtggtggttaagctgttgctggatcagcgatatgagcagagattgcaggttctccctgtcatcgggatcgggggttcaggcaagacgacgctcgccaagatggtgtacaacgacacgagggtacgtgaccatttccagctgaagatgtggcactgtgtttcagagaattttgaagctgttccccttctgaaatccatcgttgaattggctacaaatcgaagatgtcaagtgcctgacaaggacaccatcgagctcttgcgacggcagcttgagggagccattggtagcagaaggtttctgttagttcttgacgatgtatggaacgaggatgagaacaagtggaaggatgaactaaggccactcttgtgctctgctgctggtggtcatggaagtgttgtagtggtcacaactcggagccaacaagtagcatctatcatgggcaccatgagatcccatgaactagcatgtctgaatgatgatgattcatgggaattgttctcaaagaaagcattcagtgaagaagtacgagagacagcagaattggtcaccattggaagacttattgtcaagaaatgcaaggggcttcctcttgctctcaatgctatgggtggcctgatgagctcaaagcaacaactccatgaatggaaagccatcgcagacagtgccagagacaaagatgaaatactttccatgcttaaattaagctacagacacttaccatccgaaatgaagcaatgttttgccttctgttccatattcccaaggaaccatgagatggacaaggaagtcttgatccaactgtggatggcaaatggtttcatccaagaagatggaataatggatttggaacaaaaaggagaatacaccttccaatatttggtttggagatccttcctccaagatgtcaaagcaaagaaaactctggaccatttggcagagctccagccgtcgaccattctacaaaaggaaattatggacaaggcattaccatatgagtccattggttgcaaaatgcacgatttgatgcatgacctagcaaaagacgtggcagacgaatgtgtaacttcagaacatgtacttcagcacgatgcatctgtcagaaatgtccgtcacatgaatatatctagcacttttggtatgcaagaaactatggaaatgttacaagtaacatcatctctccgtacttggatagtgccatcacccttgtgcagggatctcaaggatttaagcctggcatcattaagaacccttgtaattgaaaagggaatcttccattaccattcggttatgtctaaccatgtgatcacttattcgaagcatctacgatatcttgacctatctatgtctcaaattgttatgttgccaagttcaatatgtgtgatgtataacttacaaacattgagactcaatggttgcagctttctaaaatatttaccggaaagtatgggaaaaatgaggaagctcctccatctttatcttctgggatgtgatagtttggtgcggatgccaccaaactttggtcttttgaacaatcttcgcactctaacaacatttgttttggacactaaagctggttgtggaattgacgagctcaagaacttgcgtcacattgccaacaggttggaactgtacaatttgagaaaaattaattgcaggaacaatggaatagaagccaatctccatcagaaggaaaatctaagtgaactactattgcactggggtcgtgataaaatttacacaccggaaaacagtgcctacaatgaggaagaagtgttggagtcacttacacctcatggtaagctcaaaattttagagctgcatggatatagtggcctgaagatcccacaatggatgagagacccacagatgttgcagtgcctaacaactctccgcatttccaactgtttaggatgcaaggatctatcaacactgtggttatcggtctcgcttgagcatctgcagttatcccgtatggataatctaaccacattgtgtaagaacgttggtgtgggagctgaaggatacaccatccctcagcaagttttcccaaagttaaagtctctgaaactagagttgttatttagcttggagaaatgggcagaaaatactgcaggtgaggctaagaatttggttacatttccagagctcgaaatgctacagatcattcgctgtagtaaacttgcaagtgtcccagactgtccggttctaaaagaactggacagatttggatcttatatgcttgcaatgaacgaactcacacatctgacatcattgtccaagctcaattacgttgcaaacagtctttgtgattgtgtgagcatgcctttgggctcatggccatctctcgtagaactagttcttagatcttcaacacacattccaaccactctgcaggtggaggcaaatcaaggccagctagaataccttcggagtttgagtctagtaaactgcttcacggctgcatccggctcatccgaaatgcgtcttgggctctggaaatgctttgcctttgtggaggtattgcatattcatatgtgcctcagtcttgtgtgctggccaactgaggagttgacgagcttgattcaccttcgacacctatatattgagcactgtcatagacttgagggaaaaggttcatcatccgaggaaaaattcatgtcactgtcccatctagagaggttacacatacaacactgctacaatctactggagatcccaatgctgcctgcatccctgcaggatctgcggttagaatcttgccgaagattggtggcattgccttcgaaccttggaaatctggccatgttaaggcatctttatttgatgaactgctatgtcctgaaagatcttcctgatgggatggatggcctcgtttcccttaaaattttggagattcaggcatgtgcagagatagaggaattcccacagggtctcctccagcgacttccaacactgaaagaactgtccatacaagggtgccctggattggaaacacggtgcagagaaggtggtgagtattttgatcttgtctcttccgttcaacgtatatgcattccagcagcagcgaaaacagaaatggaggaggaatcaaggtctggaatctaacctgaagaagcttgtaaaaaggctcatcccctcctgctgactctcaaatgaggtgcatacgctttgctcttccattatctcactcttgtcaccatgcaaaggtccagaattgtttccatgcttcttcttccat

SEQ ID NO: 9956 - DNA, 79722 bp, Oryza sativa
  unsure (1)..(79722): unsure at all n locations
ccgcgatgccggcgagctggtgcacggtggtggccctggcgctccgccggtcggcgctgagcatcttcacgcactcggtgtggttggtgcgcttgcacgtgcgggcgacgaagcgggcgtcgccgacgacggcggaggggagggaggcggcgacggagacgaggacgacgacggcgaggaggacggtgacggcagcagctggtctcgccattgctgaacccaactcagtttgatcgatgaactccttgattaattactctagttcttgtgtttgttgattttgctatgagtgttctagctagtttgtgtatatataggctttgaaaagaatcccaaatataaaaaaactcattaattgaagcatttaatgtttttttcccttagagcaaggtcaatagtatagccaactactgactccaaaacatctatagtcaatctaatagtctattcatacaatagctaactataaaaatatactacatcattaatacctggtcccacctctcatacacacataatatcttggagtccgtgttacagccgactacaaatctgtagcccgctttcttctctcttctctttttttctcgatatatggttatagccagcttatagcctgctattgtacctgctcttatggaatccaaataggagtaatgcctttgagcatccaatttgaggaatttaatactatttggaagaatttagtgttgtatctttaatgaatttattgccttcaccccctagaaattccaattttcttgaggacttcattgtattttcctcaggaacccaaatgtttgtgtgcatttatttttcgtggaatccaatcttttgctatgaaatttattgtggattttttttctttttgaacccaattatccaaacccaaaccgtgcagaatattaaaaaggtcatatagatagaaagatggtgatttaacattggaagtacacatcttagagggacgtgactatacaggtagtggtagctccatctatgttagaccctatccacatatatttcaaataaaattttctcttaaactactcattcgatcgacgatccgattacaccgttgtgttcgtaataattactccctccgttttttaatagatgatgccattgacttttttttacatgtttgaccattcgtcttattcaaaaaatttacgtaattataatttattttgttatgagttgttttatcactcatagtactttaagtgtgatttatatcttatatatttgcataaaatctttgaataagacaaatgataaaacatgtgagaaaaagtcaacggtgtcatctattaaaaaacggaggcagtaaatctttataacaagatctcacatgattatattttgataaaaaaatataaattacttttataatatatctaaattacttttagatttcactaaattacttcttggatatataaaagtaaattcaataaagcctaaaagtatttacatatattatagaagtaacttataacaaaaaaataactttaatgcatgcctttttttttattttggacgtgactacacagctagtggtagccggtttgtattccttctagtgtctcatttcaacttgaaaaatgcaatagtatgtatcttttttaatctctttaataacttatatcttttaaatcacatattgtttttaagatatatttatagagagttacttctgaaccatgcaaaagttacttccatttaacattgaagttatttttaaaaattgttaaactttcatgtgttgatctgtgctgattaaatttaatttctagatagtcatatttttatccctacaacaaatttacttctaatgtcgtgacaaagttacttccgttttattttaagttactttttataatatatgtaaattacttttagactttattgaatttacttttatatgtctaagaagtaatttagtcaaacatatgataaaagtaacttacatatgtaataaaagtaatttacaaatataattttatttcatcgtaatataatcatgtaagatcttgttctgaagatttaattgcaatgaacacaattgtgtaattggattgtagatcggataagtaatttgagagaaaattctataaaaaaaaaatagacatgcattgtgtgcactagtaacaactggaccttttctcacgtaactatactagcaacactggaccttctctcacgtactatagcactggaccttttctcacgtatgaatgcatcgctcttttaacactaaatcgagagcgctgtcggtttagattttgcgatcttagagcttatactagttataagtaagattggagctagtagtaaagtataggtaagctctgatccaatattgagcccctgagctttactcctttgcaactatactcctgtgcaaacagttggtgatgattcataactgctgactgaaaatggacgttagatgtctatgatatgatctcgttcagaagcagaactgcagaagcataagggtttgttcggttcatgcatgatcctgccatgatgcatgccatggcatgctcagttcgttgagacacattcagaatatggatggatcaaattgtcagacaactctttttatttaggagtacattttatttccatccaactagatggtttgatatggacacaaaaaatatctgaaactctgtgttgatcgttgttattaatttatctgaaaatcaatacagggatttgatgcacaaatacttgttacaaatttcacaccaagcacaatctatccaaatacaaaaatttggctcatacatagctcattgctaacatctatcatcacttgtacgtaatgggcatccatgtacatcatcggaatttttttccccaatggtttcagaaattacggcgtaggaatgaccagttgagcctcttgatgcgaacgatgcggttgagctcctcgcgaacggagacgagcagcacgtacgcctcacgtgcgccctccacctccacgtccaccacgtgctccaccgtgccggagtcggggtcgtagtagccgccgccgccgtcgaccacccgcacctcgccgccgtcgaccaccgccacctccttctccgtcgtcaccgtgagcagcagcacggccccgtcgtcgtcgacgtactccacgcaccgcaccgcctcgcggacgccgccgccgtcgtggagcgccgccggcaccgtcctctcctccatcagcgggaacacctcgccggcgatctccaggcactcgcgcgcgtcctcctcgtcgtcgtcagggacgaggcggcggcgacaatcctcgcgcgagaagaagagcggcttcccgtcgtactccacgcagtcgcgcacgacgccgccggacgtcgcgacgcgccacctcgtcagctgcggagcgtacagggacgccatggccgcgcgccgccggtgacgccggatcacaccggagaagctaagctaagctaaggatcagcaagtgcaatgcgctctgatcgatggcgacgatgagcttgcgatcgaattgcttgagctctcatcagggccagcatctgaatttatcatgagcaccaaactcagtgtggaattcggagtcggacaccgattccgagacacagtcgatcgcggcactgccgctcctgtgggacccacataatgtattctcctggagcccatgggcccatgaccagttcagtgccatcttgggcttcgagtttctattctccataggaataagttcatcagaggtcccttaacttatcaacgaatccaattttcgtccttgaccctcaactatcataaccggtgcagataagatccctcggcggtttcgatggtggttttggctaacgtagcgcctacgtggttattttgactcggtcttcatccgacgtggcactgatgtggcgcttaggtggcaattcagtctagaaaaataataaaacctgtgggacccacatgtcagtttcacattcaaaaatatatttaaaaagtgggacccacgtgggccccacatgtcatcctctctgtctatcttttttttttcctttttcattctttttcttcttttaagatggcatccggaggccgatgcgagcgccgcgccggcggagagggcggccgacgggaatggagcgacggccggcaggagggagggagaggagtggcggccggcgggtgggagggagaggaacggcggcgcgcgccgcgctggcggagagggcggtcgataggagcgccacgagggaggaggcgagctcgtcggggcggccggcgggagaagaggcagcacgcgccggccgacgggagggagggagaggagcgggaggtggctccggcggctgtgggcggaagaggaaggggcggcgagaggtggccctggttgcggctgccgttgggagaggagacggcgtcgatggtgaggaggacgctcgcggcgctggagacgcggtcgctaggttggtcgaagggtgagaagggagtggcgggggaggtgacgtcggggcgcactagtcacggtcggcgagcgcggcatgcacgtggcggaccggaccgagaaaggcagcggggacgacgacgagaggagatggagcgcgaatcgggacagtagacggcggcggcgtgaccccggtgtcgaggccgatcgaggtcgagtagcgtgaccccggcgtcaaggtgcgcggcgacggcggtcgcgtccccctcacctgccaactcaggatatctggtggtggtggtggccggcgacgtcacactacccggtctaggaggagcggcggcgcgggcggtcgtcatcgccggagttgcgcggaagatggggagttcttgttgttgccggacgggcggcggccggaggcccggagcagagtagcggagcaggccaactttgccgctatggatcgccgcggccacctcctcgctggccatcccactcgaacgccatcttcgtgcgcgctcgccgcgggccactgtttttctttttatctgaccgacatgtgggccccacattttgtttttattttttatttttatattttacttccagtgccacgtcaccgccacgtaggacgaggaccaagtcaaaccggtcacgtaagcgccatatcagccaaaaccaccatcagaaccactgagggacctgctttgcaccggttttgatagttgagggacctgttgtatctggttttttctggttgaaggacgaaaatcgaattaattgacaagttaagggagcttaagtgaacttattccttctccatatattgggccagatgactaaatgggccggacacagactttctttctgctgctctccctgtggtctactggtctcgtcgcagagcagcagcatggcagttggcctgaatgcaacgcagaatgcttactgtactacttgcttattgcagcatattcattcagggtttcagaaattcagtctcagaatgcaaacagttggattctctagaaatttcaggaccaacacatgtaatcatcgatatgaagcataaatcgcattgggttaaagttcaaagtcaaggatcacaaatttgacaacaaatcacggaaactatcaccagttgttcgagcgtagccagtttgcagtgccatatatactgccatctcttgtttccatcagaacctacaagctaggaggagtaccgattaaacttgctttgtaattgcatcccaccaagatatagttatgaattcatgacgaggagcagcacaaggcttgcattgcatggctgcatcatagcttaccatactccataactgttactcctagcccatccatcatgatgcatatgccttgccatgctctcttcagacttcagatcatggattgattcatcgatcgtttcgtcagaaaccttagttccccaaaaaattttcctaaaaacatcacatcgaatttttgacacatgcatagagtattaaatatagatttaaaaaactaattacgcaattagaggaaagattgcgagacgaatcttttgagcctaattattagttcataattagccataagtgttacagtaacccgcatgtgctaatgacggattaattatgctcaaaagattcgtctcgtggtttccaggcgagttatgaaattagttttttcattcgtatccgaaaaccccttccggcatcctgtcaaacatccaatgtgacaccaaaaacatttttttctcgaactaaatatgcccttattttgatttcccatataggattacttcctagtgccattcaagcaacgatcactgttcagtaacagtacatcatgtcgcactctaaaaagcacataatttatctgaaactctgagtagatctgttgtttctttggagtaacagagattcagacaacagaatgatcaatgcagcacttacaggtaggaaaaagattggatttggggggaattgatgcatgcaagatgggagtagataatgctctgttcagaaagtcagaattccatgcccccacgcatgtgacatgtagcaataccaccatccatatccactgcctactcaagtgttcctcatcaactgccattttctccttattagataatggaataatcctatcaacagtccatggaacacagtaatttcacagtacctacctaccatgacaagtcataaatatttctaaaaacattccggtgttccaaatggcacattaaatcctgaattaatgtgcatgatggatcaatgggacagatctagtacatgattaatatttcaaaacaacaaatttatctgatctgtaaaattatactcctactcctgtttatttcgttacggttgtctgcatgcagtgtgatgcttgcctgtcatccagtgattattgcagaagcagcagcagcatcacattcacatcccacgttggcgccgacatcctgtgcagcagccacatgcgcatgccaaaaccgagaggtattaaaaaggagattaacttagcataaatccaagattaaatccgtttttgtatgcgttgagattggtgggaggctgggagaaagcacatgctcaccaaaccgtttttcagttaagccacagttgttgtgatgtgtgatgatctatatggaccatccatgcagggctaggctgcagccatccatgcatgcatgaaccaatgcaaatgcttttgataatatgcagatctgaactggttaattatttcccagaaagctactacagcctaacatctctcactctcaccatcatgggtgtcacttggttgctttgctgccagactgaaagttttaactgtccagaaactagaagcagtcgagtctgtctaattactcttgtattttggttatgtacttttgatttagatgtagaggctgggttttaatcaattttctaaaaaaatatatacagaaggtattgtacatatggatcaagtggttttacttaactcatctgaaagaatgaacgaattaagcaggtttgttcttggacagtactacagtgatgccttgcaaattgagcaaaggcaggcaaaacaagtacataaatttccccagattaatggagtgagacagctaatagtactattatggtactgttagtaccttgctgccactaattcgaggccattttttatctgactttttgtttcttcgagcacttgggttcagaaccgcatggtttttgtttttcgtttcgagaaaaagtggagctctgttccttgcttttcaagtgaacttctgcaatttccatcctgttctgcttcagaattttatttgtacatacatgaatgtgaaagatatcaaatgtgtacacatgtttgtagtcttgtagagagtatgatcaatgatatcaactagctgctgcattactagaaccacatgcagataaggtcgaactaaaccaaatcaatgataaaattttgagttattaaaactaagtactttggctggtgcaatgatatcgacggctccaatacacgacgacataatacaggcataaaaatactctggcaattagtttaccaaccggcaatgcaaattatacgacagtggttaggagatccctatcaattaatcatcggcagcgactgtattattctgacgcttgaccaaaatgggggctggcctgaacattaatcattttcaggaaaatgtacttatctgaaatctacaaaatatcaatgtgtttggttaaatttaaccctttctataacatggattagttggagtacattacaatctgaagtcaaactggagtactgcagagacagactgtcggtagtccgatttttgattctgcgtacagtcgttgaccaaattagattggaccatttcatggttactgcagtctgcaggagaaagaaaagaacacttgatctgcactcaagcttgggtgcttatcttaagtcacaaccaaccacatcttaatgacctgatgaatatgagatgagcttggtgcttttatgagaaattgacttctcccaggaggtcccaccatgtcagtttctaacccacaaattttgtacaaaaactaaataaattcttgcaaaactcctactattactacaattttcttagacaacagcacacaaaaccttactatatcaaatactctatccgatccaaaatataacaacctaatacaaaataagacacgtcgtactactacgaatctgaacaaaacccttgtctagattaatatttactagtatctttatcttaatttgatcatcccctaaatagagggcatcaagaccaaatacactaatccaacattctgaaattaatcctcatcgatcaaaggtgctccgtcgcttcatgttcaacaagttaattcacactttaaatgttgtatgggttgaactaatagaaatcaatcttgatttgttgtatgcatgtggggcattcacaatgcacatgtactctttacacaaataaaaaaagaagcaatttattaaataattattattttgaaaacatcttagatgatgattaaattgggatgaagggagtagaatatactcctatctctacttcgggtgttatattttaggttggaggaaatagagcttaagcttgtaatatgctccctctatcataaattgtttagaacacgatttttcttttgctttaaatccaagtatgccaggaaatatcgatgatcgatattttgaaagagcaatcgaatctcgttctaaaggtcggatatttatgacgtgtattagggcttttgcattgccattgtttacccaaatgttgtaagcataaaaccatgtcaagattgttttttaacttttgggtgaaaactttcacagttggagcagtaactaaaagaaaaaaaaaaggctttccctttctccaaattgtccttggaactccactttgccccattgaaaacgacgcctgacctcaacaatagcaccacccaggcacccacccactgacttcccgggccccacatgtacaatccctacaatcgagagagagagagagagagagagagagagagagagagctcgaagcttttcccaaataactttgccacagtgcctcctgcttcccccctgtgcttgcagacttgcagcgcagagctcagcgtagcgtgctctcgcctccacactccacaccacaccacagtcgcctctctcctctttcaccgagaagcgaagcgagagagagactggcaccgccgcaagaagccaaccggcgggggagggagaagcagagcaagcggcagaaagaagaatcattggttaggctctgcagaggagaggcggcactgcactggaggtgagaggctgagaacgagaggtagaagaagaatcgggagaaggatcgtcttcacgggaggagcaaggaggggataattaggctcggattgccattaggctgaggggggattcgcgaggcttgtgttgagaggcttgagaggtgtgtgctcgcgtccctctgcttcttcttcttcttctccatcttactgtattctttatgctgcttctagatttgtctcttgtatctgtgatgttgatggagttcgtcagaaatgtcccttcttttcttctcttcctcccatgatttcttcgagcagcatctttctatattctgttctgtttttcccccctctgaagtacgttttggaactatgatgattccataacaagttgctagtcgaagattgcttgttactctatcgatcaatggcagttctgcagctgctgcttaaaatgggttcttttgctcaagatttgattgtgctttctccttctgtatctctgttggtatatagttctgggacaggtccactttgattctatcatgggactcctatttgattgtgtttgaggtcctcactggatctgctcacaccttacttgtactcgtatagtatcccattcggattgaattaaatgcatttcctagaaaaaaaattgctctacttagtccttgctccttgcagcctccatttcgagtacacctctatttattcgatgcttgacttcattccaagcagtattgttgggcagctaggtgtacttgtcttctcctttctgcactcaaaatgttgtagttaatggcacctttcgtgctcattgagtttggtatgctttttatggttcagcaaaatgggagtagcaaattgttgtgctttggtttcaattccagtgacaatttccagccatattactagttagcatttactgacaaaatgcattggtttcgtgttcactgtgagccatcaaaacggtttgtgctaccgacatgttagcctggattgagtttcactgtaaagttgcaacctttattacatttggttgttggtgatttcattttcgttaggactacccaggttgtcgactattaactcattagacttttgtcactttcaagttctaataattctttgaagtcctctgtatgattactgtgatttctgaattgtgcttaacatttgcaggtaatgtgctttagagtcgacagcaatggcttcgctggtacccggggtccttctcaagctccttcagcacatgaacagcgatgttaaagttgccggcgagcaccgttcgtcccttcttcaggtggtcagcattgttccggcccttgcagggagtgatctgtttaccaaccagggtttctatctcaaggtgtccgattcctcgcacgcaacatacgtttccttaccagaagagcagcatgatctcatattgagcgacacaattcagttgggacagttcatccatgtagaccgtcttgaggcagccactccggtgccaatcttgaggggagtcaggccagttccaggtcggcatgcttgtgttggcagtccagaagatcttgtggtaacaaactccacttttctcggaagtaagaaggcacaacaatccatcaacgggtcaaaggatgccagtactttatcactagaaaaggagcagagcaaattggagaaattaaaaccttcagtgaaaaacaatggggcagaaatcaagaaaccacagttaaccaaatcaaactcttctctctcgaaacaagcattgaatagcattatagacaagaaggaagtagtcagctcaaagacaaaacctaccagtgctaggtcgacaccttcatctccgaccagcgtttattctctaccggcatcatttgagagattctcgaatgacataaagcagagaacaaaatcaaaaggagcagataagtcatcaccttctaggctttccttgttagagaaagctgcttctgttttgaaggctactacagcagggaggaagtcctctgcaggtaactggcttagtaacaccatgtcaagtattgaatcgggaccaaaggccctgagaagaagctgggaagggaatgcagaagcaaagagcaaaggaaattcagattcaaaggcagccaaaactgagaaaaagtctgagaatagaagcacatcggtacgtgcggttgttgtcaacgcttatcagttatatttgtctacaaatgtggcgtgatttactttattgagtatccttcatgtagtacttaagctattgccttaagcccttaacacattgtagcctttcagtaacatttgaattcatgtttgatcctttattgcccatcttttttttttccaaagttactaatctttgctggctcttttgttatcagactccaagacgcaaaccactagtagaagagaagccattgcataaggatgacagtaagattcagactcctccaaggaagagctcagcaagtgccccttcagatgattctgagaaaatagtgaataagccttcttctcctttgaggaggacgtctggagtttcaagcaacacaaatattacaaatctagtgaagattgcttcaaacagcaaaaagttgacagatgctagcgcttcatggacatcacttcctccttcacttgctaaattagggaaggtatgaatatgctcattcacatgttcgcataggttggctcattgatgtgttcactatggctgtttgctacaataggtctagcattgcaaaaccttttgcaattttgagggtgctaatttaatttttgtctttgcacaaatatatacttaacaaaagaaacgatggacaagccctgttttactatgtgaaatgatggctccagttcccctgggcatcaacaaagcaattttactataccattttagtcatactgtccagaggattgaaggatgaaagaattggagatcatttttctctgtagctgttgaatgcttcattaatgtcatattgaatatttaattgcatccaacttttcacaggagcttctgaagtacagggatgcagcacaaatggctgctgttgaagctatgcaggaagcttctgctgcagagaacttgcttcgatgtttaaggtaattttttcactgacatatcctttgtgatgttgcaactacaaaatctataatcagcaccatttcaaggtattgccaactcctgatatttcaatgatattgaattgtttctcttgagctattccttgacttcttagtctgatactgatactacctaagtactaaccattagtatttatttccaaattgtgttttgtatgcatagccgtatgcatgtgcatcatcgctgtagttattttgagaaattttgttaactttaaggtgaaaattcttcaagtcaactgcttgcgccacactatgctcattaacttgtttccagcctaaatatgtccttatggtgtgcgtaatatgtgcagctgatatgatctgccttggattttcttttttgtacttagttcaaatttgaacccaaagccaaagatttgaatccaagccctccctatccaaacagggccttgaggattttgttgcctgtcctagcatgttgtatgcttacaacaagcaattttatggataagtttcaagtcccacatggcatctaattattaacatggttgataatcgatggctctcttgatgtttatatcacatgggttctaaaataatcgatgaccaatcggcgtcaggtcgaaatacctcagctatagctgtcaagcaagttgcaatgatattaccaaccaccaattagctccctctccttttgatccatacaaaggcttgattatgtctgcacatgcttggaatttagatttcggattgagcttgtgttcctgagtgctctacggacagattgaacaagttcctggagtccatgctagcaatgcatggaacagccagctgttcttgtctgaataaagctaggctgtatagtgtttatcttctcaaacagtctgaactgctgattcctgtatcttgacaagcattgccagacaagaactcctaacaattcagtacttgtcactgcaatgtactatgaaataaagtagtttgcactttctgctcacacactggtgcttgcagtgctctgacagttctgtgcctagtcacaactcacaaatagtagtactatggtaatgtcaaatgtgaccttttaatctgatcaaaatgtgtgttttactgatggtcccatcactgttactgaataatgcatggctgattgtacagcacaaaagttcagatttctgcaacctttttaccatgcactgttgtagaatttgtgtactcctccctctgtttcaggttataagacgttttgacttttggtcaaagtcaaactattttaagtttgtagaaaaaagtagtaacatcttcgacccaagacaaatttataatgaaaatatattcaattattgatttcggattgagtttaaagcgtcgtatgacctgaaacggagggagtagttaggaatggtgcatttgttgccgaaacaacaactaagaaatgtcctgtcactgttgtgttgatctgaatgcttatcaaatgagcttttatctgatcaaaatgtgtgagttttactgatggatcattgttactgaatgctgcatacggttacttctacagcgcagaagttcagatttctgcaacatttttaccttgcttgtgtcgttactcgttacgttcgttgcagtaataacagctaagaacttacctttcactgttgtgttgatctggatgcagctcgtacgcggaggtgagctcgacggcggaggagcagaacccgcagccggcggtggagcaattcctggctctccatgcagccatgtcccgcgccaccgtcgtcaccgactcgctgaccaaggccacggcgacctcgacggcgacttcaccggaccgatcaacacccagtgaagccgcagccgtcgacgaggagtcccttgccgtcgcggtggagcgccggcgccgggcagcgtcctgggtgggcgccgggctcgccaccgacctctccgcgttctccctttacaacctcaagccgccacccgccattgctgcctccccgctggccgtcgtgctcgtcgacgagtcggcgagaccggcggcggcgacgaaggcgtcgccgcccgcgaagtcgcggctgttcccgcccaaggtcaaggggagggtgggacccgtcgctgcggcagtggcggcggcgcctgtccctccgccggagtgggagaggggaggcggcgcggaggacaggggcgagctggcgaggcggctgggggaggaggcgagggggtggttcctggcgttcgtcgagcggttcctcgacgccgacgtggccgccgccgccgcgccgtgggatcgcgaccgcgccgccaggatgctcccgcagctgaagcgcgtcaacgactggctcagcgagatagcgaagcccacggaaccgccgccgccgcaatccgacgccgacggcgaggaggccggcggcggcgcccccgccgttgcgaatggaggcggcaacaccgtgccggaggagacgatagagcggctgcggaagaagatctacgagtacctcctcaccaacgtcgactcggccgcctccgtgctgggcggcgccggcgcggcagcgaacgggaagagggtctgagcgacatgggccgtcagatcttgcacgaatctcgaggccagcatggggaggcttaactggcctcgcaaatggggtgagttgtggcccgctttcgagttctatctagaatttctgcattctctaaaagagcattctaaaatctaaatttgatgcggaaaatgaaaaagagaaggtaatttgtaatgataatgatgtatacagtaatacaattgattgtttcgattgttgaaatgaaaaaagaaaatgaaagagtaaattacactcgtaatacagggacaacaacttagcacgcaacccttgtcaattccttagattgtcttcctttcttcactttcccaactcatctctttcatttttcctacgccttttcaaattactaaacgtgtttttttttaaaaaaattatatacgaaagttgtcttaaaaatcatatcaattctttttttaaaaaatagctaatccttaatttattatgtgttaatgcatacattgttttacgtatggataggagggattcccaactcctttcgtttattagaacaaacttttcaactaataaacagatttgctagaaaacttacgcaagttttttttcccatctacacatgttgcgcgtaagattttagtgatagcttgtgtagtagttataacgtaattactgtcgaaacaagattttggcaataataaaagggggtgactatcaagctaagaaagtggatgggtttagagacaaggaattttatacaggtttaggccttcttattcaagaagtaataccctactcttgtccggggatgattccgccgagtgtattattgattgtatgattgggagaaaaaaaatcgtcccgagaggaacctggacccctccttatataggggaagggatccgtattataaagtacagtccatatcctaacggaacatgagattacagataaaatacaatcgtaaccgactaggatcccgagtattttcttaacatacaagtttagaatctaacccgagtcctcataaagatattctatctatatttggtaccatatatccagctggaatgtaaccgccatgtagatatggggtaaccataatcttcacagtagcccccgagaccttcgcagttgaccaaaatagtcttctcgaaacaaaaaacaataatccgagtgcttcaattcaacttgctccggcttgccgagtgctaaaagactgcgaagggcgaaaataaaacatggtgcatcgagtagatgcacctaattaggtgtagcccccgactatgtgattagttgaaaaactaaacatatagtcaagaaccgggtgactttatatcgaagcatgcatggtactcaataaaatacccagccgactacttctcacttgaatatatcaaggataaaaaatatgaaaagggccgaatgataaacactcaaaaggtccaaaaatagatatatttggtaggaatccgagtaagaaactcttaaaatgatccaccaaatatgataaaggtcatggtaattaagaagttcattagcctaggctataacccttaccataatcaaaataagcatataacatgataggagaatgactactaataaaccagtcatctcaaattaacccaatagcttttgtagcctaaaaaagcttacaaaaatggtataacacctttctgtcgggcaccttttcatgtgcatcataataattccaaagaattattgaatcgcgttaaaaaggattttaacagcatcgggccgcgtcattgtgagcacatattgccaaagcaaaaggcacctaagtccctagggatcacaatgggccacgctgaaaacataattgggctgaagtactgtacaggcccaagcccattagtactcccgataccctaaagacaccgaagtccaaacgtcgtttcgtcttccctgccgagactctcgccattccccactccgtgctacagtacagaaccgcaccgacgaagctagggttcatcaatctgctccaacccaccctcaaaaacttcacgaaatttctccccgcgtccaccgctccgattccccattcctctccagccatatctcggaccaaattaaaccatccagttcacattcatggcggaagaaagagaaagcttcgaaagtcagtgggcgccctccgatgtgacagaagataacctgaaggagatggtggcgcatggcgttctcccagcgaaggagattatcgggtggcgaccggcgttcggcgaagcattcccgacccccgacacacacgaaatcgtggtattcgctcatttcttctatggcggattttctcttccaacctctagattcttccgggggattctgaacttctacgggattagcttgcatcacttgaatccaaactccatagtgcatattgccaattttatccatgcctgcgaagcttttctgggcattaggcctcatttcgccttgttccgccgcatcttcttcctcaagccccagccaaacaaaagcaaaccatgcgttgttgggggagctggtttccaactcagaggaaccttgagccaaaaatatttctccatgcccttcaaaacctcaaacaaaggctggcatgcaaactggttctatgttcagaatcctgagcccgcactccccgagtactgctgtcttcctccggtttaccaggacacatggaactcattgcctatgggagatgaagctgctcaggcaatggaattgatggaacgcatgctaaaactgaaagaacaaggtttgcagggagaacagatcactcagcacttcatcaaaagtcgattagctccaatcaaagagaggtcccgcacaacttttgagtttgatggcaagcatgatccaaatcaggaagatccagattctcttgactttaaggtcatgaaagaaagaatgtacaagatcttctcaaacgctattgttgtcagctattcacatctgctgcccgttgtgccattcaacgcattcaaccctcctccaccggtatgcactcaaacatttcaaccttcctcaaaagtatgcttttaccctctgttaagctaattgaaagtttgaaatatcatgcccaggaatttgctttgatgaaatcggatcctccaattgctcaacgccgatcacctcgccagcagactggtcaggcgagtggaggaccaaaaattcgatctgacgctcgaccaagtgcttccgatccactgttgaaataatactaacagcataactcaaactcgtaggaagccgtctgacatagatccttccgaaaaggaccccgagccgactgacatagaggcaaacctttcaaaagaaaccgggccagctgcagaagatcgtccgagtgacaaacaaccggcaaccgacaatgtagaagccagcaacgagcccccgactgggaaccagtcggccgaaactgaagtcggtgctaaccaggagcccccgactagaaaccagtcggatgcagggtcaagccaaaagattcccgaagttgaagctcaaacgaacagtccgctcgggaaggatgctgacaatgaatcagaaaccagatctcctgtgaaggcaccaaagtccactcgtccccgaccgggaatcatcacaggtagacatgccatctgaaattattttgatccaacagactttatttggctgcttcatcttcgttcatggatacactagggccaataattggtgatgaagaagagatcctccggatacaagcagctgaggattcacaccctccgattctggtcaagtggtgggatgacaacatgcagcctcaagggatcgtgataaataagcaaaaagaggacgaagagttatgcctactgaagaaggcacttggtcaggcaacccgcattgtaaatgtaagccctctggtacctgatctcaaccatcttgtttgccatttaattcatgcgctaattaaactgtcttgcagaggatttatcttaggaacgaagccaaaacggtaaccttagagaggttagtccctcatctcgggaccctcgaagccaccaggaatcgactgcacgaagcgaaacaacttgccaggaagaatgaacatgatctgagggatcggatcgctgatctccaggaatcaaattttgaactgagtggctcatcaaaaggtacgcacaaactctgctcaactgactcatactgttatctttgcaatcttgattaaccgtaatcaatgtagtgcaagctgccaagatatctcagttggaaaagcagattcaaattctggaaaatgacaaggcagaactggcaaaacaaagagacctggctttaaaggaagttgaaggtatcaacaatcaatacctcaaaagccattatcctccatatgctgacttattaatgtgaatctgttgatgcagaccgcaagatcaaatctcaagctcaattcgacgtcctggttggcaagatcaaaaaacttgagggagcccgggatgaggttgctaacgctgctgccccaattgttcaaccgatgttcttcaataacaacggcccgagtgcacttgatgcttctgaaattttcgacaagctgagagttgctccggatacatatttcaagaacatcaaagaagctggaagtatgggagcaagtctggcgttggcgatgaccaaatccctttatccaagagttgatattgatgccattgatggctttgcagacgggatgagcgaagaagctgctcttgacctcatcagtgatgcgcagaaagcggctgacaaaattgctgctgatgtagttgagagattccaagatgtcgaccttcggccgactgggtctgataagtctgatgatgaaaaaactgatactgattaatgtaccaatgattttgacgattaatgatgatggaggcacaatttgtacaatactgatgaatttatgctatgcttaatatcttaacttagttcctgatttcttaaaagtttttgtcgaaccttgttgagcctaaaacccgcaaaagttgttaaaaaactttcagtcctcattgactaagccaaagaaatcaaacagggcaatgatacatcaagaattgggggaaattttttaaccccccaatttaagtaagcaaattgaattataaaaatcacactccattattattatagtagccccctgactgaaaacttcaagaaaaaacttgaagttagcagtcaaagaggaaagatacaacgaaatgccaagcgtaaattacgaaggtggcaatattcaagaaaaaaaatttttttggggtttttttgaaaaatttgggaaaaaggaaagggtacccgttctttcgcgcttgagtcgataagaacccggccgagtgacttcagcaattatgaacggtccttcccataagggagataatttatgccgatcctgtgttgtttgaattttccgtagaaccaggtcaccgactaaaaaggctcgcgatcgaacattccgattatgataacggcgcaacgcttgcaaatatcgagtcgactgaattaaagctgcttctcgggcttcttctagtcggttgatgttgtctactcggccctcttcatagccctcctcattgaagttccgaaatcgtagtgattcaaattccacttcactcggcaacattgcttctgcgccataaaccaaaaagaacggcgactggccggtagcccgactaggagtagtgcgtaaagaccaaagtacggacggcagctgatctacccacttgccagcataggggcgtagtcggtcaaaaactcgtgctttgatcccttgcagtatcatgccgttagcgcgctcgacttgtccgttactcatagggtgtgccacggaggcgtaacaaattttaatgccgaagtcttcacaaaagtctttaaacgctccgccaatgaattgagtgccattatcagtgatgatccgattgggtaccccaaaccgatgcacaatgttgatgaaaaaatctctagctttatctgctgtgatcgtaatgaccggtttagcctcaatccacttggagaatttgtcgatagtcacaaagagatgcgtgtaaccgccgactgcccttttaaatgggccgaccatgtcaagcccccagaccgcaaacggccaggacaacgggatggtttgcaattcttgggctggcaaatgagtttgtctggcaaaaaattgacaaccttcgcatgtccacacaatcttgtccgcatcggacacagctgtaggccagaaaaaaccttgccggtaagctttgccgacaatggtccgtgcagcagcatgattaccacaaataccagaatgtatatccttcaacaattgtctcccttcctccaaagatacacagcgctgcagtattcctgatggacttttcttgtacagtttagcttcatgaataatgtaaagtctgctgcgcctggaaatccgctcggcttcatttttgtcttgagggagttcttgtttggtcaaaaattttatgaggggttctctccagtcggcttcaatcatgcttacgccttgagtatccatggcttcaattgcttcttttctgggcacggttggttcataaagatgctcaacgaacacatcagaaggggctgcttcccgttttgaactaaaattggccaatctatcggctgccttattgttatgtcgaaggacatgggtgagctcgaatccatcgaatttatcttccaacttgcgtacctcttgtcggtaagcggtcatattatcatctagacatgaccactctttcatgacttgattaacaaccaactgagagtctccacggacgattaatcggcgaatgcctaaagagattgcaatccttaatccatggagtagcgcctcgtattccgccacgttatgggacgcagaaaagtgtatccacaatacgtagctcaatctttctccagtcggggaaatcaagacgaccccagctccagtgcctgtgagcctctttgacccatcaaaatgcatagtccaatattccatcttttcctctggcatgtcttcttggcactcggtccactcggcaatgaaatcagctaaagcttgtgacttgatcgaagttcgtggcttgaacgatatgtccaaatacatcaactctaaggcccacttcgcgatccgtccatttgcttcgcgattgtgaagtatatccccgagtggaaacgatgtgactaccgtgaccgggtgactttgaaagtagtgagataatttcctgacggtaattagggcaccatatagtaacttttgaacctgaggatatcttgtcttggagtcggctaaaacctcgctaacgaaataaattggacgttagactttttgaacatggccttcctcttcacgctcgacaaccaggaccgcactcataacctgggaggtcgccgacacatataatagtagcggctcttgcggatgtggcgaggccaaaactggtggagtggtgaggagtttcttgaagtcttcaaaggctttctgtgcttcgggcccccactggaaattgtcagtcttcttcagcagcttgaagaaaggcatcccccgctcgccgagtcgtgaaacgaaccggctgagcgccgccatgcaaccagtcagcttttggacgtctttttgggagcttggcggtttcatgttgaggatggcgttgattttctccgggttggcatgtatgcctctttgagataccataaatccgagcaatttccccgacggtactccgaagatgcacttttccgggttcagtttcatcttgaaagcacgaatgcttgtaaaagtttcttctaaatccgcaatcaggtcatccttctgcttggtcttgacgactacatcatcaacataagcttcaacattgcgaccgatctgagttgaaaaacatctttgaatcatgcgttgataggtcgctcctacattcttcaatccaaagggcatggtgatgtagcagtaggccccaaagggcgtaataaacgaggtcttcaagcagtcggattcttttagttggatctgatgatatcccgagtaacagtccaggaagctaagtaactcgcagccggccgttgagtcaaccacctggtcaatgcgaggtaacccaaaagggtctttgggacaagatttgttgaggtcggtataatcgacacacatgcgccattgccccgtctttttccgaactaggactgggttagccagccagtcgggatgaaggacttccttaatgaagcctgctgctaacagcttggttaattcctccttgatcgcatccttcctgtcctgttcaaaacggcggagtcgttgcttgatgggtttggcgtcttccttaacatgtaaagagtgctcaatcacctctctagggataccaggcatatcggatggtttccacgcaaaaatatctttattattctgaagaaaggtgatgagcgcgctttcctatttacaatctaactcagcgcctattacatcagtcttatcaggatcggagggatctaggggaatctttttcgtcttggcatcactttcttcggtcttcgtcagcttggttgcaggcacttctcgctcgcttgccgtggtcgcagccagtcggatctcttcgcgggcgagagcagtctcgtgggtttgggccatctcgcaactttctttgtcgcatgtgacggcctgcttgatgtcgctccgtagtgatatgactcctcgaggaccaggcatcttcatcatcatgtaggtgtagtgtgggacggccataaatttagctaaagccggtcgtccaagtatagcatgatatgctgtctcgaaatcagcaacttcgaaacaaacattttctgtgcgaaaattctcccgagtgccgaaggtaactggaagagtgatctggccgagtggtgtagctgacaatcctgggataacaccgtggaagggtgcattactcggctttaattccgtgcgaggaatctgcatatcgtccagggtcttagcgaaaaggatgttgagtgcgctgccaccatcgatgagagtccgtcggagcttgacattgcgaaccactgggtctagtactagggggtatcgccccgggtggaccactcggtcgggatgatccgagcggtcgaacttaattgctatctctgaccaccgaagatattggggcatgttaggctgaaccgcatttatctcccgttctgtcagcttttgttttctcttagactcataagccaggggtccgccgaagatgtgattaagttctttgcgatgatcttgaaaaccagtcggggcatcgtcttcatcatctttcttctttgatgtgccttgatctccgtctgaaggtttacgtgcgttcttgacgtattgctctgcgaactgtttgtagacgaagcaatctttggccacgtggttggagttgggatgatgcggacattgggagttcattatcttgtcgaaggtgttgacgcggggacgttgtcgggaagatagagaggtggtcgccacaggttcttcgggcttacgcttgcgatccttgtggttgttacttccactccctcctacagtcggcgtgtccttctttggcttccaagtggtgcccgactgtttggacgtggtgatagcatcttcggctttggcatactcgttggctttttcgaacatctgcttaaccgtcctgggaggtttacgtccgaacttgccgactaggtcctcgtggcgaatgcctttagtgaaggcggtgatgatgacgtcgtcggtgatgtcggagatcttgttgcgttgttcggagaagcgtcggatgtaatctcgaagggattctccagacttctgaacgacgttgtagagatcaaactgtgtgccgaggcgttcgaaggtgccctagaagttagcgatgaagtaatcacgaagttccgcccatgatccgatcgtgccacggggtagtccgtggagccaggatcgggcggagtccgctagggccacaggtagatagtttgctcattgttatgtcgaaggacattttaattatactatcattatatctgaaagttttttttactaaaaatacttgcggcagatttttaagatattctcactaataaaattgtgccatccctctcactacacacagagcgggcaacgagacgcacatgcagttgctagctatcaacggtaccgagatagagtattattaggtactactccacagagtgttagtttagtgatattatacctcctaaatcccgattagcactagaaatacctcgacctcataataccttttgaagaaccgaaaatttcccttttcctactgtttctgattttacactaagcacattatgttcattcggcaacccttgtcggttccttagaacaactacatgacagaactaataaaattttgttttttttttaaactaggaagcagagctcccccaatttcattaagaaaaatgagagctacaaaagtctttacatgctacttaaagcagtctaataataaaattttgtactcaacacataacatacttgcccacaatctacagccgaaaagaattaatggtccctctagatcgatatactgtatggtaaatcatttgcttcatcatccttcttgtaaaagatgtggaaaaccagaagaggatgtatatatatatatattcctatgcatgctttcactcatcatcaagacctggtatgtacaataagttgacgtcgaacataactgggctgcttggagccactcttggccttccaggagctgaagtaaggcccttcggaaatgctagctgttcagatcaagaaaaacacgaaaaatcaaattatcaccctcctttcaaatctctgtgctaagaggggaaaaatgatgccatagcaatggctgcaattgtctggccccaaatttaccacatctttcattttctcttgcataatatttgttgacattggggagtttaggctacttaccgggccaggtatgtataatcgccgtagtcctccaaccttcattgacaatatcccttcatcaagtccctttatcacctaatgtttaccaccacaaatggatgaaagaaaattgaattgtttttaaagcattttagttagaaggcgcataatgtgttttccagagggtagtttggttactgatagtgtaccaaacattttcttgcaaaattacatatggtgaattcatgttttattaataatacgaactatacatttttcacgtagcattatgtatgttacattagtgtatttcatgtgcaatttacacattagacataccaagagttttaatttgaaaaccaaaaaccagacgttaaccgacatgttccaaaaacttgttagcagcttgttaccctcaattactagtttaataaaatattttggattcaatctttttccagataaaagtggtaagcggtcggttaccctttctcaaagggaccagttggtattttgttctgaaactaatattcaaaacctttgttcgtactctttaacatttaagttttaaatattaattcaaattgttctgggctggtataccgatagccagtcgatggcttaggatcggtaagtaccagtaaccagccgagattttgattcattgtacaaacacgatcaaatatataaactgtatatgactgtaaattgtatatttacagtcatctacagttcatatatttgatcagtttgtaattttattactcacatttcagtggtaatatttcagaacacaggctaccaagtaccaacaggaatatgtagggaaaaaaaataaatacctgtcctgaaccaacacggaatatgtagggctgccccttttccagagaactgtatacaacacagacacacaagaaaatttcagcttgcagcttgcaagtgtacttgaacagcatcaacttaatctcgcctatataaaagatggttagtttggcatcaaaagctcagttcgcacctgtcaaatatctgtccattcggtaccatggcaacataatttgcagcaacctaaatggtaatcaaagagagaaaaaaagaaacagattaagaacatgatcatgaacatctgcactgtgagaaatcaagtgagcacctggaagccaatgggtggacttgggccttcacccactttgatatccttgtactgaagaccagactctgtagtcaccatgggcaccttgggaatgcatcatgatgagttagttgctgagattagcattgattagatgattaacatttactaatctcatcgctaaacatgatcatgtatgtaatcatgcatagctcaagcagggttgaaaacttgaaatgttcctaaccagaaaacagatcgatcaccctggcaagaaagaaatttcaggtaaattttttttaaaaaaaatcgatcagagtaagtacattttcgaggtccttctcgcaggcggcgtcgcagagcttgggcttctcctcgggaggcagcccggcggcgagggcatcatcgaacgcggccaggccgagcgccagcgccgacgatacccccacggcgactccaagaacgctcctcctccgggaccgggtggcgctggtacagaccacgccgccgtcatccactccgcgctgctgcggcggcggcgccgttcccgcctcaccggcggcctcgcacctgcagcagcagcagaagcatcgccgcgccgctgaactcagcgccctgctgcccctgaacgccctgccgtcgggaagccacggtttggaggaagggagcgggcggcgggccgaggggaggaggagcggcgaggcggtggcggtggaggaggacgaagcggttgcagccatggtggaagaagaaggaagaggagaggaagacgaaggaattaagcaggtacggatcaggagacgtgggagaggaggagaatggatagcgcaacgacgcatcgcatcgcatactgggctttgcgcgcggtccgcctccaccactcgctgcgtcgggtcaaactgaaatctttcgggtgctgctggtccacgtgtcactcacagagggtttcgatctccatctcgcctgcaactgcaaaccacctcgctggctgcctcggcagcatttttcaccgtagtccacgaggtgtaaaataagaacgtattatgggatcccccatctctatcataagacagtcacaaaattaatttggagagaaacttcagctcgatcaggtcaagcggagattgtggtgcgtcatgctacctgtgaataatctcaagttctgaactctaaacaagtggttatcacaagttagaagaaatacagtaagaattctgaagattaatttgcctgtattcattggtgtcacggtgactctggtattggaacatttctttgcagtaggtagtagcaccatgccaagccatcagattatttttcataagagtgaaatgcacatacagtccttaaactggtacggatatatcatttaggtccctaaactctcaaaatgaatttttggatcccaaacttgtaatgagtgtcatataagtccaaacgggctccaactcgctccgtgagatgacgtggcatgccacggtaacgcttacgtgccagtggatccacatgtcagtcatataaaaaaataaataagagaggagagagagagagagaagaaaatgatgtttttaattttgaaaaaaacaaatgaaaaaagagaggagaaaaaaatatgtcatgtggttgacatatggggtccactgacacgtaggcgtcaccatgtcatgccacgtcagcacacggagcgggttggaacacttttggatctatatgacatccgagacaagttgagggataaaaaattcattttgagagttcagggacctagttaacacacccacgtaagtttaaagactgccgtgcactttactcttttcataattatactttcgataataacatgtgtaaactgtcagacagaaaacacatgatcagagagtaaaaacacaactgcatacattgcaaatttgcgattatgcagctcaatcgctggttcgtaatccctactaccaccgtagggtttattcttctgacataaaacataaaaacatggccagattgcagggcttggccgaattattgtacaaacatcatcatcctggtagtaatatatatagttgatgcgatcaaacaagctattcgagtcaccagacgttctaataaatactccctaaatatttgacaccgttgattttttttaaacatgtttgaccgtttgtcttattaaaaacttttgtgaaatatataaaactatatgtatacataaaagtatatttaacaaagaatcaaatgataggaaaagaattaataattacttaaattttttaaataagatgaacggtcaaacatatttaaaaaagtcaacgacgtcaaatattcaaggagggagggagtagtagtgtaaggtttttccaagtgatagaaagtgatgatgggactcctgacagcgtggtgccaatgatactctgctgatattgagcttcctctcacattatctaattaaactgagcttcctctcaagtacagcaaccaaccagttgcatatgttgtcagtgaactgaaaataggctctcctggaagctgcactgaatatgaaggtggttgaaacggtgcagaatccaaacgcaaatcccagcagagtaaacatgtatgtcagcgtgtcaaaaatctcatgatgtttgtgtttgtcgctgtccttgtggcagcttcttgtaagtggagccccacagagatcttcatttcccaaaaaagagtctccttcaaaagtcataagttggtttccatatggtatctttcctgagaggtggttgtaggatagattcaggaagctcaaaaataacagtgacttcatgctctgaggaattgggcctgatagatcattccatgagagatcaagtgattctaaccaggccagatttccgattgtttcaggaatacttccctcaatgtgattccttgatagatttaaggacgctagtctgtaaagatttcctatttcactgggtatctccccggttaaatggttctctgaaagatcaatactggtaaggaggaatgatatcacgaaagtaagtctgtaacctctgaaggttgcctgtaaagtatctttgtacacagaaaagtaagcgcccccaacgccataaaccatgaattggaaaaaaggcgatgagtcccattctagatttcgtgagagaaaggacgttagttttcccagagaacgtggtatagagccagagagtttgttgttactaagatccagatattgaagggcatgaagttgggataattcttcaggtatttcaccggaaaactgatttgaccctaaaatcagaagtagtagagtttgtaggccattgcctatccatgttggtatgtatcctgacaaattattctctccaacgtcaaggactaacaatcttttacatgactgcaatgaggtgggcaacaatccagataagctgttcttgctgagatgcaatgctgtaagggaacttagagagcccatagtggatggtatttcaccccaaaaattattgctggagaagtctatgacatacatactggaattcatacgccaacaatttggaagttcccctgaaagattgttattggatatgtcaatcagttccattgatattatgtcacatagatatgccgggattactccactgagagaattatgagagagcgacaggtattgcaattctttgtctccaaagctttgtggtaatgatccagacaagttgttgtgggatagatccagcactcgaacactatttggcatatcaggaatgtatccctcaagttgattatgcctaatgttcagagttatcagcatttttgatcgcaccaaacttgcaggcaactcaccagttatgttgttcatcgagacatttaagctagccattggcgaagagaagttccagatccaatctggcaatgcacccctgatgcctgcactgccaagatcaatcatcttgattctagtttgtgattgcagccaggttggaaactgtggtccaaccaggcaaccatgcagtcctagctttgtgagctgaaagggtggaaaccagctatgcttgactacaaccttgaaagaatttgatgctaaaactaaagcatccaatcttgataaattggtaaagtggagttctgataattcaccaataagtttgttgaaggaaatatccaagtatgtcaagttcgatagcctgctaatgctagttggtaatactccagataatgaattctcactgagatcaagaacttctagacttgccatgtgctcgcaccaaccagatagctgtccagttaatttgttatcagcaaggttaaggatctgcaacttcttcatgcagggaaacatgctccttgctgcttctgagagatttcctgacaaaatgtttctagaaagatctatgtgaactaagttgcataatctgctcattgaacgtggtattgctccattcagcttgttgttccctagtccaataaactgtagtgctgctagtttccctagctcatcaggaatcctgcctgaaagttcacaactagacaggtccaaatctgaaagggaagatagattccaaatccaatctggtaaggaagaattcagttcattattcttgagatcaattactttaagggcagtgaagttgatctgagaaacagaattaaggtccgtagctggaaggcttgcatcattcaagcgaagcacttccagcaaatgaagcatattcacagcctgcagccaatccacagaagcagcaaggtacaaccaactaaggtcgagatacctcagggaagttagcttcgaaacccactggaaatcgtccgcagtgatcacatgagaaccagatgagctcagatcaagaaagctgagccttgacaagttgccaagctgaggagggacagtcccaccaaaaccagcatgcgagagatcaagatacctcaacatcttgaaacagccgatgaattctgggatgggcaccccaccgaagtcactttgactcaggttgaggtacaccaatcttgtcagaccagacaacgatggattgatctgaccattgagagtgtactcgccgaggtccagcttgatgacatggccagtcttcttgctgcagctgacaccactccagctgcaacagttctcgccatgccatgagtgtagccgcccatcaggatccttgatactggtgttgaaggcaaccaaagcatccctctctgtggagatgcacgcagctatctccctgaaattgatggttaagcacaacagagccaaagccataagcaatccattcatagtattttccatgttggtggataaaactgtcagtactcagtagctggtggtagaatagagaagataggtcgagttgcacctaattggataaatggaagtgctgagatgaagacttgaccagttgacctgatgacctctggtcttcgctgctagtctagtctttctgcatttttagtcatctgaaaaacttgctttcctgtgtattaattgcattttgcagtaactggcctttttggcttgacggccagggaggaactgcaattaccgatcgagaaaagggtgtacacaagggatatgtttgctgagattaaagcagtaccacctgtacactctgggaggttacaaacttacaattactgcactctaatattttttttgattgaaaatactatcaggccttgcctatatattaaaggacaaagagcattctttactgcactcaatattataattcactcaagaaaaaccaatgttgtggtcagcctacccaggttcaattcaagtcgtaggattggctaggatgatgtagagctcatgtttagttttcagataaaaaaggcaagttcttactcaatttgcttttatacttggattcacaaattgatctcctcttcccgggaaaatctacatcttgctcattcatatttattggcctgaaatttctggtagatctaagcacggcattctcagcctgactaacatctcagaaaatgcaaatgttactgaaacataaaccaaccccctcctgctaagagcctaaggcactagggtagtgaagtgaactaaactacgaaaggattggcactaacgaatttatagcgggatgtacagtaatccggaaacagtaaatcgtagagaggaagaagcctgtgcggccataaacctgaaacccgaactcccaaacccctagttgcgtacctcgcagcggagaccactccacgctccgccgccggagacgtcagccggcaagccgccacggcgaacaggcagcacggtgttggagaccagtttgccgccgtatccgctccacgggtagctcggcgaggatgagggcagagcctactgtcggaagcggcgcttcggttgagggatcttcaggtgagggtacctgcggcggtgaccggtggagctacgcctggagcggcggccgccggcggcacatgctcgccctattctattcgagaatttttttcggttttagattttttttaaaaaaatatttacagaaataatctatcggctaaaaaaattacaaaaatagaccctgccgcccacctctggggcggcaagctgacgtggcaaacgggggaggaacgggcggtgacggagggagggtttttttgcaggaaaacccttgccgccctctggtggggcggcaaggggcccgaatacaaaaaagccagtcggggctggctattttgcaggcggccccttgccgccctctggccggacggcaggcctcgctgcctataaaaggcctgctgcccagcccccagccctcattcttctctccttaattccagtgaaaaaaaaagaagagaggggaggagaagagaagaaggggcgaagccctgccggattcagacgccgatttcaggtaatattcatagatcctatatgtgactattgagttaaatagtgtgtgttctttaaaaatttgtttgaataaatgcattatttttttgggttttagttgtactaatctagaagtgcgtattgtagatatcggtaactacgtagatctgctagtttggaatcaatacattaccgttgcattggcttacacaagaagatattacgttgtagatgtttattgcatgaaagagtaatatgatctagttatttcgttgacagatatgtcgaacaaacaaatattccaagtttaccatggaccaggaaacgtccgttacgggccaactggggtagatctgtcagattttattgtatcagaaaggggaattgatagaccagctgagaggagtgtaccttctataaaaggatggttaatgaggggcttgagagttgatccacagacaagtgacataacaatcaatgttatagtaagtcggacaactaagggtttttattgggaactaatgccagttcaaaactctcgagtgtggagatggtatttggaaaatgcattgcaacgcaagtggcctctagctttggttccgtttgttcacccgaaggatccaggtgtgcagatgaacatggatgatggcgagggaccaagtgctgaagtaaacgagacttctgtggaggaggtcaacgcacgagaggacgggggcgtagtagctccagtgggcattcaaccaggtggagtggccgacgagggggagactgtcggtgccattgtggatgaaatggagagggaggattctgacaacgagcgtgtagaggaaggtgattcgtcagatgatgagacggatattaatccagcagaatgggctagtgaggatttttctgggctgatcgtctctgaagaggatagtgtgagatgggagtacaaagaaaatgatgttattcagggagcgatttatagtagagcagaagatatgaaggaggcggtaaaacattttgcagtgtcacttcatagagagtttagggttgccaagtcgaaccggtcgcaatatgaagttcggtgtgttaaggaaaaagatggttgtccctggagagtgcacgcgtataaggggaaatggaaggattattggacagtgtcagtcgttaccaagcatacatgttttctacctggtaatgttatgttatattattgaactctacatatatgttaaattgcacgtcatcgttatgtaccattagtaacgtttgctatatttaaatagcctgtactcttgttgtacataattaatctcatgattttattactatttcataattttgcaagttatcttttgttttacattactattttttgaattgttctaacacgaaacactatatttttcagagatggcacatcaggatacacctcagttgttggacccggcgatagatcaccgacaccagtctcaccttactgcggtgcagggggctcagcttgggacgttccgggcacggacgtgcggtgagctactcacggttcacgactcctttgtcgagaggtacgaacagtgttttactataagttagttgcactgtaatattttttataatgacatattaatttgttattgcaggctacgtgaggccggcctcctaccgatgtgtcggctggtggaggctgcggccggcgacgcggacccggccagacgatggactgtggacaggtccctcctagcagctttggtcgattgatggaggccagagacgcacacttttcacttgctgtgcggtgaggtagcccctaccctacaggacgtatcgtacttgttggggctaccgctcgcgggagacgctgttgggccagggaccacggctatggactggaaggatgatctgacggcacgtttcgcactagtacagcgcgcaccgcacctcccgctcgagccgttggcacaccaccgcaacaccggacctacgaagaggtggctgcttcagttcaccgtgagtgtttttgtaccgaaatgacaatcgtattacatatttagtccgcagttaaggtgcctaacattttatcgactgcttgcaggttgagcagctacaggcggaggccgacgagtactcctacagccgatgtttggaggcgtacttgctctggctttttggctgggtgatgttctgtggcggtcacgggcacgcggtcgacaagggactcgtgcactacgccaggagcatcgctgacgccgcggtaggcgaggtgcctcagtggagctggggttccgcgttgttggcggctctgtaccgtgcactttgtgagtcttgcacgaagacggatcccagcgcgacctttggtgggtgccctctctttctttctatctgggcagctgagaggattgcgatcggccgccctgaggtggaccagcacgcgtacgaggagtcactgtacgaggagcaaccagaggtcgactaccctacgatgggtactctgtggtgccgtcgtcaggtacgttgcatcgatcttatcgtattgttaagttaattgctaagttcattgtacatcacatcgatcgtctcgtattgcagcgccgatgggctcacgtccaggttaggcggtcgtatcttgagtttgttatggagttcgaccgccttctgccgactgacgtcgtgtgggagccctacagtgccgcggctacccaggctcgtgcgctgttgggtctgtccacactctgcaccagggaccaggcgtactggatgactacggttccgatggtcttcgacatctgcgttgagcttcacgcccctttccgcagttcggcttccgtcagccctttccagtaccgtttccgaccaccgtcccagctgctgttcaccggtaagatcttgcactacgctttccgttgttgcattaaaatctgcctgttcacaataatttgtaacatctgtcgtttcacactaatattacacattaattcgcaggtactcgcgcaagggtcagcagtcagctggcgactggcccgccaagttggcgacttttgttgaggactggttgctcgcaaccgaggaggtcgtggaccacgagggagagccacacactgaggagtcgtaccaggcctacctacgctggtaccagccacgcacccgtactagggtcaccttcgctcccttggagcagcagccccaagttgcgagcactagagacctctatgccaggcaccgcgaccaggacttcgctcgtgctgtgagtaccctgcatcgcaccattcctttatgttttcatgtctttctcttcgtcaaattttacgaatatttacgtacaaattaaccatgcaggtcgacgacatcaaccgggtcgtcgttgatggttcaacgacgatccaacgtttaggcgcggggattccggtacccgtagaggagcacctgacgacgtacacgcggatggtggagtcgatgcgctcgcttctccgagtgctcacctgtcgtgccgacgacgttgctcgggcagacgcagctgtatagcggccacccgtacagactggtccccgtccagctgcgcacgttcctaggccgactccccctccgcacggaggtaagtatttttattactatttctgtacatgcctcgcacatataagtgagccgtttcacttgccgattgcttcagggtttcgtgcaccgttcagcaccccgccttcctcggctaggccttctgttgtgccccccacaggtacttaaaaaaacaacattacttcgacaatcaatttacatacattttatgtcttagcttacaagggtcccgttgtcgatgtgtaggtttcgcccagttcgctatgacgcaggccgcccacttctcccaggctgcagggtcagcgtcacaggcagccggcacgtcgagtcagggtccaccactggaccatgttgggacctcatcggaccgcttgctgccttccaccgtgctcttcgacatcactgacttcgacttcgcttcaggctcgtcagaggacgtcattggcccctcacagctgggaggcgcaccgccggtgcagacgcaggaccaggcgcaggccactcctccgcgggacactcgtgctacccgtgctgtgccaccggatcgtttcacctactcccaggaccacgtgcgagcacaggcccggaggaccaagcgtggtcgcagcgcggggcagggccagtagagcagtcttctctttgtttacttgcttcactttccagtactgtatgcttgtgtaatgactacgttgttgttatatgtgcacgatacctttcggtgcatgcacgactactttctgccgcaccgatgcagcctcctttattcgcgtgtgatacgagtatttgcccgccatttggcgcatacgaccaatgtaactttcggcgccgatcatgcatgtatctttcggcgccaatcaggcgtacccaccataccccaccacgttcacatgtcaggggtatcactcgattttttgcgcctatataagtcgccttaacgagtgaggcctcacaatctttcagaactcagtcacattcagtactctcttccccacttgcttcattacaaatccgaccggctttcgtcaatggctagacgccggggtgttgaggatccaaactggcgtagcgatccttgtgtatacctactaccaccttggtgccagcgtcctctctgcctatgcggtgatcgatgccaactaatggcttcgaggaatcctgatattcaaggaaggcgcttttttaggtgccctaactatgaccgtgaggtattttattatctgcatatgcttattcattctgtatgggcaatcgctttattcttcgtaacactactctattcggcagacccgcactacggcttgtgcatacatcgagtggatcgatacaaaaaatcccgttctcgacctaaccacttgtttacaagaaggtcgctggtatttcgcatccgaaagtaatgagcaatacttacagagaaaagcggcttatgaacgacaatgtcgtgaacaacagagcgactggcgggtgctaactacggcactccctccatgggaagcttgtccaagatgcaggtgtggtgatcgttgtcaggtttttcgttccataaatcctacaacattgggttgaaggttctttgtttgtccaaatattcttgacgacgatttcatggtaagaatattttgattacatgaatccttattttctcacaacatttactaactttgcttgctttacatctattctttcctcctaggaaccaccaaggagatgtcaatacagagaatggatagacaccagaagggttctaactccacctagccgtgttgtgcagcttgaactaccagagcaatacagggttactaaagcgcggtttgagagaggagagggatcctcacgtatgggttagctattatcggacaacttggcatattgaaatttctactgtcatgcttccttgtcccattactacatcgtcgttgtgttcaactattgcactacctccctcctagttcgaatctaatatcatctatgtaaccgcaatgcaaatagtcgtatcatgttcaaattgtactactatttcttcatgttacataattctccttgtttaagtccatataatgtttatacgacccagactgtgataggcctatataaattatccgagtactaatacgtcgaataaggtacaaaataatacctcacttaacatatgaaattacgcaacaaccaacttcaatacatttttataacaatattaacaagttttaccaataaatacttctttatttattattaacataacatagaaaaatcttttggccgtacttttttcatctggggacccagatgaaaaagtacggccgcaagctctttatgggcggccaaaattgcaattagccccttgccgccctctgtatgggcggcaagggcctaatcgcaattttggccgacggcgcggtcgacccaccgtctgccacgtcagcttgccgcccaccattagggcggcaggggctatttctgcaattttttttggtcgatagattatttctgtaaatatttaaaaaaaatctaaaaacgaaaaaaattctactattcgatattgggcttcccgttcatgggccttcaagttaagcagtttctacttggaaaaagtatactttgactccctcaactatcgcccgagtatgattcatatcctccaaccacaaaccgggtatataaccggtgcaaacaatgtccctcggtggttttggaggtggttttggctgacgtggcgcctacgtggtggtccgtctccctgtgtgtcgtccccaccgccaccgccaccgccgccgctcccaagagctataagggagagagagaagggagaaagagggggatgaaaaaggaaagagagggaggatgacatgtgggtcccacaatactttttttgtgtgtgtgaatgacataggggtcccacatatttttttatttttgttttttctaatgccacgtaagcatcacataggacaaagactcggtcaaaaccgccatgtaggcgccacgtcagccaaaaccaccgagggacattgtttgcaccagttttgatagatagaggagttgatatacccggttttgtggttggaggacatgaatcataatcggacgatagttgagggagtcaaagtatactttttcctttctacttctgggctgcaacttcatatgggccgtccaagcatacaggcttcagtttgttcattcacggattggagaaagtatacattgagtccctcaattatgatctgagcatgattcatgacctctaaccacgaaaccgggtatatcgacttctctaactatcaaaaccggtgcaaactttgtccctcggtggttttggaagcggttttggcctatgtggctttgttgacctggtcttcgtcatacgtggcatcgacgtgacgcttacatggcattagaataaaaaaataacaaaaaaaatgtggggtccatttgtcattcacacagaaaacaaattgggggacccactcacatgtggaccccacttgtcatcctccctgcatccccggtcattcctctctctctccatcccatcttcctcgttcctctcccccctctgtatgtccttatcgctgcgtcaccccgcaacaatgatagccccaacgtcgacaaccatggttatggctaaggcagctgcgtcagagaccaagggagacagagaaggacagccgccgaggccagagcagcaaggagggtgttgatgcgaaaaacacacactggcctggaagatctgcttaactcctgtgcaggtctaaaatcttgcttttaggttcgtgagcgtgccagttgatttgatcctgcaaccaacaagaataaaagacaagaaaaacgagattaaatccataaatgatagccgatcggctaggagccgatgacatatcgtccatcattgagccgatgttattggtgatagatcggcaatgaagaatgaagcaatataaaactaaatctactcgatcggctgtagatattaacgatatataatccttctctcaatgcatattttgattaagtgattgggatagatcgagcatcatgtcgagacagtataaatcacatagatccaaagatacaataagatgacgattatatgaacgtttataacatagctgatcaaatagatctagcatgtatcggctaatactccgataccactctatattaagatattaaaacagacgaacatattaagcaaaggcctaatatactctaatgcaataagatcttgatataaagggtatatttagcataacaatcaagcatataagatatgaaatagctaaatcaggtaagatcggctgaaaccccgacgatatctctttcagttatcataaaacatgctagatattatagttataaatattacttaatagatcgaactcaaccgatgcagcattaagcataaaaataaatacaagatctaggcaaggtgatgaaaacctctaagagatggtagatatgcgatacaatctagattaataacaagatttaactttatcggctgctctctagcagtaaaaaccagccgattgtgagttaaataacacaatcaacaaagattatgaagcatatatgataactcgatgaattaaataaacaagattagagtatcataaagatggaagcactaatcccgagaatgtaaaccgccatgacaagtttacctctagttgaagatcggaatcgatgcagctcaactcgaaagtaagaactcgtcgaaacaaacgaaagtgaaaaagggtggcgatgcgtcgagagtgttattgaaccgttatttctagatcacacgggttcgggtcatatttatacccgagatacatgataggtccttgccggacacaactcttatatctaacaaactctaagatacacataagtctttacggtagacttttacctaaacatatctctaaggaaattacataaaatataaaagatacaattgcctatctgagagcttatctccatcgtggcaatccttgtgaagcacattgaccgattccagaaacagttttataaccatctcaaaagaatcggctgcatcggctgtatcggccgtattggctgtcccctgtccgacccatctcagccgatgcagactccagccaatgccttcgcagccgatgcacactctgttcttcgaacgcaatcctttgctaaatccactttgattccagtaccaaacctgatttatatcttaccaaatttggtcgttaacagagggacggttgggcgcggagcgaggggagtgtcggtgaggcgatggcgaccaagggacagaggtcgatggggttgctgacggtgagggaggcgacgatgggcaccaataagaacgccatggggagcttcgtgctacacaacgacatgtgggagctcaggtctggcactaaccccggtgccatgctatggtccatgaagaggaagacggacgaggagaagaagaagagggatttggggtggtgctggcgcggatgaagaaagggggatttagggtggcgttggtgcgagtggtggcggaggacgaggaggcaacgcttcaactagcggcggcggtggcgacaaagtagacggctgcatgcttcctccttcaatttctccgtcgctcgatgttgtgaccgacgatcctccgctgccttcgcccccacgcccgtctccgccgccgacgctccggcccttgcccgcctgctgcccgtcgccgctccaacgcccgttccccacgaacaaccgaagggtaagagataaggggaagagagagtaaggaggaacaaggaaagggaggatgtcctgtgggtcccacaatatattttgtgaatgacaaatgggtcccacatatttttttgttattgtttattctaatgccatataagcgccacgtcaacgccacgtgggatgaaggccaggtcaataaagccacataggcgccacgtagaccaaaaccacatagagataaagtttgcaccggttttgatagttggatgagtcaatatactcggttttatggttggaggtcataaatcatacttggatcataattgagggagtcaaagtatactttttcctcatagattcaccaggcgaagtcatgggccagatcacagataagtctaaatcgaatgaatcacttaagagtgagataatttcattaaatatagtaggataaaaactgtacattgtgaaaatacaaaacaaaaaggagatgtaagatataatttgtgccaggcgtttcgctcctgctagagcccaagtcttggctcttccttgattttagcttcgagggaaattgttgagagcccttttatggtggaagactgtgttcggacctccaggttcccaactcctctcactcgtttttcgcgcgcacgcttttcaaactactaaacggtgcgtttttttaaaaaaaatgtttctatataaaagttgcttaaaaaatcaaattaatccatttttgaaaaaataaatagctaatacttaagtaatcacgcgctaatggaccgctctgtttttcgtgcgctgagttaccaacttcctctagcgaacacatcggaaggagcaaggttctaaactcctctcctaggttcctcatggtgggtttccagctatatccaccaaccgtggattgatgtcggttggtcccaattggtcgggttgatgtgcactctatactcctttaaaagcctcaagttatagtggtaagtcaccttgatattgcttttataaattgttccctaatattttttaatattatgaaatagtacaacatttagtttgaacaagtgaataacagatactaatcaaataaacaaccaagtgatactaagatatttgattaaaaattataaaatatatttgataaaaaatattttgttatggtatattataatattttttctcttttgcccatggtaaagcaagcgtatagtttaacatgaattatgcaatcaacttttttttttgccaagattaatgttcgttcaaattacttattttagttcatttttttgcccggattaatcaactcgatttctgtccaagttcgtctctattgacccatggtgatcatcgtggagatcagagttcatgctgggatttgttagtcagtgacacaaaaaaattcttcagtttgttagtcagtgacacaaaaattcttcagtttcccactctactgagcaagtgtagacgcatgcagagagtttttcagcctgtgctgcttcccggaaccccagcaaccatgaatttcaaagtccaatccacggccaaggacagcagcctgtcgccattcccattcggatatacggaacccacagaattcaacaacgaactcctacttcattgaccataacagaatgaagaatatattactcgccttttgacctgtccaacacagttgatgtcatgtgctaacagtgtgctagttcgttcgtttctttcaaaaaggaagctcacttgaaccttgctggtacagattacagaatgattagcagataaccacagtacggcaaacatgaggtattttttagtctgatacaatctttcgtagaaccgattcagacatgctctgagtttgatattttttgtattatctcttgcatgacaaaaacattgataaatgtccaagtgattacacaatcacatggaattttttttaaagaaaaacaagaattcagcatgcgttttccaagtccaatatcttgacttcccacaggtgacaggtttgctcccaaatctgcactgggtcaatgttttctccccacaagtttgctctttccaaatccatggctccacacaatctctccaccaactcatttcgatatttttctactgaacacatgcgtcaactgctccagccaacacgcaatcaaaatgcttacaaatcaaaccgcctctcgaactatatatagagcagagcaccaaccaaaagaccaaagtgtttcagagaaaatttcagacttcagtttggtgttaagctctctttgtctcggcctctgaatctctctgaactttctgatgtgttcgtggaggagacgagttcttgccgtgttcgtcgtcgtcatcgtggtgatcatggcggtcgccgcttcccgtgctgacgcggcgaggccggcgccggaggaggcggaggagcggctggtggactgcggcgaggggggatacgagtcgatggtgtacccggcgatggtggagaaggccaaggagacggtggagctgctgctggcgaggttgccggccggaccgagccccaagggacccggtcactgaagatcatagtgattacatgttctttttttttttcacttttgttcatagtttgatttctcaaaacagagaaacaaaagatattcttttttacctgtatatgatatcagtaggaatactggatgtaattagacagtgaatttactgattgctacgaaggttaggattctttgatatggctgctgtcattgtagtcatgtgttgtgtgttcttgcccattcgggagaatcggaatcaccaacgaaaactttagctctgtttcatgcctcgaacatatcgaaatatcgagggagtgaaagtctagaattaaatcattcaattggggctagaggtttgaacaatgatcaaaagaggggaaaaaaaggaagacaggtgacaaaaaaaaatttaaaaaatgcccccacgcaggatcgaactacggaccttcagtttacaagactgacgctctaccactgagctataagggcgcttcttgttgaatgattgtgtatttctaatttatacttattttatatttgtgtcgacaagatgcacaatttgttgaatagaatctctccgtagcttgaatgcataaaggttttcttctaaaagataaaatgaattgcatagatgtacagtcaggtatgatcatgtggcttttctgctgcattttttcttgaaacttcgtttatgggtacggatctaatcttcgcatatgcggtagatgagcaacgcggttatgagtttgcttatccaatggtgttttgattatctctctctccagatcaatatccaaacgacttaacctgacacggactcggagtcggactccgagtctgatttccacacgagttcgtgccctgataaattcagattctggcgctgatgagacctcaagcaattcggaagctagcgcatcgtcgccatcgatcagagggcattgccgccatagccaccttcgcttcttcgtcaccggcggccatggcgtccctgtacgctccgcggctgacgaggtggcgcgtcgcgacgtccggcggcggcgtcgtgcgcgactgcgtggagtacgacgggaagccgctcttcttccggcgcgaggactgccgccgcctcgtccccgacgacgaggaggacgcgcgcgagtgcctggagatcgccggcgaggtgttcccgctgatggaggacaggatggtgccggcggcggtccacggcggcggcggcgtccgcgaggcggtgcggtgcgtggagtacgtcgacgacgacgacggggccgtgctgctgctcacggtgacggcgacggaggggaaggagaaggaggtggcggtggtcgacggcggcgaggtgcgggtggtcgacggcggcggcttctacgaccccgactccggcacggtggagcacgtggtggacgtggagggcgcacgtgaggcgtacgtgctgctcgtctccgttcgcgaggagctcaaccgcatcgtccgcgtcaagaggctcaactgatcattattctactaaatccctaggaaatttgatttgtatttgatagattcttattgtttgtggggaagtttgtaacaagttttgtgcatcgaaaccctctgtcactctgggttctgatttgaagaatgatggttctaattaacttcgaatcatactgaaatcgtcacagttctagttagtacataccatgctaaaaggacatgtagtctagtggttgcagtgtcctgagtagcacccaagattctaagttcaaatatgcataggagcgaatttcagattgggttatttgagaactagttttctcttcgatagactaagtttatattaaaaaaaggctaaaaaagctacatatatccggttagatatagacgccgggtaaaaataccttctctaaaaaaatgctgctgttacatgcttgttttaccatagagacatgaagaaattatgaattcatattatttgatagaaccccacgaattcacagtgcttgtacgacttttatatattacaaataatttaagaatgcatatactcaaaagctttggaattttgttacatgtatccgtaatcaaaagacaccaacttaattactctgccactgtcaatgctcgtcccgcgcgcggcggctcagcggcttccagctcctgcagctggctcgcctgctgcgcgtgccggtagatcgccggcggcggcggcccggtggtgccgccggcgccccacatctcgatgtcgtcgtcggtggtcgtcgggctgtggtggtggtggtggtgcgccgccgctccggcgacgttgtggacgaggcagcgcgccacggcgcagatgagcagcctcgccgcaacgacgacggcgacgacgatgagcaccgccaggaagtagtccagcgccgaccggtgcacgcgctggcattcggcgacgctgatgcaaaccattgctcgcttgcttgctgcttatgctgttgtgcatgcaagaacaagaagtatgtgtgcgagaagttgcagggacagtgagtgaactagtagctgatgatatatttttgggggcgtgatgaaaagctggagaagatttggattcgttgcttgggttggcaagaggatagagagatgtttgaacctgtaccttccttggggcttttgggatctagtcgcatttcagacagcgattgatcaatggcttttcagaatgtctttctgggaatggatcagccacaacttttaaacatttagtacgggagatcgacggagaagctatgattttcttcatcgattaccaacttaattacatgcagttacaacatgtgagttttattcccagtcttcttcatgcaacagaatacagctgaattttgtaaaatccagctatgcgaagccgccattactgtagtttggatgtgaattttcatccctcaaggggacatcctctcgttgcttcgtaatttgcttgtcatctaaatagttataaaaaaataaaaaaaatattaatatagattaatatgaaatatatctctccataaatatacaagaccaaattcaacttccataagttgtaaaaaaaagaacaaattaaactgaaaatagttctcatacattcacagttatatttgttattataacttaacattatttgtgaagtgatatatttcatactaatttatcttgtaaaattttttaaaattttcataactatttaggtgatatacataaaaacattttccatgtagtttgtccaatgtaagaaatttaccatgaagctcaaaaccagtaaacaggtgtagtttgatccaaactccatcaccactgtaacgtacgatcattcgatcaaatggatgattagatgcaggtggagatcgatcagctagcgatctacggactggaggaggaggcgagagcttcacctccggtctcctcctcctcttctccgacctgatgggaagcgacggattcagatgccgcgtcctcctccttcccgtcttgaatccgctgcggaacgacgatccgctgcctcttctccttcctctcaccgcggcaggtggtgatggaggacgccgtgtcctcctcgtcgtcgtcgtcctcgtctccggcggcgtggcgcttaggagggcggttgagggggagggggtagccgggggggaggaagccggagaaggccccggacatgaagtcggccggcgagggtgaagccgccgccgccgcgggcctccgtcctgagcgtgacgcgctcgtagaggtcggccctggcgcgcgccacctcctcggcgtccgtgctctccctcaccaccttggatagcctgcgctccttctcctccgcctcccgccgcgcgaacacgttccggtggtactccatccgctccgtcaaagtttccctcgtcgcccactcgtctatcggcggcggcggcacccagatccaccgtagatactcgcgctgccccatcagcggcacgaacgtccgctccatctcaagattgatccctctctctttcgccttagattattggattggattctgaagatttttctcgcgatcacaagtttgtaataactgacttgctaatctgatgactcgaggctgactcaacgactccgtccgattccgatatacaccaatcctttcaggccgcccgctccagtttttggatcgaaattgtgcttgcagtgacaatattcatattactagcaaacgagatgtgattttcctcgaggaacaatatttttcatacgtacgtatccaccattcatttacacaggcaaaactgcctcgacctacaaaatgttttttttttttttggaaaccgatcgatcgtcctacaaaatgtcaaaacttccaaagaggacgtaccaacagttccaatctacccatctcattccttgggcgttcaaatagtcttctgcaaatgcaaatccagcggtatgtgagggcgccatcgttgaagtttgtcgaatggaagaaagcgtcatggagctcaatgaatcccactaaaacaagctgcacatctgaagcaccacatatgcctttggcaggaaatgtcaagaacttgatccagttcccatcactttgtggtaaacttcgattgggcggtcaaaaccagtaacagcgccctccagtttgtccgtaaccacctctaccgacctgaatccgatctgcaaggaacaatgcatggtgaggcaaaaattctgttgctggggccaagaactgaacatagaattcgtggctgacattagaacataccttgtctagaagtatctcccggaatttatctggatgtattaggatggtattgaagttctctttggcaacctgaaagatgtaacacaaaaaagagtgaggtattgcaactttgcacgataaaaaaaaaactgcggtcatggaagaatcaaatgtttaatgaggactaagatttctgccagtatgttcattctagtaatcttaagattgaaataacagggggttaagaaagcaggtccagtaagagtgaggccccaacatactgacgataaagccaagcaagcagctaaaaccacaaccgcaactgtagcttttacacaagcaaggggctgaaagtaaaataactctagccttcaacaactgacatagaaacacaataagcatttcaaacttcaacgcgatccagaaaataatcaactgggtgtcagagatcagtatggcattggggaaaatgatacctctgaaaccaatctgtttctcctatatgaggtccaaggttgaggctccataataaaaactccaccctgaaaaacaagagaatccagtgggaaaatagtttattattttttttcatcttatcattgacatctactttaccaaagcacaggaaacataaagacagatagataccggtcttagaagtctccagatcttcacaaataaagtaattatgccatcgtcaccccagttcaggtggatccatttggtcacactcaaactgcatgagaataaaagcatataaaaacgcatgtgtcaatatgacatccaatgtgggtaatgatggcaattttcacaaatatgttgcaatataaaaacgacaaagtgactattattaatgacagcagaaaatctatgagatctatattataatttgtaacttaccaaacaattgtatcatactgttctgaacttgtacacatgctgtccacaaaattctcgcgacgaaaagaaacaactttaaaaatatcatgatgactgccattagaaatatccccatttgatatctcaggtgccactttttccggacagctttcagacggtgaatctgatgacttgtgagccttggtgttttctacaaccaccttatccagtcgagacatccttcttaaattccagttggcagtttcgatcaaacctaacaggacaagatcaggatcagtatagcaagaaaatagctttacaaaatttataacaatatgtttgcctaggaaagacatgaaacattagttaacaaacctgaatcaatatcaactccaagaatgctttggcatttaaatttcgcagctgcacaaggttcacaaataaaatgagaaaccatactagtaataaaatttaactaacacagacatacaaagtatcttacagtaacacatatgaatagataaaagaatatatactgcaaatagtttaaattttaaataccgtctctgttaacattgatacagaattcccaattctatttataagaggtacaacaacgtaactgtacaaccatacaattatgaattagatatatcatttttgttcaaatggacaagacagatcatcaaccaaacaaaatagtactaaatattgcacaaagatgatttacctagaccaatcgttaccaaaccctggttgcatccaatatcaagacaatccttgctttcaaaccactctctcttaaatattttaagacgagggtcttcatcaacattacggtcaatctgtagaacattagaagaaaggatgtataagctaatagagagacatcagaagagagaatttatcagatgagaacaagataaggattgcagtatccggcgaaaacaagataaggattgcagtatccggccatcgaatgggatttatattgtactaagagaagtaccacatgcagcgctgcaagtagaatgtgaaataaacccttcccccctccttgtctgaagaaatctacagtacactttggcattggcaaatcttaaggaaacaacaagatctaactaggctccctgatacttcactccttccttcgccaccaggtgtacttatgatatgcagggtatgggggcacttcctcgacctacttatgttatgactaaataatcagtcaaagtaaattagacgattttgctttcctgaaatagtgaaatttgttgttcacttggatacccgacacaatcattctgataaacaacaaaatgctgaactaaggaaacggaatagaaacagaaatttgattatctacattctacatgcccccaataaaagaacctaaactggtctactgcaaaccacaacaaattaaatcagaaatgacaccactgtaactaaggtacattctaagcgagagcttcgactgatatccattcagcgttccaatccaaacccatgaaccatcccaatcccacgagcaccgcgaccaccatcgaggcattccatcgaacagttggtgcgctcatacacacagcaacgatctgcgcgcccgcaagagaagcgacagggggaggggtgggtgttcactcacccggtagccgtagtagttcctgtagttcccgtagacgaatacctccttcctcttccgcttctgcccctgacccccgtcgccgcggccgccgccgcctcctcctcccccacgccagttgctctgtttcctcttcgcctctcctttagcccccttggccgcggacggcgcgtcctccggcgcggtggtggtggccatgctcggagaagagacgcctctctcgccgccgccgccgcggcgcggttcgtgctggagctgaaacgagaggggaacagcgcgggacaaagcggcgagaaggagacgaaaccctcgccgccgacttaagaagaagaagaagttcagagatagcccttccaaaatagaggtccagttaggcccatcaatatttgggcctatcgatgtttgggccgtaacctctcatgcatgtgcaatttgatgattaaaggatttgcacaatgtacattgtataaacagagatatgctttgcattgtttaagatgaaggaagatttagttgtgaattactcgtgttctgattttttttctttggttgattttttttttctccaatccaacgcaagctaaattttttttactcatgctctgcccctcgcgccggcggccggcctgcccgccttcccgagtcccgacggcgccgcgacggcccactgcccctcgcgccggcggccggcctgcccgccttcccgagtctcgacggcgccgcgacggcgcagcggcgctctgcccctcgcgccggcggccggcctgcccgccttcccgagtcccgactcgcgccgtcgcggtcgcaccgcctccggcctccccgacgcgcatcggcgcgcgcgccctgcctcggcgcccgccgcctggccggcatcccgcatccggcggccctccccctccggtgagcactgcgccactgcttctccggcagtccggctctcctctccctcagtccctctactctcccccttgcagtagtcagcaggcagtactacctccttcaataatcaagttctttatatccatgattagccaattggggatatagtaatttgtatagattaccacaaaattgtgcgccacaatgaacctcatatgacttttttgcatggtgtgatggttgttaggagattgaggaatgaagaagtcaagcagtgtatttctttttcagaagcatgaagcaaaaaaagttgatgaaggggcaatttacattgtcatttaggtaaattttaaacttatttattattttctacttgtattgaactatttagagttatatacccgtatcgttttacagattttatatcgaatcatgatgtattgcatttagatttttttcgctaggcctaccctaggttcaaatcctgggtccgccactgcctaaattacccaaggacgcggtaaggaaattattggactcagctattgggcttcttcatgagcctgtaaaacattagtacaagtcgccacagaaatatccgattgttagggagttcggagaagaaaacaccgaaccccaaacgatcacagagcagactgcatgtcatgctttcttctgttcagtcatcacattgatcagtatttctctcttccctaatcactcaatgacgacatgctatgtctgaattcctttttgtggagttcccttctgagttctgaatgtattccctcgttgattgaatcgagtcagattttagtttttttttccttcttctttcagtgccggatagtcttcagtgcaaggaattaattaagagcagacaatagaaaattcagcgagagtgttcaccattagccgaccctcctccaatgcctctccgctgtgcaaacgcctgcaaggatcagtgtgttggatgcctgtactgtatgctgttcgattatcccgtttgcatgttgcgccttcttctggtaggcgaggccatcagctgaatcaaacatcactattggagcaatcaaacatcaccattggaggctggagctatagtttagtttcctgtttgtaaagaaaaagtgaagaatgttcgtgactgccgggggtcggagaataaaactccgaaccccaccggtgaccgagctgattgcatgtcgtgccttcttgtattcttcagaaaagccaaacgaccagctgatcaactatcagatcagactttttgtaattaagtaatttatttctcttgtgaatgtgttctctacgatttattttcgaagagaactctaaagaaatgcagggagttcctttttttcattatagaataacagtcactagtacgtaaccttccatctctaacggcctctaacatgcttagaattagcggactgtcataagaaagtcatctcaatcgggccgaaaaagcgcccgattgagataacgcaggtccgtcacggatgacacatatcatccgtgatggacaccaacttggggcccgattgagatatggaatgttatctcaatcgggtctaaactacggctcgtcactgatatgtgtcattcgtgacgggcctgagttttatttccatctaacatgtttgtgcgatcatatctcaacaactaggtgagagatatgtgaattttatgaacaatattactatcactttgtcggatgaaaaaatgaccaaaataaaagttatagatcttgatgagttatacaactttgttgttaatgactttttcagttgaaatcatttagaatttgaaattgttgtttgaagttgttatatttttaaattcaaattcaaactattcaaaaaatattatatagaaaaatgaccaaaataaaagctgtaaatgttgataagttatacaactctattgttgatgacctttccatttgaaatcatttagtatttgaaaatattgtttgaagttgtcatattttcaaattcaaattcaaactgttcaaaaaatgttatatagaaaaatgaccaaaataaaagttatagatcttgatgagttatacaactttgttgttgacaatatttccatttgaaatcatttactacccgaaaaattatttgaatttcttatattttaaaattcaaattttatatagttcaatcaaacccggatgaagaaatgaccaaaataaaattggtagatctcaatgagttgtacaactttgtttttgtttttgacagctttttcgtatgagttcatttagtatcataaaattcaattcgaaatttatttttgcctagaagtcttatttgtctcctcatcatgttaatacttgctaaatatatattaactcagttttgctggtgaaatatgtgaatggatgtgaaatatatgatcaaaatggatgttatgtgaatgtggttgtgttaaatatatcgatggttgtgtatgtaaatgaatatacaacttcttcttaggaagctgatctccaaagaactctgaggttaagcgagccaagggtggagcaatttcggaatgggtgatcgaccggatgcacacgagtgaggataaagtacgcagaaaagactggcccgcgggcgtggctagcaagctataatttaggcccgttagagatgagagtcatccgtgacgggctatagtgttggcctgttagagatgagagtcatccgtgacgggctatagtgttggcccgattgagatgtgtgtcatccgtgacttaggcctattagagatgagagtcatccgtgacgggctatagtgttggcccgattgagatgtgtgtcatccgtgacggccggagaaattttctcacatcagtaacctttgctcagtgacggggtcctgtctgaaagatatgaggctttaggctcgttagagataactgatcccgttctagtaagttaatccaatttacaaaaggaaaccatgtcttaaaaccttacaaatgttcaattaatttggaagaaatccagcgaaaacctccacggagcaaataatgcaatagtcccaagcttaatttggaagaaatccagcgaaaacctccacggagcaaataacgcaattgtcccaagcggcatacccaccacaactgacgacaaccgacacaagtcaccgttgctaagattaaagccaaagaccaagcagctccaacttcctagggttatcctcaacccccacgatcaacaatgctgacaaaagggatatcagcgattaatcaaagtggaacatgaccttctaaacagagcctcaaataaggacataacgtcgaggacgttgtcattgcctcctggaactctaggactaggttttcatataaaagcaagagagagaattcagcacgacaacgcctccaacgaggaaagcggcacccatagttgttgccatcaccggtacctaccaaaactagggcaaggcttccgtctagtcacttcctatcaatcacaccctcctcaagtgtttcttctatgtggctagaataggaggatttaagcaagaaatggcagtgcaactatgcaagcaggcaacaccatcctacaccaagtaaaaataagggaaaacctagcctatagtgaaagagagaactcattgtcctctacgcatcctttgccgccgcgcacccggatctagccagagccgatcggtgcctctccgtgccctggcaactcatgcttgcaccactcgtgtgatcgtggcgttgctactatgtgcggccttaggccttgcgcccttcaactacctgaacccatgcaatcacgcctgcctaacctccacgctccacaccgactagccacctcgcggttgtgccgtctctctccacatattcatacctccttgttacaggccatcgccccttccgtactacgctgatcgggtcaagaaacaacagatccaaccggagggacattggatctagttgtctttgtgcactagccggccttagcacgagcaccttatcaagtatatgactaatagccaccttttcctcgtccaactcccctgcacaccattttgcctccttggccgcttaagtagtgaccttctccatgagtcacgagagccttatgacgtagtatgatgaaggaggaaaaaaggacgcctcgccactaccattgtccttggctccttgaagccaaatgggctccagctggactgctctagcagtagcgatggggaagaaagaaagatcgaggttgcgacactaggtggtcccatgggagtgacgcacgggcttttatttgtttctatatatttgagttcactataaaacactaaaagattacaccatatatagatttacaaaggacttttgctctaagcgactttagatacctttatttatatagaagaaaacaaagttcttgttgagaagtatgcgagtgatacctgcattttatagttcaaactttgtatatactagttggcaactcggtatgcaaacaagtagtgacgaaggcttttgctttgtatgatacgaaaagggctcctctaacacactactattctctaacacactactattctctaaggtaggtcgctgacatgtgaacccacggctatagaattcacatatcagttactcaaaagttactcaaagttagatgatctatatatgcaggatagctggggtgagatagcagcagcagtagaatacagctgttgtcttcatctcatgcagcttagctatgaagctaggtaacgtacgtagcggcacatattccgattcgcatagcatagcagagtagcaacgcggcacccgaaacacgttttacaccgcgcaaactctcctacaacctgtacccacccggattcctacgcgcctcccataaataattgctacgctctctcccgccgcatgcactaattaaaaagcccacacgcgacgcgacacgcccggcgagccgcgcgagcgcgacacacacagaggaggaggccgcgcgcgcgacgcgagctcgccctctgcgtgcgccgccgcgaggtcgccgccgccgccgccgccgtcgatcggcgcccgatcgatggggggctgctactccgcctacgcctcctcgcgcaagctgcgcggccgcatcagcaagatctccctcgtcatccccgacccggtccccgacgccgaggccgcctcgccgcgcaaggacggcgtcgatggcgacggcgacgacgtgaggggtggtggtggtggctgtgacgatggcggtgacgtcgtcgccatcgcgacgacgacggcggacgagttcgcgcggcggtacgtgctggggaaggagctggggcgcggggagttcggggtgacgcggcggtgcagcgacgcggcgaccggggaggcgctggcgtgcaagacgatccggaagcacaggcgcctggcgccgccgcgggtgaccgcggcgaaggcggcggccgcgcacggggaggacgtgaagagggaggtggccatcatgcggcgcatgtcgtcggcgtcgtcgtcgcgcgggggcggcgccgcgtcgtccgccgccgtggtgcggctccgcgaggcatgcgaggacgccgccgacggctccgtccacctcgtcatggagctctgcgagggcggcgagctgttcgaccgcatcgtggcgcgcggacactactccgagcgcgccgccgccaacatcttccgcaccatcgtcgacgtcgtccaggtaataatcaagaacgaacactacacatcatcttcttcttctcccattgatgcatcaaatcaaacgagtaatcactaattaatcaccaacaatctgtgatcgatcggtcgatggatgcagctgtgccactcgaacggggtgatacaccgcgatctgaagccggagaacttcctgttcgcgaacaaatcggaggactcgccgctcaaggtcatcgacttcggcctctcggtgttcttcaagccaggcacgtcgatcttcagcaaaatttccacctctcatcgtccatgatttctgtcaaatcctccatggtttctgaaaccaatcaaatgttgatgcaggcgaccggttcacggaggtggtggggagcgcgtactacatggcgccggaggtattgcggcggagctacgggccggaggtggacgtgtggagcgccggcgtcatcctctacatcctcctctgcggcgtccctccattctggggaggtatatactcaccttaattacctttttttttaatatacaatgtcattgatttttaaagatatgtttgataatttttttgaaaaaaagattatgtgattaccgcttattttattgtgagtttattgttaattattctataagtatgacttaaacttttttttatagtttgcaaaagttttgaataatacgaatagtcaaatatttataaaaaaaataacgggatcatatcttaacttccttttttactatatatatgatactatttaactttttagtcatgttcaatcattttaccttataaaaatattaaatatttttcgtttgatttatcactaagaaactttaaacattatttatgttttaaagatttacatattttttttaataaaacgaattgtcaaatattaaaaaaaaagttaacggtatcatttattaaaaaaatacattaccaattcaccatgatgatgcaaatcatctcccctgtcaattcttgtcatgaaaaaaaactataactgtaatcttgtctgaacttgcaaatgtgcagacaacgacgagaagatcgcgcaggcgatcctccgcggcgccatcgacttcaacagggagccattgccgagggtctccgccaacgccaaggacctcgtcaggaggatgcttgatcctaacccatccacccgcctgacggccaaacaagttcttggtaagtaaacaacttaatcaaaccttctcaatgattcagatatacacatgattactggaaatcaaacatcattttgtttgtttcgtcgattggttttgaaacaaaaacagagcatccatggctgaagaacgcggacacggcgccgaacgtgtcgctgggcgacgccgtgcgggcgaggctgcagcagttctccgccatgaacaagttcaagaagaaggctctcggagtaagtcgtcgagttgtctcattgcttctgtgttgcgatgatcttgatgggtcgccggagctaacaacggcggtgtccggtgaaggtggtggcgcggaacctgccgggggaggaggtggacaagtacgtgcagatgttccaccacatggacaaggacaagaacgggcacctgtcgctcgacgaactcttggaaggcctccacatcaacggccagcccgtccccgagcccgagatcaggatgctactcgaagccgtaagctttctgctcatctcctcgatctcgatctcagaatcattttctttattaagataatggaagatttttatcgagctcattcaattacatggagaagatctcaaaaatcatttttcttgagtcttgatctcagaatcattttcttttaagataatggaagatttttatcgagctcattcaattacaccgaggagatctcaaaatcattatttttctgaagattttgttgagatcatccaattatatcgagaagatattactgtaaaccgttgaattgtgatggatgatcatactctcattttctcgatctcaaaatcgttttttaaaaaagataataaaatattttatcgagctcatccaattacatcgtgaagatataactgtaccgttgaattggggtggtcagaccctcgtattctcactctcaaaatcgcttttcaaagataatgcaagatttttatcgattgaacttattagctaatttattgattacttgtcgttttagacaagtaaacggtcttaaataaacaattatagccaccattttctattacaatatatatatatatatatatatatatatatatatatatatatatatatatatatatatatatatatatatatatatatatagtaaatttgtttggtgctccatggtgcccgggcaccattgttgaaattgagtatatacctaattcaaatgagtatgaaactttttcaattacttagatattaacattagctactttactaactagttcaaagcaagtttgaactgaatttgaacttgtttttgttagattttgattctaggtatatagcatccatacatataattagttaggtatgtaatcatggattgtgaaataaagttaaatttgagttgttttgttgataggtataggtatgaatcgagttattataactaggtatatactcacaatttgaaaattttgaaaaatttgagtgattttgtgtatttgatatcatggtgccccatatgagtgtcctatatatatatatatatatatatatatatatatatatatatatatatatatatatatatatatatatattagaaaaaatattttattgtagtatttttaagactaatttctacatatggtctctacatttctacgatttaagaaagtttgaccaaattattatccaaaacaataaatatcatcaactcggaggtattacatcgaggatatagtaagaagatgagatgatgaatttgcaggcggacacggacgggaacgggacgctggactgcgacgagttcgtgacggtgtcggtgcacctgaagaagatgagcaacgacgagtacctggcggcggcgttcaactacttcgacaaggacggcagcgggttcatcgagctggacgagctgcgggaggaggtgggcccaaacgagcaggccatcctggagatcctccgcgacgtcgacaccgacaaggacggccgcatcagctaccaggagttcgagctcatgatgaagtccggcgccgactggaggaacgcctccaggcacttctccagggccaacttcagcaccctcagcaggaggctctgcaaggatactcttactccctgatgatcgatgatgcccaacaatctcatcaactttgtttcatcaaggcttataaactgcacatctttcaccttcaccagacagggataactagagagagatacaagaccaacttagagaaatgtattggagtggcaacacgatgcgatgctgcgcttggattgtgaaatgagaaatggaactgaaatggggatcgtaccggttttgctactctttcggtaaatgggtatttttgtttgctataatatgcacacaacatcaaaaattccatccatcaaaatatgcagctcgaacgacgaatctataagaaatcaggtactgctgagtaaacaccagtttcccacatgatttatcaaccatagattatgacgagctttggtaatttacatgaccgctcaatagataagagctacatctaccattctccagcttcacaggttggtcagtacagggggtggaactttacccaccacatcatctcatgtcatttaaacaaaaacagaacattgcccaccacattaacacaactacagaccataactaatatgtacataatataggctagaaagtaaaaaaaaaaaagactaccacatgtttgtaccccatccaccttcgctccatagtcggtcctgcattgttgctgcaatctagatacaaccagggaccttcactcacacatgtacgccattgctgccattggaagctcttcttcaacgccacataatttaggaacagaactacaatcaacaatcttctcatgagctttgagtaagcacccaccttctcaacagcttcgagatttatggggggcactggctttcagccagtttttcatctagtatctatgcttatcgcagacgctgcatgcatccaccgatgaagggttaataaacgtgcagcgctcacaaggccagccttcatctgagttgtccgaagatgttctaggaagctgcttctttgttttgcctttagtgactgctttcttggaggggatgttggtggcattgcttgatgtggtaccctgggcagtagagtgtacatcctccaagccagcctccagtgcttgaacaaggttctcaaaataattccgagtcacactgcagtggagacgaagcaaagtcaacatatcgtaaacaaagctcatatgacaataaagaataggcaaggaagctgctatccatgagcatagacagcatctcaagaccttgtaaaatgctagcaagtaaaaacatttgcgacaacaactaccaaaatcaaagaagcaagtctagggtcaacaagtaaagagcatagctgaaatgtccacctctttgactgtttgactactttacatgatggattaatactaaatcattaccaagagaaaggtgggcacaaacaaagttcatgtcctttattagaattataaaatctcaggcttctaaaattctcaaatggcatttaaattatggcataattagttacattcatgtgaacctacccaaggattgttaagaacaatgtaagaacgttcaaggataatttggaaggagcgcaacgccaaaatctttcagcacaagcaacacaccgtggagcggttattggaagacatcaaagaagaagtttcggtgtggacgtctggaggttattttcatattgtgtaagacatcaaatttttattgtagccttcagccttttctgtatggcttcgattgtttgggggacctgtccccaccctaatctcgacatcctactgtcgatataaagcccatttgtaatttgttccccttttccttaatgaaatttggtcgaccgaacctttcggccgacccggcaaaaaaaaaaaacgttcaaggatgaagaaaagcaaacccttgggttcatcctaaaaactagtactaattgaaacaagagtaactatcttaaagcatgcagtagttgaatatggccaaacccaaaaggatataggaaaaacaataactgtgaaataccttgtcagccccgcaagcttcacccggaagtcaccgaattcagcaattgatggtgcaggttcagtattatcagatctcacagtcaaaaatgattgcaggtctttctcagcacattggtgaagacgctccagaccagactcagcttcacctataaaagatataatatacataccacatgatttttggcaagcacgtggtagaacttaggattttattttggaatgcaacaaacaactaccttgcaggtactcgaaaaattcgctcttgaccttgtcgtccagataatagccataagcatatgtccatttgagtacccgcctgcattcaataatctgaaatagacatagtggaatggtgcatgcatcagacgcaggtgaattgtatagtatggagtgtcatttgggtcatgacatatttatgatatcaaacctgtgaccaagcttcaattatgaacttcagttgggtctccggtattccaaaaacatctgttaattttgcaagctgtagcacatagagaagaaatagagttagcagctatcaaatataaaatacgaatgaatggcgaagataaacaattatgtcttgccctaaatgcaacgcccccaacctaacatgatgcgaatgcttacttgttccttttctgccttttgcagatctgcttgtgccttctgcctcgactggcaatataagtgaatatgtcagtacagaaacttgcatactacagcagaaaaaattccaagttcagaatagaacaatgcagaacattcatcccaagcatgtacagtagattagaaactatatacccatcaggtatagaaaaacatctggaactgtatttttttatatcatgaactgataaggtaatacaacataaaaattaaaaaagagcatttattagcacttactaccttcatcccataatgttgataggatgacccatcttagaacaacgaatctggacatgaggaatgtccaaattcgttgtcctaggatgggtctcatcctatcctaggttgctacattctaggacggagggagtaagagataaacttggcaagtaatcttcaaataaagctgcagctagttgggctacactcggtaggtaagaatttaagtcaaaattagtatctgcccaagcatatggccaacacaacacttgccaagtaaaccagaaggttcaaaaacacagagtaagttatgagcacaagaatgactaaagctgcacgtatagttgttgtagaaagaaaaaaaaactcaaagagacatcaaacttgagcatgttgaacataccgtctgattagatgcccagcgctcatagtaatgcatgtatctctcaagtgaatttttggctctttccctccttgcttcagtctcatcatactgcattagaggtaattaagttaggaaaaagtaacccttatgattctatgaatgaatgaactaattgaacaaactgtcaatttggactcgacattgacttgtgggattgaaacatttaattctacagaagcaataacaaaatacacaagacatctagaaactgattccttctactaaatgcaattggatagtctcaagataaaacatacaactccctccttctttgctgattcatagcgattacaagcgtaaaatccaccagttctctccccatgttcagcccatgaacccagacataacctgaaatgttcaaagaaaacaaatgagaggtacatacactagtaatatggacataaatatttcagcaagcatagacattggactataccagcagaactcaaatttgcaaggtggagtgcaagtcatatgcatgcatccctggtttttctctattggtcgtttgcattttgggcacggcttagaattagccagtatcctgaaaaggatcatcaacaacatgataaaccatctgacatgattagatgatttcaagcaacataaagaccttaaatacatttgagcattcatggactagccatgaactgaagattggtatacaattctaacagcattgtataataggcaaacattcctgtaatgtaaacatggcaaaaacgcttgagcagcataatgttctcactagagcctccacaagtttttccataaaaagaagtcatcaattgataaaaatggagtcaatgccaagtatttaacataaattaagaggtgtttattatgaggtttaagccacagtgccacatataatacatgttttccgtcataatatattgttaaaaaacaatgcatcagcccttgcagccctgactcagcaaagagttaatagtgttcacagttccttgcatcctcaaatcttctgcttccagaccaccagtcacacatgaggatgtccacaaagtttgatgtttctgaatacataacatctgaatatacgtacgtaaattaaatgcacaatttttttcaccacctcagtttttactcataaccatgaggaaagttagaagatagctgcaatattggcatcaaggataggttaaaaaaagaagtaaatatacaacacaaatgtttgaacatagatttatctccacaaaaattaatgaattccttatctatacactatccgtacactatggcttaataaagttttgagcctgaaccataccagttcatattttcagattctgcgctattctttaatatccacctagaaacagtctcacagttcactggtcgatgagcttcctccgtgcactgcaaacatcaccaaagcattgatgaagctccacacttttcatcactagcaataaaaaaaagtagaattaaatcgtcaggaaaatggagccagaaatactaacgttccaacaaaaactgaatttgcaattgcatgagacatcatagttcccatcgctgacaaattccactgcacatgtacagtcaggagctggacaccatttagtctgcaggaaatgccataggttatacaaaaggttaacagaaagagcacagctcatcatttcaaatcgttagaaaaataaacaataaaaaataggtactccacaaagaactatcaagtggagtaattagttagcttgttcaaacatattaccttcttgctatcttcaacatatgcacgtaagataaatcgtgcatatctcactttatcatcatctttagctaacttattaatcatgttctgaagaaccatagcaccacaagatggatcagggcatcgcaatgacaaacatcctggaccatcacttattgcagcactaatataacctgaaaggttgaatttatattatcataaattttcattattctgagggaaaaataaaataactgcaacacaggaacagatcttgatcatgtttaccaaaaacaacaactacaagtctacaagatagtctatacatgagcactgatggtgaaactatctaagctagtgttggaattgcaaaaaggaagttatgcacaaaagcatgcacagagagagagagagagagagagaccttcccagcattcatggcaataaaaatgatcacaatcagcagaactcatcacatcagaagaatacccttcaaaacatattccacaagttagctgcaaccaaaacagctgtcagatgtaagaaacagtgtatatgtagccacagccaaaggtttgatcagatatgacatgtggccagcacaacaaacaagtgataacaatatactggcatttgaataaataatacaaacctttctagagttaggaagatcaattccatttaaaagtaatccaacaatatcacgaactttttcttcatccgcaaaccattcatcgcttaacttgctgatgttcctgaacagagaactcataaagattaacaaagaacaaatacaaacctgtacccttatttctagattccaaaagtggaagatcagcttattccaatcgtcaagtagttagaaaatcccacatcataccacttgcataccagcaatgacacgtaaactaaattgccagcatatacaaaatctggaggtactacctaagacttcacagtgataattttcaagaaattatcaaagggaagcttgcagacagcaccttgaaaagtgtaacagagtaaaaacaaactgcatgtgcatcaagggcaacttggatagctcaggacaccatgtataacaaatgtcccctcacaccccagaatactctnactccctccgtcccaaaatctcttatattatgggacggagggagtataatgataaaagaatattcaatgaatgacggttaacaaacttaccatttgtagtgatgaagaagaacacacgcctcctcccttcgaatcgatagtacagcagataccttgcctatatcttcctcttgacgctcatttatatccttttcagttaatacaatgtatctctgtccatagttaccaaacatgggccagtttttagagacactcaaggatatccagtgaaacaagatgacatagaagtgccaatcaacatgaacgaaaacaaccaaacacagtaccagcttggaaattatggaaagaaagcacagaaagctctctagaaacatatggtatttcatcgtgatgcatgcgattaattatccgccttttaacctttgtatttaagctatcaaactagcaacacattatcaagcatataatggttaacatagatcatgatttggctacgtctgttgatgcccaggtgtgaaccttgcttggatcagcacaaacaaaacccaggaaagcagtacatcatcaccgatccatgagttccattacaaagactaaactctctaccatgttattccttaagcgtaaacctgtgctcactaatcaatattcaccatgtatagcatcaatattgattgagcagataacaatctaagcatcttagcactaatgtaatcatcaacttgtcggcttgcgcacaatgcgaacaggtataaaacacccaaggctgtcctaacagcggaagatagatcacatctaggtgcggaagcagaacattccttaatttcccaaagagcagatgtgaatcacaaacaactactacacatccgagtacatgacaagcaccctggaccatcaatcttatcaacatatttcagtcgcgttagctgactggtacatcaaaattaagaactgccgcaaaagctcatcccgatcctcatttcagaaaaaaagaaaaaaaaaagaaaaggacgccataagctcatcctaatccttatttcagcaaaacgacgccattctcgagaccgttcgacgctaccaatctagcacccctgatcttccaggtcctgatctacgttcagctcgccttgcctccccgctaagctacaccgaaggggggtgtaatctcgagttgtatgaaaacttttttttcccaaaatcttaatgaaatcgaccgtcgcgcttcctgctaaaaaaaagaaaaaagaaaaaaaaacaccaccaccagtccaccacctgatctgcttccgaccaaaaaaatcctcacctgctcgcggcgggacaccacctcgtcgctcccctccgcctcgcggccctcgtagtcgccgcccaccagctcctcatccccctcctcctcctcctccccatcgctatctcccccgcccccgccgccgctcccatcatcgtcctcacccatgtcatcactgtagtcgtaatagtcctcgtcatccaacatctcttcgtcgctggacatgggcatctcggcgtcggagtccatcaccccgaccaccgaatcgggcgatcggggaggggaggggggcggcggggctagggttccggcgaggtccgcggccggtggacgggagaattggggaaggaaagagtcggagttgcgtgggcgagtcggcaggcacacaggatggggtgttttttatataccagtgtggtacacttttgggaactgtgaagcaataagaggaggggattcagtaattttgggatgtaataatcaagattaggaggttggaagatgcaatttgcacttctcagttctcactagtatcagcgccctgtgtggaagattagcccatagctaattttaagagctaatgtttagtcatgaattgatatgctaaacattagcctagggtggtatgtttggatccatagactaattcaaggctaaaaggtggagagagagtagaaagggaggagagagaaggagagagaaagctgctttttaatggtccccacacaaaattagccccattagcggctaatgttttgaggggggctaattcacattagctcaaaattagcccacctgtttggatccttgagggctaatttaaggctaaaaggtgagggctaaacattagcaaatggaaccaaatagggcccaggctagcaaagttgtgttctttcagttttggtgtgacttttggcatgcctttagggcccgtttagttccccaaaattttttcccaaaaacatcacatcgaatctttggacacatgcatgaagcattaaatatagataaatagaaaaactaattgcacagttatggaggaaatcacgagacgaatcttttaagcctaattagtccgtgattagccataagtgctacagtaacccacatgtgctaataacggcttaattagtctcaaaagattcgtctcgcggtttctagacgagttctgaaattagttttttcattcgtgtccgaaaaccccttccgacatccggtcaaacgttcgatgtgacacccaaaaattttcttttccccaactaaacacacccttagtctaagttatgaggttttgttcaacagaattgcttgagaacttccataagtttttatcctcaaatttgctgatttctagccatcggacttcctcaagatttttgcatgtttcaaatatgtcatgcgtaagatctcggttctaaccaaccaaaacatggttaaatccaagttttatataagttatatcatagttaaagtatagttacaatacagttacactttaattatactatagttacatttgaaagtttttcactcagaaaacttaaaaaaaaaacttatggtaattttttagataccccttattcgatatctaaaatttgtataccaaagacttttctattggtagtaaatctaaaactaaaatttgatgatagaacaaaacaatcacaagagtatgagagtaacaatcgagcaaatacaaacttttgtaatctaaaattgtacatagatagaattaagcaaaaccaaaattgagaaaattcgtcgaaagaaatacctcgatattttgtagtgcagacatgtagatctagttgttcgcaccatgtgccaaccatggcaagggatctgacgcctcggtcgacccatgttcccctccccctccatctccctcaccccatcttcggatatccaaattctcaccccctcatcttcgatgatttctaggaaactaggccgtggttacgtccatataaggtttcaagtttgcgacacgggtgtggacggggatcgagaggatgggctaggtgtcaaaggaggtaggggcgactatgaaagtagtgttatcgtagccataacatcaaaggatgacaatgggcgccatggatgggatgaaacgaaagtggtggtaaatggtggtcgctggagataggaaagaaaacatagcggggatattagctggttttggagaagtcggcgacgagggggttaacaaagtggaggattggatggggtggggtggtggggaagggagatggtggacagagaggaggggatgcgatggatgttagagataaggtttgtcctatgcacaagttttgactaattcaataataaaatgtgtcggcgtatatgtatgtaattccttttttatttctcttgaaatgattttattttgtttttcaagacccatctattgtgattactttaacacaattttataaacaatatattgattgaccactatttacaaatgaaaaaaatgcaacggaaccaaaactttggaacacataatttaattggctttatcatttatcatagtttggaatagtagcatttatggtaggttggagttaatagcatttattatggtagttgaaaaagtagcccttacatgaagaatgaggtcatcaaacttagaaacaactttcttgctacctaaacctgataactcaccttacatgttactcaatataagcagtttgtttgtaactgagtaatttaaagtgaccttttagaattgagaaatttatactagcagtatacttgtggattttctatgtagtatacaacaaagaggggtgatttgggatgttaataatcacaattaaaaggtttctcccttctaaaaagttgtatttattctattttggtattgatatacatatatatctataatatatagattttggcatgatttaaatctaagtcacgagcttttgttcaacatccaaagtcaccttctatttcagtgctgatatacatatatctatggctttttttttatcaatttagtctaagttatggcattctgatcgactccaaaaatcatatatcaagatgtcttattctctagcagtgaatctaaaactaaaattgaaaaggggttcttgtagaaaaaaaaaaagctgacgtgagagcatagactgacaatcgagccgacatgagctttgtaatctaaaattgtacatagatagaatgaaaagatagaaaatgagaaaacacatggaaagagtatgttgcaaatatgtagacccctagagtcaacctaggtaagggatccgatacctcgttgaccctatctcaaatcaccaaattcgccttcatatccgatgaaatcttggaacctaagtggcggcacatccagataaagttttgagtttgggagtgcgggtgtggaggggaattgggaggagggcccgggtatcaaaggtggtagggacaactatgtaagtagcctcagtgtagctgtaagataagggtggacagttgtaacacctgaaaattcgaccgataaaaaatctaaactctaaaaatatgggccttcaaaaactttttaaataaattgcatcatgccaattttattcgacgattttattggattttgatttcggaattcatcgatcacaaataggggaaaattaattaggaattaaccctgaaattagatttggttaaagaaataaataaattataatttaaaataaagattatgtaaggataggaataaataaaatatcatcacggccatatttgtattaattagatttaaatgcaatggaacaagaattaaccctaattaaaaattcaaataaattataccaataaaatatgagtaatattaatctagggtgaattcattagttgagataacacaaatattgagtaaacttcatttatgcaagatttagaaattatagaatcaaatttatatgggaaataaactaaaatgggataaataggaaaaagacactattcattgcactctaggtgttcgacgaggttccctagccccttcccctcccctgccatgcgcgcctcgcgccccgagccgtcgccatcgccgcctgccgccgtgccgctgtcacctgccacgccgcgcgccgctcggccgtcgccgtcgcgcctcgcgcctcgtaccgccgcgcgccgtcgccgtcgctgccgcgtcgccgtcgctgttgctatcgcgtcatcgcgccccgcgccgcgccgcccgctgtcgcgtcgccgctgccgcccgtcgcgtcgccttgcgccccgtgccgccgctgccgcgctgtcgccgtcgcgtcccacctcgcgccacgcgccaccgctgccgccccgtcaccgcccgtcccgtcgccgcgcgcgttccatcgccgcctcgagcccgcgccgctgtcgccgtcgccgtcccatcaccgcgcgccgagcctcgcgcgccgccccgagccccgcgccgccgtcgcatcaggccgccgcccctcccctctccttctccccctcttccctataaatactcccccctccatttcccccactccattttcctcttcctcccctctctccctccaccgcgtcgccgtcctcgtgccgccgcgccgccgccctcggtgccgccgcgccgcaccgtgtgccgcgccgggtgtcgctgtcgccttgcgccgccgtcgtcgccaccgccgcgctgccgccgtcgtcgccgccgttgagccttcttccccccccctcgcgtccaccaccgccgtcgctcgggtggacaagagccgagagagagaggaaaggagaggccggtagggaggaagaagaaaagaggagagaggaagagaaggaaaagaaagaaaggagccgggaggagagaaaagagagaaaaagagagaaaaagaaaagaaaagagagaaaagaggagagaaaaagaaaagaaaaaaaaaatagaaattagaggaagattagggaagtttagaaaattgaaaataattagaatttaattatggattaattatagtcgtagaattgcaaaatttaatataaattatggattattcttggcaatttctataagaaatcaattcgcggtaataatttagatgtagttaattactaaacaaatagatgaattcttatagattattatagattatttttgggtaatcctttaagtaatcggttcacggtagaaattcggatttaattactagggattttacccgtgtattatatttaatcatttagtcatagactaaattaattcgtataatatttctaggatttcgtccgatatttagctcgcgatagaaatttctaacctattatatggatataatgctcgggtagattaaattaaaaacttatgacaacaaaatatttatacccgcaaaatagtttgaatcgaaattgggtttgccttagttcgcgaatagtaaagttaatataaagaaatcgactttcgcattcgactttcatttggatttatttggatttttatttgaattctaaccgaattcaaatcaattttcgcacgtaactatagaacccgagggagttgcggatccaagtgaaggctaagacctgcaagactttgagcaggcaagtcatcactattctttgaacatgttgatcccaattgcgaaattattttgtttacaaataaaatcgcatgcaatgatgaacatcctacttgtgagtatgccatgccttgattattgtttacccttaaatccttgtaactatgatttacgaataagtccctagtcaactatgacaaatgcttagaaatgctactctagatttatgcatactcatatttatcaaatgctatatgcttgggcaattacctttgggaaggtaattgagatgcggtatgtggagatatgagcgccacattgccataatgttgatgacatgatttgtgaaaggagaaataaaactaaacaactgttttcgactggggcggacggaggatttgggtggtatccggaaaatgctagtaccgtccccagtcaattaaggaccgagccatgaagttaagcatgaaacgacccccgtacaaccgcacttctcgtatgggtatagacctagcggagtagatagctgagcagaggcagtatccatgcgtagtggtcttcttttaggtgtgtgatgcggcaagcagtctgctggcggatgcccggttcggatggccaggtggatggcagatgcccattccggatggtcagaggttggcttggcaatactacgtgaggatacccataagagaacaatcatgatggactgggttcaacgacaagaaacaacgtaggaatgtgtgtgtttttcccttcccgggagcgccagaactcttctcactgctagaaacgtatgacgcctagagtgcatgagggctaaagttcatggagcgggtactgccaatgcgaggttatcgaaaagctttgccgtgacgcgtctcatgtgttgggacgaggctcatatgttgggcagtcgcggagtgcgggtaaagtgtacatccactgcagtgtgagtaaaccaaatctattcgaataaccgtgctcgcggttattgagcaccgggacatgtattacacttggctagactctaaattcttaacctgtgtgggatgggatattgcatgatgatttctacactgatggagccacttcctgagaggcgggaatgtgggcgtcctcagaaaaccatgacgactcaatggcgggaagctatccttgggatcacaatggatggtggatagaaccgtcattgtttaatatgaacactggtactaaaatttgatcagtctgtgctaggtcttaggcttgtgaaaagaattacaaaacttgctttgcgcaaaagaaccatagccatcctttgaatacccctgtcatatgcattgttgctgtggtggtttgctgagtacggttggtactcacccttgcaatatacaaacttaatcagaggtcggagatgaagcttcggaggatccctacgcttactatcaggagggtgatgaagacgatggcgctcagtaggtcttagttacggtcgttgcctgtggcaatggcgtgccgctgccttgactccgctgccttacctacttctgtttttggaatgtattccggaccgctcagttcgatgatttaagactatgcctgtgggcttatgatgtaataattcgtactagacactcgtgtatgtgcacttggtatttcagctatgaattcgtgtgtaccagactacttgatccagggaaatggtactgtttacacggttgattcctgttataaaaacgggggtccactacagtgggcagtggtaggtggggtgaaaaggaagtagcggctaggagcatcaggtggtgctggagtatgtatctgatggcgatcgttggacatgggaaggaaagcaccacatatgtgaagtcagtagaaaaggttagggaggccgtggattcaataggggcaaggtggaggtagggagattgcggcaaaaagaggggggaggggtgggatgaatggatgttagagaggaagggaggcttagggttcgttctatgcacaagtttcgactaatttggagaagaaaatgtgtcggcgtgtatatatatagtttctttcttttcttgaaatggttttattttgttgttctagacccctctattgtgattagtttagtgaagttttattaacaaatagtggcggatttaggccatttctgtggggtcggctgaccccacaactttttgaaaaacatcctataaaccttgattttcatgtataaatccaaaagaatttagagaaatgttcccacttaaatacaaaccactagtaattgaccccacagatttaaattcctctccgccactaataacaatgtattagttgaccgctattcagaaaagaaaatttatggtgaaaccaaaactttggaagatatgctttatttggttttagcatttatggtagtttggaatagtagcatttacatttagagtgaggtcatcaaactcggaaacaactttcttgggacctaaactcataacataccactgccctacgtgttactcgagataagcggcttgtttggtaagcagttggctgagacatgaaaatttaaattttgtacaatcatatggaacaatataattttgtgaaaaaggaaaggtgaaacaatgcagagtttagaacaaggccttagcataaatactgaagatttgtgctccatcgttatttctttttctatagtacggtcaagacatgcatgttctttttggaccaaagtattgattttatactgagataccatgttctatattcgttggatgttcttctcttttcttcgaaagcctgatgctgagttgcctccacgtgcaaagtgttcttccaagagaagttttaagtgctaatttcagccccaatttcactcatgacacacgtacgatggaatcatcatggaactggaattgttgcgtaggtcctcgcaatcctttgttgtaaatttatccgtcattgcaagtttgaacatactgcataacgacatgtggccaaactttttattaatcaacgtctacgttaaggttttccatgcaaaaacgatgcctttttattttcaaatcttttgagatggaaaaggaaaagttgatgccttcaccttttggtagaagcttgtactgatgatcatggcctcaagtacatgcaatggcaatctacaggtcccttgaaaaggcaacaatggtcggtgtttatttggaccaatcgtatgagattacatcatgccatgagtttcacgattcataagattgcaggatctgacaccaatttcagattgcctgtcactgtcatgcttatgcatgcaccaacatcaggtgtgaagcaagccatcagactatcaggctatcacaatcaggtcgggtaaactggttattatctagtgacaacatcagtggctacttgttcttcaaacaatggtcacagtttcacaatgtaggttcatttgataatgatcagtacttcagtgtagcatcaaagaggaaaaaggaaaactgagattgaagctgattgaaatgtcacaaaatggctcaacaagaacaatgatacagaaaattccctatttatttgggtcgatctttttctaacttactacaagatattgtaatctctacaatacaatgcgctaaccggaaataatggtgctacttttgcaccgaacgtgttctcaagagtttctattggtgttctacattgatgcagcttcctcacatctctcagtgtctgcagctggtgcttcatcacc
